United States Patent Application Publication US 2014/0057251 A1 - sequence listing, part 185

SEQ ID NO: 380216 - DNA, 4184 bp, Cannabis indica
tgatggactcccacatagtgttgatctatcgccattggtgagatatacagtgacctctgtttcttgagacactatttttaattttattttaaggaaatattcaactaggtttacattgcatcattatttttttgtttaaaggtgcctttatataaaatgcaatactatgaaatggatcttttggagactttttgatgttcctttcctctctgagtttggttgttcgaggaaattggtaattaattgaagtataggctctcaagtttcatttatggatatgctttgtttgtgtgtgtaatgaagtactagcagcactctattcccaccctattttatgtgccctcttattgctcgacatatgaaatattattattattagaatattaactctttattactcttgttatgtaatgagaggagtgtaaattgtaaaagatagtgagaaagagagagcattattctcattgctctatggtcatattgaatcctttttcgaaaaattataatttaataatagaatactaacctttttttctttctccatgctaagttattagaatactaatctaatatatgtatataagtacacatgcttctcatactggttttgcatagttcgtcagcgattctccttcattagatgtttcagttggcccaattaaggataatacttttggcaaacaacgttgcataggttttttttgtcttttgtttattaagtgttatccaaaccgttattggtgcaattgtgctctcttctagttctctatgcatctatattattttctgactctaattaaggatttatatggattgtaacattcagacagatatgcaagtgagggagaaaatcttggtcctgctagactcttggcaggaagcttttggtgggcccggaggaaagcattctcagtattattgggcatatgatgaattaagggtatgcatttagcttagcatcctattatattaaagtttctctctcttttttcttttctttttatttatagtttttgtacaaatcaattgaattgttattcactaacagtgaattgaatgaatgacagcgttctggcgtagaatttcccaagcgttcatcagatgctgttcctatctttacaccccctgtttcacatcagaccgtaggtcgtcctcaacctggatatggaatgcctagcaatgcttcaagaaggcttgatgaaactatggctacagaaattgagagtttgaggtgacaattttaatgcagtacatgatctagatgttaggttttgaaaattgctaggcttctgatttatttatttttcgtaaagcttgtcaagcatggatgctatgcagaatgttctggaactccttagtgacatgctacaagcagtaaatcccggtgattctgcggtatgagctatgacttttttcctctcttatgagttacttttcctgttttttttttaacttctatgatctgttcctatgagcttcctatctctgaaatttaatgtgtttcttttgcttctgtttccaggctgtaaaagatgaagtgatagttgagcttgttaataggtgccgcaccaaccagaaaaagctgatgcagatgctcacttcaactgggttagtttcatctatataatcaggatatttaatgaagaatattaggccaaagcaccttcacaaggctgtggccaacacttgcacatgatcgaaaaaatttcacaccattgtcttctactgtttggcagtgacgaggaacttcttgctcggggtcttgaattaaatgatagcctccaaagtttgcttgctaaacatgacgctatagctactggttccccaattccggctcaacttacaaattttagtccacaacacacggaaacaagtgcttcaagtgtcagacagtctgaagttagagactctagtcctagagatgttagtcctagaccaaatgttaactcttcttcgcctgttcctgctaccatgacaaagggccccgcatatgaagaggaagaagaggaagatgaatttgcacagctggcacgaaggttactatctattgattgctaatataattctaatttaatttttttcgtaaaatattattcgtttaaattatccataagctgagatgattttctctttttaccttgcttgttaatattcaatttgtttaataaatgcaggcattctaaagcaccatcaacagtttcccaaagcacttctaatgatacagcggaaggtctggcaattgtgagcataagcagctcaacagctccatcgcaagaggcatccacctctgccacgtgcactgcattagctctccctgatccaccagcaccggtgaagactaaagaacaagacataattgatttactgagtatcactttatcaacgacagaaacctcgccttcctacaacccccagccctatactccaccgtccaaccaaaacatgcatcaggtacctgtttctgccggtgtacatgctggatatccccatgcctctcaacctttcccaactcaaagtcagacaccgtacaacagctatgtagttccatgggctcaaaaccaccaacaaacacaagctgcagcccaaccacaacgtttccaaacctaccaacaaacccaagctgcagcccaaccacaacctttccaaacccaacaacaaacgcaagctgcagctcaacaaccaactttccaaacccaccaacaaacacaagctgcagcccaacaacaaactttccaaacccaccaacaaacacaagctgcagcccagccacaacctttgcaacctgctcaaacccatcaacacgtacaacctcagcctcctacttactcatctggttatatccctccaccatgggctgctactcctggttattatacaaataataatgcatatgctactcgcaccaacaccacatcctatgcaccagtacaagcccagacatctgcatcttacacgccagtacaaagtgctcgaccgttgcagcagtataattctttctcggcaagggaaaatggatcagctaatgttggagagtcaccagcaataactgctgctcggaatcctgccccatcagcaacaggacagaagccctttattccttcatacagattgtttgaagatctaaatgtttttggcggtgcagatggaaggcataataagatgccaagcagtggcacgtcgtctagtttagctggaacttctagccaaggtatggttggtggtaggaagtgaactttttagtgaacagaaatgttttttattttattttgggggggaaatgaatatgtttgtgccaatgtgaatatgtgattgtacatcggtatcaacctttcagtttggatactcattgaaagttgttgagacagctcatagattggaagttgtgattgatcccctctccatatcttttctttctatgttggtgtgttaactttgaaaataatcttttataaaattggtataggttttacctggtaaatgatgtttggttaatttttatatatagatagtttaaaggtgatttcataagtaaagagctacaatcagtagaatagaattgtaataggaaagttacaagttttgggggctcgactgtggtatgatattgagtgccctttgtacagaactgaacattagactttcgtgttgatcaaccctggcttaacctgctttaagaagtttgcatacatgtttggagtggttgattttctcaaattttttaaactaaacagtgaaaataagaaaaaaaaaatctttaaaagttattttcttaaattatatagaattctatacttaattacactaacaaatagcggcataatacttgacactgaggagagtgctagcctaagtgtcagtgatgtcttttaatatttctataaaaaaaaaaatcaactttttgtttaagcttttctcatctatcaagtttggattcctttattataggggtgttcatccgatccaatccgcacttttttggtcaaacaacatccaatccgcactaagttgcggatttcatattttggatccaatctgatccgcataagagtttaaatccaatccaatccaatccgcaatagtgcggattggatcggttattttggatcggttatttttttaataataaattatttaatatttcatagaaaaaaaattaaaaaagactattgtttcttaatcttcaa

SEQ ID NO: 380217 - DNA, 3535 bp, Cannabis indica
ttaaaaataaaaaattgtttttgttaaatactagaacaaaatagaactttttttaaaaaaaatattacaataccctgattttaaatgaaagtgcaactcttatttttaaactaaactatttatattaaaaggctttactactgaaaaacaacttagttctttcgacaaatagacatttatcatcattttgtagttttatatctaatataaatatgtattatttgtacttataagataatataaagtcatttaaccaagaaactattggtttgagattttctaatataaaaagataataataatattttagagtgtttcccattcaagttaaacccttggagttcactttccggggttggaaaaattcaaaccttgtaccgaacacaaaaagtgttcacatttttatctccaaatttatgcataccaaacgtcccttaagtatttcatattgggtattctactttggagtacaagcaagggtatacacgatgaagacggcatatttctttttttgaaagattgtcttattttcttttttaccttttattggcgtttagaactgttcatggaacttcaactttgtatcattatctgatcaggtcactcccgtcccaaaagcacaagatgttcaaaaagtagaaccagctgtacgacagcctgaaccaacaaagcaggctcctaatagtactcccgccgccacccctcttcctattgtcactccaaaagttgattatgctactgaccttttcaacatgctatctatggatggtccaaacgaaaatggcccagaaacagcatcaactgatgataatgcttgggcaggtttccaatgtatgtctgcgttgctccgatgtcctggaccatgcaagttgtagtatagatttgttttttattacattgattaagaaatgttatttataacttactatgcatgtagctgctgctcaagaaccatcaacagcagagaaaattgcacaacaaaaaccagttgagagcaataacaaggccaactcaggatttgaggatctatttaaagatacacctgtattaacactgtttctgagaaacccaaagacgtgaaaaatgacatcatgagtcttttcgagaaggtttgtgataattataactttaaattatattgtttttctaaagaaattacttgtttgatgatttgttgattaaaaaatgttttgcctgtttaaacaatcggttctgttatttctttccaagtcaaatttttgtttccatttcgcaccaagttaataagttttgcaaaaatcttttcatgattgcactactccttgaagttatctgttaggcaccgaagagtcaaataattagaaataaattaagtagtggggagtgtgaaaaagtgagttatattttgtcattaatgagtgtaggtgtacgagtctttgtagaaatattgaggtttttttttaaaagaaataaaatagtgcaagagggattcaaagagtattctatgaatttggattagagctgtttctcctagggagaggggtggtctcttaataccaccaggttctttgtattgtctctgtttttgtgtgagagtttatttagctcctaacatattatctgttacttaactaataaattcttgataatatggtaatttttaatgttttcgttggaaaaatagtcaaatatggtctcgccatttgctatgcatcaacagcaacttgcaatgctggctcagcagcagtcacttctaatggctgctgctaaaggtgaccccaaatttcctgccaacacacaaccattgccaaatggtaccaatgtacccattcaaagttggcccaatatgggctaccaaattcctggaatgatgcttccaatgcctgggctaggtgaacagaaagttacacaggtagattgaacagtaatccttaaatggcgattcaattgattgttcttgtgaatctcacattttgcttctttctcttgagtcaggcagtgaacttgggacagtcacatttagttgggagctctgttccatatgcaacgtccaggtatgttttaaatccttgccctataagagtttctgttgcattgtattctgaatttgttggactcttcctgaaaattattatatttctgttttaaataaaacccttcctgataattatctttgtttgtcatcttttaagacaaccccttttattattaattccaataataattttctttccctaattacttatttttacaaacaaaccaagtgaatattgaagtgtcatgcttcctaatgacatcaataaattatgaataattcttttgatttcatctcctaacatgatgatgtacgtagttgtgggcttgattaattaataaatgcaatttttcccaagaaaagtaatacttgccttgcctcacatgtcatctgtaagactcataacagatgtctattagtgctcgttttatctttcacattggtaatctttgctcttccatttctgctttgtagtttttatgctatgggacaagttgccccagttaatggcgcagcaagtgctggagctagcaaaactcaatcgccatcaccaatatcatcatctgcatcttcaacacaaaccgggaaagattatgatttttcgtcattaacacaaggtttcttctctaaacaatgattagtcttttgggaggcaaaaatgcagggattggcttacctatacagaaatagtcgagttacagaaagatagcatttattttctttcttctctttggttgttactgtctttttcttcacatttttactgtcactggtattgtaaactatttgtagaggcagtgccagtttttggcattttcatatttggttgatttcatcatttgtacgagtaggtttttctgaattaataagaccaattactatttgttttgaactcctttcccttcaaaattgatttgtggataagagataatcttccatctaaaattaatgcccactaatgcgtagtgattgcgctctctgagattttttttttctttaacaaccatgtggataacattctacacttaaaactagtttaatatattagtgttggagcacttctaattttagctcatttaaaaaagtattactttagtggtgttttgaaagtttgtgtcaaattttcctataaaaagaatatcaaatttagcaaatattaaacattgtaacgaatttgaaataaaatatacgaaggattcaagttatattgtttagtgattgtcaagcattcaaattttggtaatcaggttatggctctgtatgcctgtaagataaagtaacaatcctactgctggcgagcttcaaggtctgctactgattatggatctccatgtgaccaccactgttattttcaatcaatataaagtttttgaggtatttcaagaaatatttttatatttattgtgctatataactgaatttttagtttataagaaatttatgggtaattttttatttatatttaataaaataataaaatattatttgtatataataaaataataaaataaaaataaaaca

SEQ ID NO: 380218 - DNA, 4347 bp, Cannabis indica
agcgcacctcaccaatcggcccccacctaccctgctaaacagcgacgttcctcctccgcagcagactgtagccatgcccaactttggctcaatcggtcgcccactcggacctttgtctcctttgccacctcttccggctgttcacggagccgccgagtcacctgtctctgcttacatgcggttccttcataactcaatgtccaccgttgatcccaatcagaaacaagcctcgggattctctccgctagcacctttggtctcgcctcgttggagcaactttacaccacaacagaaccatcatcccgttccaccatcgctaccgcagcaacagcagcagccgcaggggatgcttcctccacctccagcgccgtctatgatgccgtcaaattctcagttccaatttccaacgtcaccacttccatttgggtgcctgaactcgcccaagtcacaatacaatctgctttcaccttcgtcgggtcagctagggtttcctcagctccctctttcgccttcagtacccgttccaagtcctagatggagaagtttctgacttttcaggtaaacgggagtttattgctaaacgctgtcgttttggggttctttgttctttctttttttttttttttttaaattacattttaattcttgtcttaattatatctttatttttatattttttgatgttttatttgctttgtacatttggggtatgggatgtttattcaacacaaatcatagtggttggatggaaattagtccaccattgagttaacttagggagtttgttctttgtaaatggcatattagaagacattttgggttaaagacaaacacagaaagagatcctagatttgttctttgctcatgtttggatcaagttagggggaagttattaatatatatatagatagaatctgtggtggagggatattactgtttttagttattaaatcttgtgaaaaaaatgttgatggactcaattttctttatgggtcttttaatgtccttcctttcgttccttatatttatttttttattttttattttttttttatttaagttgcaacccagttcttaaaggtgaaaactagtcattgtagttctttttcaactggtgttcactactttgctaaatatgatcaaacctcacatcttaatgtgaccaattttagaacaaattttggtttcctataagtggtaaaatcttgcaatgcaatgactggtttagttctcctttggatgtatataattggaacatatgaatgtatgtaattggagcattgattatggcccacaactttcatgaggccaagcttttagaaattgagagttgaaacttgtagatattagtacacactacttgtcgactagtgctacttactagtccattgctgaaacataattgagctttggtatgagagctgaaggtgcatattataatgcatattgcttaattaggtgtttactaatgtaacgtgccttcttcttcaaaaaccaaaacttggctgttgcggtgccatacaaggtgccacactattgtgtttatggctttgtattatttaagatactctttctcgataaacaatgaatatggataaaccaagttgtggtaccttgtgcattccttgttttcttacccctgttgattttagtacctttcattgattaaattttcttactaaggattttagaggtcctgtgtgttcaaggaaaagaataaaaatgtggattatttccacaagtttgaggttcaactgttcaagtcctttctatgtgtaaattttttgatccaagattaggtggtgaggctagttgattaaaaaatagggaaagaaaaagaataggagtttattatatccaaacactggatgagttgctgcgaccacattttaggcttccgtgaatttttttttaatattgttattaggcaccagtagtactccaacaaaattatcatttcggtggtggttaacattttttatagtagtaatgaaattaaaatagtcgcgatatgatatcttttgatggtattgaacagggctttctttagcatttttttttcctttctctcagatgttttttcttttactctttcttgtctgcatactgccatatagatttgtgacaaagagaccccttatgtcaaacaatgaatagtttattagtattctttaatgactttgaatacactcttctctaaaaagtagacacttgaactatttataagcctatcttgatgagttggttcttctttcatacgttgaactgtttctaaagtgatgttaatgggggctcttataatgtccacacgggaatttttggcttagtaatatctttaataaattgaatattctatatggaccagcgaggactgtaattatttcactttgaattttttgacttgatatgtgggggatggatgcatgtgattgtgatttggtaaaatgagcttagaaagaaaaagaaagaccattcagaccaccactgaccacttctttaagcaaagcaaaagttgaagcttttatagaagttataaaaatatgtctcaactattctatcctatccctgagacaacttgatgtagacaaacaaacaaacaaaaaaggatctagataggtatttctgagactacaatggtatgtttccctagtaaccatctttagtaccatatttgtattggaccattctcgtgttgtctttactctttaatggtaatcttgaaataaagcttctttcttggttccatcgttatttgctttcgaggatttgtacgtcttgccaaaatacaaattaataccaatatacatgttttcagacttaagtaatctctcaaatgatatagcattatgaaacatgtatacttataaatttagatgtacattataagggtaacttttatcatctataaatttttacaaatatcacaacctaaagatgttgaagcgaggactcagttgagagtttattgaacttttttttgaggaaaaataaattggccttattatattcttcaagagcaagtatcaaaaggggatatatgtttggtagaggggagagagggagggagggagagggatagaggagttgataaatgcccttgtttggcaagagaggtaagggagaggattgattgaagggaggctcaatctcttcaaatatacaatttctaatctctccaaaatgggagaattgaagaaaaagacaaaaaaaaaaattatataaaatgattgttttaccattcaaagtataatatataaataataaaatagtaattttaatatttattttactctctatttatttaactttacttctaattccaaacaacacaaaggggagtaactatcatcctttatccctcttatttccaatcctttcaaaacttttcatccaacatattgtctttccttcataccaaacacgccacctcaccttgtttttttagaactccataaaacaatattaccattgagataagtgcattaaccacttgtagagcgtcgatcgttagggcagtaaaaccgacaagatcaagagaattagtgactttgaaatgaatgccatgagtaatggtacctttaagatattgaaggacccatcttcaagcatgctaatgtagttcagtaggagcttgcaagtactaatttaacttgttaacaatataagagatattaggacagatgaaaatcagatattgaaggacttccactgtgtttctgtacaaaaagggatcaagcataagatcaccgctagttttggtgagaactgtggaggcaacaacagtagtaggaagtggtttagcttcatcaagcttgcctttaacaaataagtcaacaatacatttggactgagtcaagtataaactatattgatcttggtaggcttcaacaccaagaaaagagtgaagattgtcaaggtccttaagggcatactgataatgtaaatcatgaaccagtttagaattcaaatgagcattggtcccagtggctagcaagtcatcaacatacataagaatagtcccctggcggcaatatatgaacaatgacacatcagatttaggtttaacaaagtcccatttacaaagagtagtttgaagtttttcaaactaggtgcggggggcttgctttaagccataaagaaccttggtcaatttacacacataatcagggcaagtagagctcacaaagccttggggtttaaccatgaacacatcctcagtaagcagaccattaagagaagcattgctaaagtctatttggcgaatattccatccttaagtaacaacaatggtgagaactgttgggttttatgccctaaataaaactctttacaatctgattagttatc

SEQ ID NO: 380219 - DNA, 5931 bp, Cannabis indica
ggttatgatttggatcaggtcggatcagagtcggatcagatccgacccgccccattgacattcctattcgtggtggagaaagatgtggagccttaaactactgtcaaaatttaagatctttttttgtcgtgtagctcattttatccttcttgtcagctctattattcataaaagaggtatctcagttctgaatagtatttttaattatggtaagcaatctgagactatcttccatgcacttttttttttattgtccttaatatatagtttttttttttggggggggggggggggggaggtaatacgttcttggtgtggtaaacttaaaggttggtgtaaggggtgcatgtatgatgtgctagattatttattctcatcggtccttattcaagagttagaggctattctaatagtgttatggcttgtttggtttgaacataataaggtatgacatggtgaggagtgttggaggccaaaccacgtgagtgtggcagctggtttgctactttatgaattttaagaatctggctattgctaatctaaaaattgacaacttcatgggaacgattatcaccttggcggctttcatttctacaaccttagactaatgatgaacaatctatttatacctctctttagtctgatttgaatgtgtggcgcccctccacatctggtctctagaagatgaacatcgatgcggctatctgttccagtcgtggcttcctgggattcagtgaaataattcaaaatgagaaaggaggtttagttctattctacatagcaagaattcaagcttatcattcaccctttacaactgaactcttggcaaatttagaagctctccaatggtgttacaaggaacatattaatatagacttttgaaagtgattgtcttaatgtcattgttgcaattcgaggtcattttgatagtaatgatagaagtttagacgatattattgttggggatatctaactttttatgcgactttatcatgttggttcatgttatgttgttccccatgaaaagaataagataactcattacttggcaaaactttgtctataggaagattattccaagttatcttttcaactattgaaaggtgtattgcccactttttttatagagttgtatgatcatttttctatcaatgaagttactcaaaaaaaaaaaaatactttatttattatataatattaaaaattatttaagacattaataaggaacacttttttttatatgataatgctcttttgtgaaaattgtatgttattaccgttaaaagcagatttaagtattaatgtgtgcatatgtaaaagtattattgtaagttttaaaatatattttctcaaacaaaatatattataaattaataaataatacatatgtttttaaaaaattaagttacctaatattttggctaagtaacgtgacacgtaattaaagagaagacatattatcatgaagaaggattgtgaggtacaccccacaagaaaatgagaaataaagtatgacatgccctaggtatacacttgggcaacatataggtgcctcccaagtggtctttggggtgcaatttgtcaattccaagtcgccttcacagaaagtgatatgatacgctctgcaggaagaaaaagtgaagcccgatgtgcccagatatattgctctataacctgggctacatgactttgttctgggtagattttggggtgtagatttttgatatcaagttatcttgtactctccacagtttgggaccttctaaaattaaatcaagtatgacaattaaactaagtgtatcaacaacttaaagattatttccccatgtatacacttgtgaagcgtacaattagggtacgaaggaagaattatctcaactatgtttgttaccccgcgatacaatccttgcacatagggtttacttaagagataagacatgattcgcaagaaggaaataagacaacacaataccgttctaggagcacatgtgtaacttaggcaacatacacatgtgctctcttcgggtggttccgggagcacaactataccctaggtggcatacacctgtgctccccctaggttgttccgggagcacatatatgccctgggcgacatacacttgtgctcccccttccctcgcctcgggtggctttgggagcataggtataccctgggtgacatacacctaagcttccccccctcccccccccccccggccgggatgtgaagaccaagccaagatcttcatttaatgatgaagatcgttgaagaatcaagatcaatcaaatcccaccgactggggaagctgattggggtgtgaatttgggcaatttatgcaaattgattcctttttttagtataaatacgagccttccatctctttggaagatgttaacaatttcatttgtaagtagaaactctacaaaaatatttgtaaatctttttgctctcaaaaaattcacctgagctttttttgtgatcttaagcgtaaaactaaagataatacaactaaaagagagtaaattattagtgtagaaattgggactgaacctcaataaaaatttggtgtcatcattgttattgtagtctttgttgttatttatttatcgtataattatttttgtgactttgtgttagttgaccatttttcaggtcaacataatacttcttatattttgttatttaaatacaaaattaataaaattaaatatacgtcgttcaaatactaatccatgataatagcattgctctaaatataaatatttcaccttaaaagttaaaaatgttaaggagggccttaaagagctaatcactataaaaaatgatatactatattggtgcaattcaatatcagatcgaacccatttaatttaataagtaatatagaaaaccgctaacaaatacaatgtttttaacacatcggtatgatgttgagcaccttaaggtacccaataacaatgctttaaataaattcacgtaaaatacaatatttttattttattttttaaatataaaatacaacatttaaaataaataaataatgaattcttgatatatgttatacagaaaccggtaaaataaaagcttatatattgcaggtccctaaactatataagttttggtaagttggtctccaaattttattttttagcgaattggtccccaaactatataagttttggcaagttggtctccaaactttattttttggtaaattggttctcaaacttttatttctttagcaacattaagttcccactattagatattgatatttttattgatttttatttattgtaaatactttaatttacttttttgtattaaattcaaataatttcattttgttttaattttaatactttaataaaaataattatattaatatttttattttttaaatactcacataatatatactgtataattataatatttaattttttctaaaaatatttaaaatatactttatctatatatattattaataagaaaaaagatataaatactagcggactcatggctagagagaattttaaccctctcacattttatattctaacatctatagtatattttaattgttcatttttgaatatgtagtactataatttgaataatttttttaaattgtatatatattaattatttatattttgcatcaacgatagtaaaatttcatgggtttgttgaagaacataaattaaaaataaattttaaaatataatttttgttcttttcttcttcttattttgacatatttaagaaaatacatataaataaaaaaaatatatatttatttaatttaataatatattaatataaaactattttaaaactaatacaaaaataaataaataaaatactatagagtgaaaattatatttccaaaaaataaatttaagagttaatttgaccaaaaaaaaaaattaaagtttaaagactaatattgtttaagaaactattgtaatagcctaaaataaataaataaaaagtagaaacaccactttaggcttcgccgaaggaaaaggccaaaggaagagcatataatcttattttaggacaaaatgtagtcaagggtaacaggatcttgctttgctattattgctgatcaattacataaaaaaaaaaaaaaaaactattgataatttctccattccattccaacgatgcacgtacataaaaaagttttcaccttttgaaaatgtcaaaaccaaaaatatgaacgacactattagtccaccacctatcccttaatcatagtttctaaatttatctcccaattttctaaataaagcacaaccttaatttgttgcttaattagcatatatatcagatgcagttggccacaaataataaaacaatattaaacagacaaaaaaaaaaaaaaacatgttgaacgcaatggtttgtgtgttctagtaattaatgttgttctaacaaatattataatttttgatataataaagcccattttttttaattagctaggtttctaataagatctttctatttatctttatttctaagaagctgattttgatggagattactaaacgacaatggagaatggtggaatttttctacccaattttgttatcatcagttttgattttgaattatggcactattatggctacagcagcaggtgaaggaaaaacaagtggtggtggtggcgggaaaaagacttacattgtgtatgtgaaaagaccagataatatgcaacctctttcatcaggacgcaaccctttagatccatattatcaaacatttttaccttctactattttctacaatgtagcacagacggcggcgaaagtagtggtggcgccgttttccatggctttggcagcggtggtggagtggggtccggggggcacgggaccagcggcatggttcacacgtaccacactgtggccaccggcttcgcagccactttgacggaggaggaagctaagcaagtggcttctaaagacggtgtcatctcagccgcaccggaaaaagtctactctttgcacaccactaggagtcctgacgtttttgggattgcgccaagggctgggattgtgggacacggctaagttgggagcgggtatcacgatcggtgttcttgacaccggaataaagccggaccacccttctttcggtgacgaagggatgcttcctccgccgctaaaatggaaaggcaggtgccattttcccggtcgtcacgtctgcaacaagaagttgatcggagctatgaatttggtgagcgatgactcaacaggaaagcgtttagcagtggctccttcagacgatgaaggacacggcacgcacacggcgagtacggctgccggaaactttgttaagggagcaaacgtgtttggaaacgctaacggaacggcggcaggaatggctccgcgtgcgcacgtggcggcttataaagtgtgcggagtggagggttgtaaagagagtgacattttggccgggatagaagccgccataaacgacggcgttgatgttctctcaatgtcaatcggtggaggagatgttgaacctttccacgctaacgccgtagccatcggttctttctcagcaatccgaaagggtgttttcgtcagtgtctctgctggtaattccggcccggatcattacacattgtcaaacgaagctccttggcttctcactgtcggagcctcaacaatcgaccggaaattcaaagcttcggttaaaatcggtaacggagagtcgttagaaggacagtcattaaatcaaccaaagtcattaaactcggcagctatggtaccgttagtttacggcggatcaagtaaagttaacggatcaaatttctgcgacaacaatacgctaacgagcgacgtcgtttcaggaaaaatcgtggcttgtgacagaggtgggatcctggggagagtaatgaaaggagtggaagtaaa

SEQ ID NO: 380220 - DNA, 3943 bp, Cannabis indica
aaagccttttccatgtcaagcttgatggcagcccaacccagcttaccagagcgcctagagtgaatagcgtgaatgatttcatttgctatcaggatattatcaatgatttgacgacccttgagaaaggcgctttggtttttgctaataatcgagggaaggacatttttgatacgattagcaagaaccttggaaatgcatttgtacaaagtgttacaaagacttataggcctaaaatcacagacaagttttggatttttctttttaggtataagaaccaaaatagtctcattgatcaaagaaatgtcaccctgatgattcagaatatggagcatagcacgacagaaatccgagccaaagatagaccaatttttctgataaaaaagaggattaagaccatcagggcccggggccttatctccagagagactgaataaagcatgtttaatctcaacctcagtaaattttccatcaaggaaagtcgattgctccgaggaaagcttgggactgatctcttgaagaatggaattgatagccacatcacagaccccctgagaactgaaaaattggtgtaaaagttaaggaattgggaaatgattgtaggagagtcatgagtaatcgagccatcaggaagggtgatatgtcgaatgaaattattcttccttcgaatagaagctttttggtgaaaaaaatttgtgttcttgtctcccgcacgaagctaatcaactctggctcgctgcttccagtagacttcatccttaagaagtaatccatctaactcggattgaagatgagcggcaagagttaaagattgggaactaggctggtgatcatttaagactcggtgaagctgagcttgtgttctagaaatttggagttggagaggatactgagacttgctccaagatttaagattggagagacaggtcgattgcttgtgcagaaaacattgaagcgggggagagacagaggaaggagaaggagtccacgaggaatggagaagattgagaaacgagggatcagtgagccagtggttttccacatgaaaacgagatgatttacgattatgaagactgatatcatccaatataactttgagaaccctgtggtgggatccgtaaaaacccaaatgaaagagagaggcatgaagaaagagattttgccaaagaggattggtggtacaccaatccagacactctaaaatttggccatgcctccacgtaaatttaggccctgaatgatgaagtggggtatgatcaaacttataaagaaatgaatgaaaatgatgcatagcatgaggcggaggggaaatagtcgagttcctatcaccaacagagagatagtcattaaaatcacctatgaccaaccaaggcaaaaggggagcagtgtcaaaaagacagttaaggagagtccaagtaacatttttttggtcaaaataaggtgagccataatacccagaaaagtgccagttcatatcattaaaattatttataatacaatcaacatggttaagggagtaagagataacagtaacatcaatacaattgttccaaaaaagcaaaagaccccctaaaccctgcctaggcacttctagaacattatcaaaatgaagtttgttcttgaggtgcactccacggccagcaggcagcttcgtctccataacaaaaaacaaaattggctagtgttgcttaaccaggagggagagattacggaatgctcaagaactccctaaacctcgagcattccaactgtagagactcatttatctcggcggggccgcgtagcagcacccgccgttggctcatcatcagacattgaaggaaccacgacgtcttcagtgacaaccgcccgagctctttccagcatgctatgcacagagcctccaacctgggcagtttgacgcgtgaagggtcgtctggttccagaggtgattccaggagaagcagtggatcgtggttccccaattaccacgcccttgcttccacgattttagggtgaagggctgggaggcacaacaatagattttcctttgtcaatatggatggtaacagagtcagtcataatcggttggggtatggtagtgtggggtaaggatgcaggtagggaaatgggaggatggttggaatcagcagttacaggtgcttggcatgaaactggaagagaatcagaagtttctacccggaggaattggtccacagcttgttgaagggtttgatcatcagtccttgatcgaggaaaatattcttcataagggatggaattagagagctcaaaggggttccgtttgtgctgagtggaagtagtagcacagagagtttccgtgtattccaaggcaggagggacagagaaattatcgcatcgcataagatatttggtgcacttgttgtaggcgtgatccacataaccacaaaaataacagaaattgggaaggctttcgtacttaaaaccaatccatttagggtcattgataccacgaaaacgaatagtcatgccccgacgcagaggcttggtgatatcaaaaagaaccctaagacggaggtaaggaccgaaattctcaagcaaggagagaggaaagatttcaataagctcacctatctcatcagcaatgaattgagccaactgagggcttttgagaccaaacggaatccgatgagcctggacccaaaaggggacgtaacagacagagtcaggagttggggtaggggacacatctgggtgggtgaaaaccataagaaatttatcaaaatgccacggttgttcttcaagaacacgacgacgatcaccgtcgcattggaaagaggcaaggaataagccagagtggtattcagagatctgaacaggaaaacggagggtccaagcttcaaacatggctttctctatccatgaaggtttcaccgatttgggagacaacaacttgaaaaacagacagaaagagttgggttcattgggtgagtgcaaggaaatgtggtcaaactcgtgaataagactctcttcatcttcaagggcagaacgaggaatggggtttcgagaagaggacgccatggaaatcacagaaaagggtaaaacagatttggaaagagggaaagaagaaggttgtgaaatgaagcattgcacacaggtatttaaataagtggtggcataaagaagcaagagaagaagatacctggaaaagaaagggcacctcgaggagtaaatcggtccctgagctgcctcttcagtttctgctagagctgtctgaagatggaggcgataggtaatgatgagattggggttaagacagaaaatatcccaaatgacggttggtttagctctgtgatttctcgagggatagaggaagagttggagagattgcagaagcattaattgcgagattgatggtgccgccaaaattaaatgaagatgtgagagagaaagagtattaaagactgtttgtgctcgaaaaaataggggatttttcataatgattaggatgccgacttaagtaataaatgcaagaccagagtgaggggagttaatgcggagtgaggatcagagaaaaaggatctaaaaacagattatattgaaggaggaaagaaagcaagaaaatcttgcaaagattgagaccagagcaaagcctgtaagaagcttcaattgatgatgttgaataactaagagaaaaaaatgagaaatgttataaaataacataaaataaagagaaataagtgaaaagagaagtgagagaatgagagagtaaataagaattttttagtaatttattttaatttagtgaactcataaatagagatggaaatttatacagcggggatgggtaaccgcgggaaccagcccctaatgggatggggattccctgtcttggtggttaatgggacggtggtgggagacaatttcaatacccgaagcggggatggggcggggcggggataatactatctgttgggttttatgc

SEQ ID NO: 380221 - DNA, 3224 bp, Cannabis indica
ttttgtattgatctaactagatgtatatttttagttcattcttctatttttttgttgctatgaggtgccctccccttatttatatttgtgcttgttagatcgcctgcggcataaatttcaagtacaattatttaataaagagagatgcatcacataatggcatcacttggagacctggacctgaattttctctatcagtaccgctacttgtaaaacaaggtaaggatattgtggtgagggactcgtgggtgagatcaagtaccaagttgtcttctgggcactcattaatgtcatggattgaggattcatatcttacaatacaacctgtaatcttggaacgagacagaggtaatatctccattctacttccttttcatatgcaaaatccttcattaaaatgtttctgaacactcaaatgtgtacagtgctttgacagatgaagatgagacagtgaaacaccttaaaagtgatatggagttgccatcgtcaaatcacctgagaataaaggatgaactatttactgagagtggcacagtcactacctcttatgaaagctcagtttctaaaaggtctttcactgaaagatatcagcctgtagaggaaccttggttgctccaatcacctctattatctactgtctctgagagctatgagattgtgacggatgacatggaaaagttggaggacccaggaaagttgttgcataaggaagaaaataatttgattttgaaggagtctgcttctacaattattttgatcaattcttcaatatgtaccatgcaaagaattgctgtattagaagacgggcaattggttgagttgttacttgaaccagttaaaaccaatgttcagtgtgatagcgtgtatcttggggtgatcacaaaacttgttccccatatgggtggagcttttttgaaattgggagttctagaccttctcttatggacattaaacaaaataggagccattcatattccctccatttcgtcaaagaacaactaagctagaagttaatggttctgtgattgaagctattgaagagcatatagacgctcacggaaacaagaacacaatacttgatattgaagtaatggatgagataacaaatgtctcccaggaagactctgaatcatctatgcatgatgatgatgaggatcatgagactgaggatgagcttgatgtttctgaagctcttgcagacaatatgaatggtagtattaatggtagttttgttgaccatggcgaagcagaagctaattacgagggtgatgatacaaatggaagagaactcaacataggaggagaagccaatactaattccttttacgctggcataaatgtttctggcaattctcaaatgcctgacctgcaagatattaatgattctaagaaaaaaactaaaaaggattctaggcaagcaactactaacaaaaacaaatgggctgaagtacaaaaaggcacaaaagtaatagtacaagttgtcaaagagggtttgggcacaaaaggtcctacactaactgcttacccaaaacttcgtagcagattctgggtatgttccacttccacctcatactggctcttgttgctttcctatcttggaattgtttaagctcttcaaagttattttatataaggtctgagctgagtccacttccttgcaggttttgagtactcgctgtgacagaattggagtgtcaaagaaaatctctggtatggagcgtacacgcttgaaagtcattgcaaaaactttgcagcctcggggtttcggtctgactgtcaggacagttgctgctggtcatactttagaggaattgcagaaggacttggaaggtctgctttcaacttggaagaacattgtagaacatgcaaaatctgcttctcttgctgcagatgaaggtgttgaaggggctgttccagtaattctgcatagagcaatgggtcaaactctctcggttgtccaggattattttaatgagaaggtcagtgtttatgtcactcatttccgttcattttcttctttctagtttgtaattaaagtacttgtattaaatgtctgctggtttattgcccacaatagacttatttactcattggttgtttttgttttttcttattctaggttgaaagaatggtggttgactctggaaggacttatcatgaggtataatgtgattttagaacggaaaaaaaaaatgttaatcttatattttagcaagggaataagtaatataacattttttgggttaattttcattttgaaaaaacaattgccttaaaagatatatatgctgtttttcaggtatgtaattaccttcaggaaattgcccccgatctttgcgatcgagttgaattacacaagaaaggaattcctctttttgatgaattcaatattgaagaagagatcaatagtattcttagtaaaaggtgaggccactgcaactttcttatgatactctttgtcccttgccttgtcctactatactattagaagaagcttttaattgaaatattgttccatgattaatttgaggtttataccaagtcacctcttctttgtgaaatgatcattgagcatgtagaaaattttgttcttgctcccatacactgaattatacgattttattttttttatggtttgtagaaacagatgtaagtgacttttaaccaaaacacaagggcagtaaacagacatagttggactttattttaaaagttgtcatattttctggagtagcaaagggaaataacactttttaaggctgacagtgttataagtcagtattataataaacattcactcagattgtaatttagtttgtttttgttccaaataaggggaactatttctgcaatactggaaatttaaggaatagaagctttattacggctattgttgtacattgcagggttcttctttctgaaggaggttctttagtaattgagcaaactgaggcattagtctctatcgatgtgaatggtggtcatgtgatgcttggtcatggaaattcacaggaaaaagctattcttgatgtcaaccttgcagctgctaaacaagtttggcctattctgaactctttttgctactttacatgcatatgcatttggtggtttcttttttgttacctcatgtcttcccttctctttggtatgtggatttttaaaagggaataaaaaaatccaaagggttcattattgtttgtattcaaaaaaatataaataaaaat

SEQ ID NO: 380222 - DNA, 3110 bp, Cannabis indica
tatcaaagtccaaagtatcaaggactaaggtgaaatccatcttgcaccctcccgaggctgagggagaaggagaggaagaataggggtagtccaagtcctgccttttggtggctttaatgaaaaaggagaacctatctctgaaataggagaagtcttggaagctagctaggattacgtagaggaggagtacaccgaggctcttcccattaataggaggcatccaaggggagctcagtgggtttttccaccgtccatcctatcattcaagagattgagcaatttcttcggggaaggcctcctcgggcaggttgagtgtttccttccttctcccaggtagctcgcaacagatcctagagatggatactgtatgtgatcaggtcctcacgctaaacagggtgcaatgttgtcactacatctacactttaaggaaattacaaattactaccagctcatttgaaccaactcactcctaagggaattaagtacgtatctgccatgttcatgttgtacgcttctcaaggttgggttcagccgtccacctaggacaccaattggctgtttgacttggtccagcccaaagcaaaatagattggggtacttgtacttctcccagatcgaaaaaaatggttgagtggcactacgaatactgacatgtccaaaattggtggttatgtggaggactactactttgtcaaaggcatggacaccaatcacaccaaatttcaacacattccctactttgtcgacctactttcacactggaactcaagaagagggtctaagaaatacctagacttcccttggatgctcaaaatatgtcactcttagctattgaggccaacttcattaaatgtaagctttacccatctgatggtggttaagggaccgagcaagtaacagaatgggttgtggttgattaggaagaggaggtcacacctcagcaagaagcaccaaagaagaagaatcagaagaaggctcgctaaggtaaccaagtatctattgagcggcctatcaagattagagatggttatgaggaggttactcatccttccatctaggtggaaggaaagggaaaggccatataggttgagcaagaagaagaggattgttctaatgaggatgctccttctttacttgtttgagaaagtgctcctatacatttacagggtaaaccatttttcttaactttgtttatcctcactttgtttatgctttgcttacatatatttcctttatttgtatgcagttgtgtctcaaaggatgttgcgcgcactgaagaagaggtcaggtgatgtctccagctagaattctccaacaaagcatcccaaagtggacgacacattgccaaagataattgtgccgagcactaagactccttagttgactattgagaggagttcaactatctatgcctcagatgttcctgaggtagtggtttcaaactctatcccactggccaagaagaatttgaaatctcaatccgtggctgccccatccaagggctctaaggggcgagcactgaagagcccaaactgcctaagccttttgctactcctcttgtactgaacccaaaaacaaaaaaaggaaaggagatgctcttattctactaggatcatgtgcttcctgaagtaaatgaccagttagtcagtggaaaggacatgtctgtagaactactcatggccagcttgctaaaggaattcacccaagtaagtattttcctttttttcttacacgtgcttttacccgtgcaagctttaatcttttctcatagtgcaacttaatctgaagatggcatatacatactcttgtgccaagtctacagccttgaaagtcacgacaaccagaaccaccttgaaagtcatgacaaccacaacaaccttgaaagaagagatggaggaggctcaaaagtatgtcgagctgaagagtactcaacaggtcaaggttaataagcaactcctagctactaacaagctcattaaagactttaagaaggagattagtgatatgtcgtccactgctcaactcgaggcagacaatgaggccttggaaaaggatgtaaactttcttaaggataagagggaaagtctctgtactcttctttctagtttggacaccaaactcaatgatctaactgaggagaagaagagtttgcagggaacccttgactctgagcgagcatcttttagtgctaaatgggaggttcttcaaaaggaggtggagagcatgtagtcggttgctctggatgtcttttatgaattttagagggctaacctagaggctaactttgattaccttaatgaaagaaggaggcttagcttagtttctgtgaatcccagaaagccaaagaagaggccaaagcaactagcaccaaccctcctaccgaccatgagcatgagactctagacactaaggatacatctgatccatataaagaaccaaggactcctaccatttaatatttcaaaactttttcctttatcagtgcggcctatgggcctatttttaagtgaaatatggtcaaccaagtggttattaaacttggcaaatatttcattttgttttaagacaactggctggctaggcagcttttaatcccagagttatcatgctttgttaccttttaaaaatgaatattttctcttaagtctaaatgattgtacatgtaaatactttttgttttttcgagcttgttactcacctatgttttgtacgggtgtatagttgccctccaagtgactgagcaagcttatgattcttggtcacttgtatatcataagttcacttttttctatctggcaaaccctttgtacgtatttttgttggtaattacataacttgctatataaaagataaaatggacataattagaatgataattaatatcgttattcatttattggtctaaatgtgttgttaccacagtaacgtacatttattaaaatataaaagccattacatgatctaactaatctttagctaattaaacataaaataattgaacagtatattccgcccaaaagatattgctgaagaacaatgatttatgatcatactatagtttaggggtggtcatccgacctgagtactagtttttttttccaaacctttga

SEQ ID NO: 380223 - DNA, 1319 bp, Cannabis indica
catatttatgtatgtctcatgagtcatgagctgatattgtacccctaacagtgtccactaccaaactatgtaaatcttttttttttttttttggaaaagaaactatgcaaagcaaatctatcttggatcatatcttaatcttattcttagcgtttataattgaacaaaaaaatcaaaccttcatgatcaaatcaatcaaatcaaataaatgtatgaagaagaagccaaagaacgtattattattattattattattattattattattaataagccagttcatgatttatttctgaaaatcattttccaccatgcattagtgcatggctgttgagaagattttatttttattttttcatatttaaaaatccttacagcttctaattatctaagtttcttctggttgttataattagatattgacggaccaatcacacctaacctagttgtatggtgtgttccaatttatgccatgtttattattttttttaaggtataatttgtgagtttatttggtttttctttttgtacacttttttttgtaaatgtgttattggccattgaagaataagattattatatatattatttgtgaaatataggatattttatacaatattgtaatattcctaagtgtaacatctactaataaaacagattattgttatttaggcacattaaggtgtctaatgtgtcactttataaataattaataattctttatatgaatatgaattgctaaattaaaatatataggatctaattttctctcaaatatataggatttaatattaaatataatatttttatataatgaacaacaaaacaaccaaccaattaattaaaactatgataaatcatctttaaaataaaataaacacagagtgttaaatctagaaataacaataatgattcatacacatttgtttcttttagttcatatataataacgtaaaattatatatataggttttcccttctcccccatgagttttggtatcacatgtagtgcattttgtgtctatattaataaaatattctaacttatacacaagtaaaagcactcacagcatttaatccaaactgtgcattaactatataatcaaggaaaaagaggagaataataatttaataatagataagatccatgaaatatgaattgtgttaccactgccacttcactttctaatcaataataataataaggcccccgccaagggtatgggcccacgcccaaggccttcacccatgtttaaaaaagagaaatttacatggtatactaatttttgtcatttttttacaaaaatattgtcaggcgg

SEQ ID NO: 380224 - DNA, 1198 bp, Cannabis indica
aacatgatgaacttaggtagttttcattggaaatgggcctaatttctctacttgtgttggaagtgggggaaatcccattaatggtttaggaggaggatacaaactccaatccaacaataatggctactctgcatcttctacagggcttcctaacggctacgccacaggtcagtatccactgtccatgatgaaccatacatcatcaacatcgtcatcgtcaccaaaccccatgatgacaaacatgaacatgaacatgatgaatatgcatcatcaaccaagacaaaatgccatgatgcaataacaacagccacaagtgatgtactagagatcacccttcgttcctccaagcacaggctattactataactacagtccttatgcagtagctccagctccatttcatcccattccatactcatacgatgaacatagttatggctctgcctctaagtcctgtgcagtccatgtgttcagtgatgataatacaaatggtttctcaataatgtaataaatagtaataatgcctatatttatgatttgctctctgtttagtttggtgtttttaatgtttgatattcagtagtagaagaagaagaagaagaagacacgaattagagtatgtttcttttttttttctttttggtcattgtttcttctagtatcaagtcttattttattttattatcttttttagcatatgaacttaattttgtggctttttgggccaccggcttgtaatgtttaacaagtaaatacttattaatattaaatgttgttctgaatttttgtttcagataaatttagaacgttgggtgtagagcttgtggtagtggcatggtcaaagtttggagttttttgtgttggtaaataaatatgggaattgaattgatagtattgtatgtatgtgtgtggcatttacattggcatatgagacaagttaagcattggtttgtgtacaggagtggtcagagagacataataacactgtttcagaaggagagttacgaagcacaaaaacaaagttgtggttgggttgacattgttaggtggagcttgcacgtgattaccacgtgcacgtgcatgtctctctctatatatacagtatataagtgtatgtatatataatatacagggatatgattttgtctcgtgatgtacttttacgaaatgtattccgtggtacattagatgagtctca

SEQ ID NO: 380225 - DNA, 2635 bp, Cannabis indica
atatatatgtataaaaaataaaagcttatatatcattgaaaatagctaatttagtcaactttcaacaagaaagatgaaatgattctgtgatcttacgctgtaatgtgtaatgaacagcataggtatgaatgttgtatgctcgaatcaaaccatcggcataagccacatactgaagaaaggaagaaacaaaatttgatagaagtgtaagaatgaagtttattccatatgagatgctaaattaacaaacttcttacaaaccaaaaaaaaaacaaaagaaagtctgtctttataacaaaccaaactgcaataccagagccgggaggcgaggatggcaagcaagattgacaataggcttctttaagtctgtctttatttttgttggagccttacccccttcaacggttcccacaacttcattgacataaatatttaattattagaatagcaattagatttaagcaccaatattcatataaaaaatgggattaacaaacaaataaaacctgtgacactcatccttcgatggaatccaaaaaaaaccacaggttggagaggagtcaaggcaagatggacttctgaatctgaagaaatatgttccattctcttttctggtgaatgcaaaacgcaggtttgctcggtgtcaaaatcacatgaacgaatggtacaatcctatgaaaggttgaaagaaataataataagccttgagtgagaaaagccccttttgtttccaaaccttaaatatataacaattgatgtaaaaggagtatatcaataacaaataggaaaaccatttgggaacatccaatataaaataagaagaaattctaaccatatccatatttactaaattaccaattgacagagatgtaacatatcttaatttcttaatcttctagaccaaaaaggaaacaagaaaacttttagaccaattgaagaactccatgcaattacatgttattaggcctgccatgctctaagctctatcctcttgaaatttcatttctagtattaaaaaacaagtcaacaaatttaaagcgcatatttttgtaaaccaggctctcccagtcccacctaacactataaaacttgggaaccttgaaactataacaagaaaacttttagaccaattgaagaactccgtgcaattacatgtaattaagcctgccatgctctaaggtctatcctcttaaaatttcatttctagtattaacaatcaagtcaacaaatttaaagcgcacatttttgtaaaccaggctctcccagtcccacctaacactataaaacttgggaaccatgaaactataacaattgttatgcagctacctaggaaggattcaaacatgagaccttatggaagaaaaccacatgcttgtctattttgaactacctcttttgggaaaattcataatgtatattaggtttagcaagtagcttgtgaaataacttagtgacttccatagccttcttcaactcttcatataacatcataccactttccttagagtacaggaattttgtttcttccattatctctcaaagctcttgtcataatccgtcaaatggacttattgtttaccaagaaaagtaaaggtgcagtacactttaagcactctccaaagagagatgcaaattcataattcataagcttctaaaatcatatcatcagcaaaaaattgaatcttgcacacatagcaaaattaaatttcatgtacaataccaaaaaagtaagaagttacaatgacatatattttaactcattagtaagagaataaaacacatccagtatctggtctccaacatatgtaaacttcagaagttgaaacaacctaaagagaggaagtgcatatagggacccacctcaagtatggcaactactgcatgaccacttgtaggactgtaggacatacggacaacaggagatcctatattgatagaagacaacttgcttcctgttatcgcatcgaattctgtgcacaaaacataaagaggagaaaactatggtaagatactaagattcacaaatgaaacaggaagaataagtagatgctcatataatttcaaataaaaccgtcacagcacacacttgagctatcctataacacagatacagctacaagcaacaaactgctagaacaatctatgccccatcacattttgattttgtttatcatttctttgtcatgttgcgaccaagatagcactgcccggaatcttggatattgtcctccaagtacaatagattcaatacattgtatttttggcctactataacatcaatgggtgtttaatgcatctgagatttacagaaaacaaatctgaaaaggtgaagaatcttctcacaagctcatatgtccgaacacacaacctattgtctgaaactatgttctaaaagaaaagaatttgaatgaaactattaactatgggctcgtttagtacgttgtattaggtcttattgtattatattgaattgaattatatatcatatttttatataatactatgttaaactttaatttatactaaaatattatatatttaagtacccataaaagtcaatattaaacatagttttacataaaaatattaaataaaaggctaattatgatttttttcccctaaactattgagattatta

SEQ ID NO: 380226 - DNA, 1716 bp, Cannabis indica
gtgtggcagtgtttggagaagttctgtgattggttaggccaacgaattaacaagctcaaaacacccatcttctttagcggtaacacgagcagtggtatgaaaagtgattaagcaagccctaggacttaactgtgctattggtaacatcaattatctgggcattccgttgtttagaactcgccagaaagatgctgacttcaacttcatccttgataacctggtaaagaaattacatgagtggaagttgaaatcgctatcgaaggcatggcgtgctaccttgatcaaatcagtagggcttgccttgcctgtttacacgatgcagacgacgaagctttccaaaaaacttacctccaaaattgatggtatgataagagactttcggtggggttgtgagcaaggaaatcggggaatctgtcttaaagcctgggatcaactctgcttacctaaatctcagggaggacttgggtttagaaaaattcaagagatgaaccaggcccttttggctaaatggggctgggatctcctgaacgaggaaacgtctttatgttgtcaggtactgagtgccaaatatcttcgtggaagaaagttttttgattgtacagtcaggaattccgactcttggttctggaggaatgtggtgcgtacaaaagaaattttaaagaaaggggcctgcaaacatattgctagtgggagggatacaaacatttggaacgacccttggattatccacgggagtgatttctttccaaagcccaatcataacaaccgaaggaaccagaacttgtggcagaactacttttaccggatgggagctgggacatccagcagcttaacagtctctttgacagggaaacagttgctagtattttaaagggtggtaaaccgaatcgccagggtaaagatagatgggtttggacgaaagattctaggggagtgttctccactaagtcggcctacctcgttcaagcacggggaagggcacccttgtgtaatgtcgctccggccatgtggaataaaccgtggaactcaaaaatcttggaacgacataaagtcctttggtggagcatatgcgctaccattaagggccttgcttgctagacgaatggccataaacgaggtctcctgccccatttgcggggatggtgatgagactatggagcacttgttcctttactgcaattttgcatcccacctttggcggtcatctccgtggggaatcatgcctaatgtgaactctggagctagaatgtgggattgggtcggttttctctggaaccttaggtctagaggagtggacactgatgaggtgttcctttttacttcgattgtggttgacacgatttggagggctaggaatgataaggtccataacaacactatggatagcttgatacattatattgactctatctcttattgctacgcagattacggttcctgtttgttcaagacttttcaagatgatggtactactgcttggtcgccaccgccggaggattggattaaaattaactgcgacgtctgagtcggtggtgattctttgtgtgctgtggcgattgccagggactctacagggtcgattttcttggtggcgacaaaaatgcttaacttcgctgactctatcatcggggaagcagcgacgtgcctgttagcttaggagacggcggtctcaatgcatcatccttttgttatggtggagagtgattctgagagtgt

SEQ ID NO: 380227 - DNA, 716 bp, Cannabis indica
ctctctctctctctctcaaccaagtcgttggactcctctctcataatcgcggtccagctgcaatgagccctctccactatcgtagtccaatcgcagccagatgatgttatggcctcctcaaccagttcttcaaacgatgtgctgcattgtatatatatatgtatatctaggatgttttgtttccattttaggttcttacaatctcaacgactcaacttggggcaagtcaataaatcgacgtgcaaaagagctcgaagagttcacaaaattgagggattttttggttatatagatttaaatttttttggattttgattcggagttttgaattgaagggttgttaatggaaagtagaatataaacctcacatggcattctgagaatgtgtattggtcagttgagctaggggtgggtgtgtagctggagatgaagaagactaagaaaaagaaagaaaaagaaagattaattaggatttttgccccttgaactttgacatgtaccaaatcacgctccttgaacttttaaggtcgttaaaaatgactcctgaactattgacatggttagatttaaggacttttgtctaatttcatttaattttactatttgtttatatactaaactatgcttttcagactttgatatctaccaaatcatgtctctcgaactttgacatgtactaaatcatagcacctagactttcatccatgttagacttt

SEQ ID NO: 380228 - DNA, 4144 bp, Cannabis indica
tttttttttttttggtttcttgaagataagctattggtatggcattaatgtctttattctttacttgtggtgtactatgtatagttttatcattattattgataaagggtcaaataaattgatggtatatgtttgtggagtttggactttcttaagtgatgggataaaatggctgcttatgaagtcaaaagagaagaaaacacacaaatgaatttattagtcatctctttttggtttttgctattgtcaatttgtcaccaattttgagtgggaaataaatatatggatgactacaacataattatataaagtaaagtcatcaattatgtaacatgttatagacaaattcataaaataaaggatgtatttatttgcatgctctttgtctttcttcatatatcaaactagtttattttgaaatgaattaatagacatttaaattggttatacataataaatgtatgtttatataattgatatgtttgttgatatctaatgttttttttctttttatatgaattatatatgtgcattaagataatcataaattaagcaaaattaatgctaaagttagggaatttacaacgtgtatagcctaaatatattaattttaagaaaataaaactttgacttgtattcttatcatataagattttataagaagcaaaaatcttctttttaattactttttgataatctatttaaagaacttgtcaaattatatttaatatctgcattaaaaaaactccatcataatatgtctatatcacactggtttagaataagttatttatgttaaaaatgtaatttcatatggatgggacattcattcattgtaaaataacatatagtttgtagatacaaagaattaaaatatcataaaacataatatttaaaataaaaaaaaattaaacaacattattataaagagaaaagtaagataagaagaaatgcattaaaaaaaaaaattatattaaaaactcaaaagaatttatttaaaaggttgtagtagggaaaaagcatgtgcatgtatagtagaagatggctgctttgtgaaacaacaacaataataatattcatctaattattaatacatgttataataatattttttttaaaaagaaaataaaaattaaagagcttaattaaaattgaacattccatattagttagcccatgtagttgatgcctccattaattctcaatgagaacaaatccatatccattccatttccatggggtgagtgaagggacccacttcctcccacaaaaattgatagggatcgatgcacacacaaagttgtgacagaaggagtctcctttaccactttttagtcttttatttgtacccaccactaccacctccaccaccaccaccaatttggccacattcaaatgaatatacaaaaatcaaatttgatgtcccacctaccaaatatcaccaaacaagaattacttcttccatcttaacactatttaccaaatattaaatatcatatttgaattttttgctttataaaagttaccgacgactcgttcttttgttaaatgacaattttaactctattttttaaaatgatacaaaataggcttgagaattttaatagcctaacttagaggtattatgacaactgattacatttttttacaactgtttgtactgtaaattggcttcaggttggttatattaaaaaattaatttacgaaaattgagttcataatctattttgtacaatttagaaaatactgagtcagaattattatttaacaaaatagagagttcaatcaataatttttataaaacacacaatttaaaatagtatttaccctaacaaaatttatagggttcaatctcaaaattatttgacatactatttaggctaggttgatcaaaatcaaatgtttgcaagaaatatgactggcgataccatttattaggatattgttatattttttaaagtagttttttttagtctttttaaagaattttgtgcaattttacgcttttaggtgttaatattttctaaatttagtaatgaaaaagaatagaataaattcatgaaaaatgtgcaaaaatgatgaattaagtaaaatcttgtcgttaaagcacagtattgtttttttttaaaaaaaagttttgtataaatttaatgtgttttctctaagtgtgtagatttgtgattaaaagacaatttgatgatggattgacacctttgagctaatttttgataatgttttcattttctcgaagagcttatgaaacccaaaatgataaaactcgttctcagcttttcaaaacagattaaatcatctcatttgaagtccgaacgtgaaaattatgcatgatttattgagcaatgtcgaagcagtaaaagagtgacaaaaaattgtttgtatagcgccgctcctaaaaaaaagataaaacggagaaaaaatataattttagcacgtggtgatatcaggattcatgcacagcgctatagcattgtacatatatttttgaagttaaatcctaaatctaaatgaattctttctatattttgggtctatataaagaatgacgtaagtcgactttcgaacaacgagagagatacaaataacaattttgagattagaaaacacattgaagaacatgagagaagagattctaagaaatcattattagagtcattttcgtcttcttcttcttctttattatattgtttagttatttaattatgaacatagttattgtgattattatgtttgtgattattaactaaatactttttttagagtattgatggaactattttagaatattaattaaagtttttagattatttctatatttattcttgctatttatttatacaattttgcgttaattataatcttgttaatgtttaattactattaattaatatagacattttagattttacacttgagagaagtaatctaaaattagacttagaattgtgtgacataaaaaaaaagtgtgagatcaagatattccactaattctatgagttttatttaaagagaataatatttttttttattattgcttgattgattgatattgaatagagatatcttgttagttaattaagttaatcatttcatcacacgagagaggttaatagatcacattagaattcttgaaaactatagattatagaataatttgagattcatagtttgaaataggaaagctagtgctatagatctttattttctgattgaaattattgttattctgtttacttttcaattattttattatttcgttctaaatcattattcacttttaactgtttaattaaagcataaaactaaaaatataataattagtgaaacttaataatcaattcttgtgggttccacaatctttttataattaaatttttttataacaacagtgtacgcttgcagtaaaaattgtgtatcacgccacgacataaaaattcaatgtcaagacgctaaaagacaaaaatttaatagaaaggtctagattcaaaagtccataggcaaaccttaacattggcattcaatgttgagggattggatcctgggtttctcactgcctaatttgaagcttcaagggtcccgacactgagggagcatgtcgcggcccacctcataaaaattgcgattccttgtgcgtgtttagaaggcacaggccgcgacatgctcttgtagtgtcacgttccgcctgctttaattgacgagtattagggttcaagccctattgaaaagctatattaaagaccacttttgcacttttcaaagtgacaactattagagatgaactggaagcgagaagcggctctagatactttcatcaattattattcgaagagttctttcttttcctttgtttgcttatgttcttaatcaattgttatcagttatttacaatgaatatgagtagttagaccttcaattagggtgattaatagagaatgtttgacactttatttttgttcaacgtcactcaattttttcccaattttatatgtgtatctattttgattcgtacctaatttctttaaattgcatggtcatcaattaactatttatgatatcaatatgaaatctgaaaagtgagtattgattatgctatagtgaaatagacatagatttcgatataggacaagag

SEQ ID NO: 380229 - DNA, 4211 bp, Cannabis indica
aaatactattcttaatctggatacactaacaataacaatatgaatgattttagataacaatgaaataaaatgataaagtatgctttcttagaaagaatctccatggcagatatcatttatagtatatgaacaataaaatgaagaaatattacaaacaaaagtagcaaagctacctataaatgtaataatttagtacaaatttcctccaaccattacaaatcatctctcaattaataaacaaatgaaaaatagaaaagggaaaataatccaaacaaagagaagtcacaattttggagttttactcactctatctctcatcgaaactccgacttttttttttctttttcttaagacttagaaattccaatatatgctcatatcaaaaaaatgaaaaataaaaataaaattcaaaaggcatttagttgatgacagtagcacagcacatacaatttccgaagagtgaggatttgaccctgcgcttcattttagcttttggtgaagttgatgaagtttcttctttagaagatgacttccacaaatcctttgttactgtctgattagcagagccattagtactatgttgctgtgaagtaacaactatatgagcttcttcttcttctttcaggaatcccaagaatgcaatttttgacttttcagagtcactcctttccaacttaacaactgtctcttccattggcaatggcaatggcattggatgatattgtgtcatgacttgatcatgtccattcagccttacagggtcaacaagactaacattatcttggcatggtaagctttgaattgaagccttgtcatgatacatcaatggggtacgatcagattctgattcttcattttgaagatcaatattgaagcttggagattttctcatctgagaatgaagattggagttgtcaggttctgaatcagtgctgaatctttccatgcttcctgtactgactctttcaacaatctctcggtttatctcacttcttggaatcttgacttcttctgctataacgtctggcctttcaatacattgttttgagactattatctctgctatcaagtttgtaggatcaaaagttgaaacttcagcagtaaggaactcaccacagctactttggttcatttcttggatagacttgcagttttgatcagattggacagaagataacaaagtttgaggggccagtactgcttctgcttgttcaactttaattgggatttcttccgttttgatctcggtgacatgtaattgttctgtagcgtcctctctttcttcaacaattctcttctctgatgattcttcttcctcctcatcatttgagtctgatggaatgatatcatgctcagtaacaatcacaatatgaccttcagattcctggagactttcctgatcaaccactggttgatcattctcaacaacctttgcttcctcacttggacaatctttattgatctttgaatcattgacatgatcaatggcttcagtttcagattcagttgaattgtagtcagacttgtatttgtattctccattttccagctttttttctctgagactgattgtctctgtaacaatcatgcatttgtcttcagtttcaggaactatctgatggagatttggtgagttagccactgagatggtttctgattctgaggagtcatcttctcctaaactcacttctgttgaaaacccttcatcacttttgtcacttagaacagtttcttctgctgttacaatacttaatcgatcatctactttatctccatctttagattcaaactcatcaccacagacaagtaaatcctcctttttcttctgaatgaaagtatctgattcagtttcaacacttgcttttagattctcaaactcctcagattctgacaagtgaccaacattctcaatacacgactttgaacttgaagttagaacttccccaacctcctcagatacttcactgtcacctaaaagggatgcttgtggattattggaatcttcagtctctgacaagtgaccactctccacactagagtttaaactatatgttaggacttcctcattctctccagattcttcactttctcctggtacagatgcttctatattatctgattccttagcctctgacaagtgaccactctccacactagagtttaaacttggtgttataacttccttagtcccttcatatagttcactttctcccggtaaagattcttctgtattgtttgattcctcagcctttgacaagtgaccaatttcaatggtagaacttaaactttgtgttagaacttcctcaatcccttcatatatttcactttcccctagagcagatgcttctgtattatctgattcctcagcctctgacaggtgaccattctccacagtagacttcaaacttgagcctagaacttcctcactcctgttgtcatctgggacagactgatcagcctgaattgaggccaattcatgctgttttccatttgaattttcaagttttggaggttcttgatcatgtgataaaatggatattggatcaaacacgaagttttcaatttcctcttgctctgccaatatattatagtagaacagtatatcattattttggtcaatataatttttttttctttctttctatattcatgaaatgaaactatgtgtagactggtaataaaggttgcaatctaagtacttcctacatgataatagaatagtaaaatggagaaacattggtattgaatttgtaacttaattagtagcctagtataatagtatgctaaccttttctaacagaggcctgcttttgaagcttattttcattacttcccagggaaaaatcattcttgtttagcttattttcactgctttcatcacctatttcgtctaacccccctgtgactttcggaggatcagtaagaacagaaatttcactttcttcttgcactgaaaatagaatgcaccagttttaggctacaagtttcttccttcaaagattataattaatataatgtaagtaaaataatggttatcaataattcagaccttttctgcttgatgattttttaacatcatcaactctctccagattatgaggagcagaatcattagctttgtcatgaaaattattatcttcagcagcatctactaagtaattttcccctttaatatcatcaacaccagcagtcttgtttgataacccttttggatcttcaacattgttgtgaatggtatcttcttctgcattaaaagcttcatagtaaacagccaaactatacttgaaaatcaaataggaaaggacacaaaaaagctaatacctttcaaacttgatgtgctgttgttacccatttcatttcccatgttcagctcttcaaatcctgtaatataagcaaaccccagaaactaaattcactcacaagagccaattaagcaagcttaatagtagtatatgaaacaataaaaagggtatcaaaatctcaaaatacccaagtcaagcaattgatccataccatggtgatagataatgatgtcttcacatgcaatgagggcatagacagagtgttaatagatgtagaagttggggggcactgctttcttgtaccaaaagccatatcatgggtcatgttttggccaatcaaagcaaatataggactaaaaaaaagtagtgacacatctcaaacttttattattatgattatcatcttctgcttttgttaaaaatatgtgaaatatgagattcatgacaatctgtgatcatgagaacattgctaactaaatgaaaaaaggtgtagtgtgggcgagtgaatgaatgtgactttgtacttaggtaggcatttgaagtggtctgccactatgattatgttgtgccaaaatttctaataaaggtctcatctgattgattttttaatcacctagcgccgcgagcaaactcattagacagaggagtttatatttgataaaatccctgacagcctaacaggttgcattggtccttggatcaaggagaaaagagtactattgcaaagcaaagctctttttaaattagaaatattatgatttttttaattagaaatattaataagataatttaaatttaaatttaaaatacttaaaatattataaatatttataattttgcttggtttagttctatataaagtgtacttatataacagaattcttggtttgggtgactttttatttatat

SEQ ID NO: 380230 - DNA, 6434 bp, Cannabis indica
ctctctctctctctctctctctctctcaacaatgattttatgaaattaatgaacactggaaccagctaactgaatattcttgaaggtatggttggattcccactgccgaacatgggtttgccacatttcaggagcaagcaccattgccacctcgttccatttcaggagagcctaatgtaaatatggaaaagagggaccaggactatgcggggtacaacaaccatgtccgttccatcaaccactcatcaatccatggatcttcatgaggataatctagtttcggtgaacaaaaaccatgattctgcttttacttcagctaatgtggtgctgaatgagaagcggtatagctctgcaggtccaagagataaccttctggactcctgtgatcctactgcaagtgataaaccatggcatggaaagggtgctggtggtgagactagcatgaggcaaattgagagatacggtacttggccttcctctgttcctttgcaatgaatgtcagcttagatgtgttcctaaaaagttgtgccctttgagggccttgatttttctccttgtgccattcattctaaattagtgccttgaagctgttatgaccattttttttctattacattttctttttactaactaataactactattttgcattgtttatatttagcagaaagatgccccaccttcattcaggaaaaaaaaataaataaataaaacaaaagagaaagatgtcccacctgctttaaataatttcatgttacaatctattaattttaattcaagtggactatttaaagtttaattttgttccctagtggaaaccgatttcttgtgtcaagctgtttgtgttatttataacatttcatctatgtttgttaatgttcatctgtatttgctgagcatgtaatttccttgttgatttaggatgacataaggttaagcaatggtagtggtctatctcctggcgaatgggctgatagcctaaccaacataagtgttggagatctactttcaggagtgtctcaagatatgaatgctaacggcattgatccaccacctgctgaaagtgctcactgccttcagcagatgccattcagctgtgactcatttgatgctgctattgccgctcatatatctaggcagcaagaaaaaatgggatgtcagcctactttggtgtcttcaatttgggatgctgaagaaacttgtgatggcttcttatttcaaaaaaaccgagtccggtgtcatgagatggaaagtccaactggtctcactacgccaaatgcttgcaaacaaactactgagacaaatgtaatggaatctatccatttggatgaggtaataattgagattgtgtcatttaagaaattgatcaaatcatactctgggaacaagcatagttatttgcaacatacgtctaacacttttgatcttttgtgtaggagttatctgaagtggaggaaccaactgatgattctgctcgaggagatcctatggatgaccgtggtcttgactcacaactcctagagaatccagctaaagatttcagcgagcttgcagatatgtattgggtactttactacttatcctttgaagagttctgtttctgttatattttaaatcgcctggttgacttcatagttttccgggtttattttttgctggaaactgtcattgatgttataccagaagtagtcatttttctttgtactaagtgtgtttatttattcacctaaaaaagaagtgtttatttatttaatttttattctatcaacaaaagaaagtctgtttatttttatctagttctccttgatgctttatctacatcttatgtagcaccattctcagtagcctctttttttttaagtacatctgattttatgattctacatcttgcagcccgagtccttaggaccattagatttggatataccatcttccaagtaccactctgaagatcttattctaagcgatagccttagcggattgaaccgtctgatagccagcagtttagatgcatttcaaaattgttcattttttgggttggacaagaaagaatcagcatcaacagttgaagctcgagagtctgtctccttttcagattttaaaattggcagcggtctttgagaatcttcaaacgggatataagatagatgatatcttgtagattcgaggtttagcattgaagtatagctagcatataatgattttctcaagttcagctagctgacttcatagttgcatggtgaaggtaccgttgtgactggaacagataatggttgtgttctgattgaaaatatcatccacttgtagaaattatagacatggaagaaacttcacagttccaacttttttttctttctttctaatagcttcatgtaaattgtgatccaaagctgatgtgaggagctatgcaactttaacagaccaaaaggactttgttatcggtgcggtgccagtatatatcctttggtctctaatattgatttcttgtacattcatattgtcattctttagttctctactcttctaattagggttctattggattaatgcctaatgaggaatgagatttcatccctttgcatgggttgatgttcttatatttagtgtttggattcttaattgtttttactttacctactgatggggcaaatattgcaaataatatgttgactttaggctcatttggtggagcttggctcatgaggctctgaatgtaggctgatgtggatgccatatcatttgattatctaatttgtgttttataattgtggataataaagatacattaaatgtttgatactcaattactaattttccatattgggaaggtacgatccacaggcgagatcttgggatttaaattttgatatcgtgggatctggtaattaatgagcacgatacagagttggttgtttagatgtctgctggttgcttctttggacgctccaaatgatgtcttttggattcttgttgtgttggaggattatctcgcttggacgagttgcctatttgtcatctagaagatctagcttcgctaatggatctgatccattatcttggttggtccttaagtgattgagttgtaactggctttgaaaattacacgtgttttcattcgaaaacacggataacatttactttaagctttcgaaactctaagtgttatggaagcttgcaccctccctctcggacgctgtgaggacatttggaggctaaaggtgaaacctttttgaattccaaaccaattttctggttaacaacttggtttttttttttgaaatgaagcgacatgtggcattatatttttggctcgtgaggattacttttctttgtggagcgcttgcagcagagcttcacgaaacgacagctgattgcgttagcgtacgtatcaaggagaatattatcattggatatctggttcccaagcattgcattaaatgcgtatttgacaatttttttggaccattggatttgtcttgtgttttctttgacataatcttggccattgctctgaggccacatggatttccatttttatgtataaatacgatgaaattttttctgttagcacttctattcaaaattttaaattgagttcaaacttgttgagaaaagacgacgacgaataagagaaccttagagtattacatcgatcatttcatttatcttctttaaatttgtgaatgagagggtctaggagcaccactcccaatgttaactaccgattcttcaacgccatcaaaaacactggctattcaagcggaggttgaagagctcatcaacaaaactcatatgcttcaatccagaattcgacgtcttaatcagatttcttcgataggagtttccttgccaccatcacatgccattagaattcctgaatcaaatactcgacttcctccttgttcttcacctccttctaattcttcgttatgtttcccttttttaccattctggaatcttgattgttgtttgggtttggcattcttttttaatttttgcatgcttgccttgagttgttgatgaatagaatttagatcttggagtgattttgaatattttgcaaaaataagatatttcgcacatactgtctgtagtcttgactagtttttgtaagatttttctctttctattgaatattcaatttaaaacaatagggatggctaacattgcttcctctattcgggactcttatggttctggataatatgtcgtttgtacttttggttagctttttgtgttccccatttaataatattctttgagaactttgttcagtaaatttagtgtgtaagtatacacaatctaatgaagtaatataataataaagtagagtatcgtttccacgagaattaattatcaattaccaattaattaattctttatttctatttgatcaattaaaaagttttagaaaaatcaataaagcaaagaaaataattaaaaattagagaaataaacaatgagaaaaataaggattattatgattctcaactatcttttatttcacttattaaagcaatcactcaatatctcttctttctattcaattgacaagttgaattaagttgttcataatctggttaagaatcacaaactcaatctatatgaaaactccctatattcctatagtaaagtttaatcactaacaaaacattaaaccaagaaactcataaatcatacaaataatctagatactttcgtcctaaattaatttgcatccataataatcaaagtatatttaaatctcactttttttttgatttgaattcatagatgataattatagattaccaatagagaattgcaaaattaaatcacattgcatggaattgaaataagagaagaaaaagaaattgcataactacattaatccataaaataaattcgaatggttcacataataatctgtggagtcttaaactccaaacaagaaccaacacaacaccaagaacaaagcacaatgatcaagaacacaaactggacataaactaacaacataaaccaacaacataaaccagaaacaatcaacaactaatgaaagcataaaacaacaacaagaacttacgtggttgggctacacaatcaagatgatcacgagcttaattcacgggagaaagtagccttaaattggctgtggagatgagctttattgatatgaaaagaggttacaaaaatagggattaaacccttcactcaatggagtcttgctccttacaatgtgtcacactagtgacactctcaaacaaacacataggaagccatttacaactctcaaagactctctgaattttctctctaaaccctctaaattgttgtcttgaacatacacaagtatgaaacatatttataggcactcgggtaacacacataactaacataactgtcaagactgttaagttagttgggagagtaggctaactgtcaaaatcgacaatgagagagtgagtccaagttcaagggttcaaatctcaacaaattcggcttggtttgatcacttgaacacctctgtaatgacttccaatagaagaattactttctaattccaatgtaggttgtctccacaaggagacattgctttagttgattctgagtaagtttagaaaatgtctaaacttgtcacttgtggtactttttgtaaagatgtctgcagggttgtcatttgttccaatcttcttaacttgaaatggaattttatatcaatgtgcttagacctctcatgaaacattagatttttcatgagatgtaagggactttgattgtcacagaaaacagtgatgtcctcaaagtttatctccatttcatttgagccaaataacttccttgatggcttctgttacaaccatatattcatctatagtggatgacagagcaaccactttttggaagtttgatttctagctaacacatccttcatagacagtaaaaacataaccggttagagaccttctagtgtcaatattacctgcatagtcaaaatcaacatatctagttacaaatgtaactggtctctgtaatcaaataccagactagtattcaatgttccttttgttgaccaaaagttaatcactcacttattttgatgatcaacaaatatttgattattatttgttactaatcttttcttgatcattttacaatcaaatttacaaagtatcaatatttgcttggtaaagtcaaacataatcaaagaagtagattcaacaagtatatcaaccacttcatacttcataagagcaaaagttttatcaagagatcaagaactcaagaccctattcaaaagaggtcttcaaaagctcaaagtcaaaagtcaatccgaaagtcaaagtcaactctcaagaaaggtcaactttggatcaaaacatgcaaatcaagctaggaagctcatctacatcaagactacaaacaatcaaatggtataaatttactttagtctt

SEQ ID NO: 380231 - DNA, 1253 bp, Cannabis indica
aaatcttaacatatactaattaggtaaaaatatcaggtaataggatctggcactttatactttcgtcatatttaacatgtatatatcgatcgagtattaaatttatatttctttccccacattaaaactaaaacttaaaattgggtattatcttagcataatgagtagggtcaggtaaccttgcttaaaacaaaaatgagtagggtaagcgtataacaagttaacgttataattataattacgatctctttattctctgcttatatttaggtgacattacttcttttttgtacatgaatttgattggttagaatgatttcttatatatatgtatacagtatgtggtataaaaggtgtgtacaagtacacatattattactcttacaaaatatatatgtgtgtgtgtgtggagaaattggggttttcttttcttctaaatttgtgtggttattggtttagtagcactaagtaccaaagagataaaaaagagatgaatatatataatataatgcaatgtgagtgtagtgtgaagatatatttgctaaatgagattattggcaggcggtttatataaataagtggcacatgatttatggttaaataggaaaatgatctgttgagtatatatagtgggcgatggaaattgacaatatgtgtgattacatataaattgtgatttatgataatgcttacaacagaatggatcagaaatatggttcacatgttttgagggtcatgcaattatgatttttcttctctaaatctgttacacttacacactccacccaaattaggccctttgttatcactcaatcccctccttgttttcctctcttcaaaactgtgtataaattaataaatatttgtatctatttatatatttatacaatatgagaaactgagcaccgtccatatatatcattttccacatacacatacacaacacaactatcatatattatttttaagtttatttaattattttgactcattcatctttgaaaatatgtcatgatcatgatactatattactaatatatatacacatctatttattgcactaatgtatggggatgtattgagagatcagattttgttaaaactatgaccatatggggagcattactattgaatattagtggtgtctattaggggtgttcatccgatccaatccgtacttttttagtcaaataacatccaatccgcactaagtgcgaatttcatattttggatccaatccgatccgcataaga

SEQ ID NO: 380232 - DNA, 4949 bp, Cannabis indica
aatataatatttagatataatttatcattaatataattttaattacaataattattgtagataaaaatatatttaatcgctataaattgttatttttgtgattaatacttttagtcatgaattttttaatcataatataaataattatttataattagttataatttttttaattttacttacaagttttgttgtaactaaaaataatttttttcataattatgagtaatttagtggttgtttgaataaaatttctaattctttgttcaaataaaaagaaaacaaagcttctatgtctatgggtattggatagatatatagaaagatttaaccttgaaaagataaagatgggatgggactatgcaaaaaaatgtgcaaacaattgttttatttatttattttattttttttatgaacgagtctatttcaatcaaatatttaaaatttttgttactctgaaaaattggttcttgagtgctttaccattttttttttaattaaagtgtcgagtgttttacattattattagcaactttgttaacattaagcattatgctaaatccaagtcatgatgatgaaattatgattttggggcgtctgtattacacaagggttggaatgagagtagggttgagaaaagttaaatcaaattattgagatgggcaacttttgttttattgatttgtggagatcttcatcagaggatgatggcttttaatatggcatcaaatgtgtggcggcaagtgtcatcactcatttcacacgacacaatgctcttgtcactaactgatgtcagagagcaacacaggcagcctcctactctattgacttttctcaatttgatctatactttcagagtgttgagaaaattaaagtgcttctaatactatcttcagctgagtaaaacgacataacagaaagttcattctccaaatttagcataaccaagactcaattcttcattgtgtagaaactttagtactacataaaaaaacacacatcccatgtatgttttggaatgttactcaaaactttaaaacattggttgacatgtttttttcttttttgggaaaatagaaaacaaacagacactaaagcaaataactagagggtttcaattcaaggcctacttatttaaatctgagtagatgtttcattgttcaaactttattggatagaaagacaattgcgccactaaatgactactaaggctattaagtcaacttgtgaatggttttcatatcagcaacttccttaagtgtgcctttctcaacatggtcccaccacttgaacaagaaattatccacaaccagtctgaaccaaggggatagcttcaagcctccttccccagcatctgctttcctcaacaactctttcaactcgtcccggtttacatacttgatatcagctacttcatctgggtttggattgacactaacatcccggacgatgaagagcaggtaatcaactgccaaacaatggaataataaccaagaagttagcatgacaagtcaaaaaaacagcgctcccttaattactctcttaaacttaacaaatttcaacctggtgccaaaagctcacaaatatctggatgctatttatttatttatttattttgcatatgatgtataataaagtaagaattattacgttcatgctcgccccatttgccatcagaaggagctttgtacagcatcctgcctagtggggtaaattgatcaactggcacatcttcagcaggaatacccagctcatctaaaagctttctctgtgctgcattccttgctcctggtaattaaaaaatataatgagattttgaagaggtaagctttcattggataatcaaatatatattctgcagaaatatattaccaagggactcctcatcgataagctcagattcacggtagagcgggtggctacaacaggtgtttgtccacacaagagggaatgttacctttgttgcagaacgttgctgtacagatgaacagatagaatatcatctcttgacacttatgttatcgaatagatgtgcataacagaaacaaactgggcttcaatataactagaaacacacaacgagttttagtgaaagagaagaaacatagaaaacaagaaaagatgtagacttggtcatgatgtatatgttgattaaaaggacaaacagagactaatgtgcttaagcaaattatggccgataaaaaagaaaaacaaccctgcatacagaaaaatagaactatgacacacttattcaatttatgccctcctcataggatataaaggctgcataggtaatataggccggatcttgactctgttcttcaattgacacttatatttgctgtataagcacctaggagggtagttcgaaaagtcaggtctgtagtttgctttgctcccgcaagatctaacgtttggatacttaaatagaaaagcctacagtttgatgatcctcaaatattgcaatcaatacctgaagaagcaactcatattttgagttgaacaagaacacactgaaagccctgtgtagcaaattatccttttcaatcttttccatcaagtgacctacaagatacaaaagctttagcaaaccacggaggtctagctgatccaacagaatcaacatgatctattaataaaatatatggtgtcagagagagaggggggaaaaatgtagaatgcccaaaacatgaataaacagttgatttccataacataaaggtatccaaaatcaaaagagtgtataagatttactgatttaggaaggatagaaagacttggagtatgcaaagtgccataaaaccgtgaaataatacccaaaaggaagtgttgtgcagatcaaattttacttacagttatattttgtatcatgaccaacaactcggtcattctcatccactagaatgcatctgcagaaagttcacacaaagaaacctaatcaactccagacaagcgaaaaatctagataaacagcccaaacgataaatatgtagatctaaaacccaaatttgcatttggattttcaatgttttccaattatagaaccaaatatttggctcaaaaaatatctcaactcatttgataatagttaataatctatttaagtctcacctcagccgctgaacattcatttcttacaaaaaaaacaaacaacaaagaaatgaaatccgaggtttaattttatcaacctttgaactagcaaacagagcaagagaagggaaaacaaagccaataattcactttgttgtgttcaaaaacaaatcaagcataatacatatccgtcgatataagatttgaagtcaatatcttcatgctttccaacaacaccaatagttcagttcatttggttgaaatgaaaaggtattgaaggggcgctgttaatagaaccaaagacaaaattaagcaaacaaaacatgaaataaatcatgctaattacgcaagatttaggaagaaaaaaaagttaatgctccttcaacaatacacacatataaacatataaacatatatatacatatatatttcgtttccttaaagaatcaaaaagagggagaacatcaacaaacaaagtataatggttgaaatataacaataaagaacaaaatacaaaccaacccatgaaataagcaacccaaaaaatcaagaaaaacaaaatcaacatttgaatatatatatatatttcctattcaaaatctaagcaaccaaacaaagcatatcagaagagtaacaaagaagaaatggaagaagggttatcagataaacagaaacgcactcatcatcaaacataaggcgtctctggacagcgtccattccagcgtcggcagagtctcccatggtggaagaaagagagaccctagcggtgagaggagacaagggcttaagaagggaggggattcggagaaaagggctacgagcaaaggtagaggaagaggtaaagggaagagttctgggggcaatgtagagcttggcagtggtatttagaaggagggtcattgtcgcatgtgatctccgccattgttgaatcgagtaatattataattatatattaatattttaatgtaactattaaatatgtgcctaatattatttaattaagtggtcctaatcggatcctcttttaatgaaaatcctaatttttttttagtttgaacaaatgaaatcctaattatttaagagacaattaatatacccaatgagatatttttatttaatttttttttaagaaaagcatgtattaaattaaataaaatcagttgttacatgagcattaataaatctagaacaaacatcagtctacgaatgaactcctaacgaactagtaacagattttgctagtgcatggaccacaccattcgtaacacgcgaaatggcacaacaagaaccaccaccaacaacagctaaaagataattaatctcctcaacaattggtttaaacataataatagaatcaggataatttatccaagagctaacaacagaggaatccatctcaacccgcaccaacttcaaccccaatctggcagcccacaacaaatccgtacgcatagcaaggagctccgccaccacaacctgaaaaatccccaacaccacccactgcccaggccacccacactacaaccccacccccacgaataatcccaccaaacccaacgaaccccctacccggcgtgaccgcagcgtcaaccgtcagcagctagatattttttattgttaaaaaaataatgagattttttgggtttatcaatttttatttatgtatgtaagtgtcaagttttaatatctctcaatttaaaaaaaaaaatctctaaaaataatagttttaatatttactctatatataatttattttgggggaattaccccatatagtgtttttctaaaaaaaaaattcaaatttatgattgggtttttaaagtagttgcagcgctagttgcaataggggtttctatacg

SEQ ID NO: 380233 - DNA, 5819 bp, Cannabis indica
tagagctatggtcgtggaacatgagcaagtctagaccaagaatcagacctagaactctaaaatttaacacattaaatctcgagctagagctgatactgaaaacatcaagttgaaggtagaagaactcaaaagcaaggcatgcaatgatggtaataagaaatatgagtacaaatacaacaagcatgtggtcaaagtcaacctatctcacaaggaggcctgtgagaaacttgaggctcaaataaggtcccttaccataataaaggatgatgctaaagattatgtggtggcaaagaacataaccttttagaacaaagtcaatggaatcagagggctaaatacttaggtttcaattgtcaatgccttgctcacaagtgctcaaaacagaggtggagggtttgaataaggaaatctaaaccaagaaagatagattgaaaagcatctggggaaaaaagctaaatttttgaccgccaaaggtcctatggctatattagccatgagggccatggctaggatgagtcatgtttcttctcaacttgcaaaggaagctggaaaagcaaccattaggtggtgaaagctcacacggagaaattttttcatatgtctttggagatttcccttgtggctagtcttcactaattgttgtagaaggacctcacaattctaaggttatgtggggatgaagagttagaatatacaagtaaggtgacaaccattgaaactagcacttactttcatacttatagcgttgactatgatgagttcgaggaggaatctagaggaaaccatgttgtagaggtccttgagctttcttcaaagacagatgttccacctagcaaggatccacctcaagatcctgctcaacatttattatgtcttcttttatacttcttctctttacttgtttattttgatttgattattattttccttggctccctttttccttttgcaaaaccaattagattatgccttaattgtgaggcttcatgtagtagcttaagacacttttatctcgcttttaaaattaagccatgttatccttcgtctttttctaatttatttggccacttaattggtcgatcttgggatgtttaaggcatctggttctaatgaccaaaacattacatcttatgtcctttcataagagcagtttaaagtcatcagttgtgctttagaaattcttttggagcaagccccacttctagacatcaacatttctaatgacttagggccttatcacaacacgaataactttaacttgtttatttctaagtagtgtagaagggttttaagcttagtcctggatcaccataggattacggagctcaattccctttggtactttttttaattaactatttgagcatgataataaatttgctcgtactaataaagtggatttatcacagaaggctaagcttccacgttctaggcatatcatcatctcttacatgaaatataataccaactttgcttatgcagaaatgtttggtacataaaattgataaggaacaagggttggaagtgcgatgggattcaggcaatatttcatacaaaatcaaggctaaaaacacttcaaaatttaggcaatatattctctttcataattttaaataacaaagctgacttgttgtataacatatttacttctttccaaaatgtgataaggaagcagatgagaacgtaaagatttcaggcaaggcatcctacttccacggtttcataagaccgtaaaactttactttaaatgcggtaagaaaacaggctaaaactacaatggaattcatgcgatatttacattaaggaaaaaggctgaaaacatattgaattttaggcgatgtttccttctaataacaaaaatttaaacaaacataattaaaatgatcagtggacactttacatttttgagggcacatagctcagtatattaccgccaagcaagggcacatagctaagtatgctacccctaaaatccaggtcacttgttttaaatgttgcttgaagttggagacaaaaagtgcaatttttgctttgtaaatttctttgattttcatgtcattttgcacgtaggtgtacattaagaagagaaaattacaaaaatttacaattcagcctgagagacattttgattcggacaccccctagttcattgataatgggcttagcttctacccatttggtgtagtaatcaacaactatttcgtattttattcctccttttgtagtttgtagtgatcccactagatgtattccccacactccaaaaggccaatgactgtgcatgagagtgatctcgattgatggtgcacgtaaaacctttgcatatctcctctaacactattcaaacttttaaatgtactcaacacaatcattctggatcattggtaagaaataccattgacgaagaatcttttttgacgggatttgttcggagatgtgatatccatagaaacctccataaaactcatggaagattgcacttatttcagtacccaccatgcacctcaaatacgtacaaacaaccccctgcaagaaagtttcatatctagaatcacgtatcgaggaggttgatactgaatttttgtggaagcaaccttgttagtctgtagcacccctaaacttagaaactaatagattgagcttatcaaggaacttaagtgatcattgacaacatttacccctagtgtttaaataatcggagcttgtaaattgcccacatgcattgctacgtactgcatgatcttcgagtctgttccatgtttagccaacatgtctctgaatcaatttttatttctcaggacctggtagatgttgcatcttttaaatatgtacaatatttccctaccccgtgtcacataggcaaccatcttcttgcctttggtttaatattcctcgatatatggtttaccatgagctaagaatcgttgtacactttgatcacttgggctcctacttccctagcaaattgtaagccaactaacatagcttcgtgtgctacttcattgttggaggttagaaattaaaattgatggccctttggaattgatgtccttcgagagaaataagttaaattcctgttttggctcccttctcattcgacacttcatcaatgtagaccttctagacttgcagttctgggactggatcatctgggaggtcattctttccagaatgctctactacaaaattaattagggcctaccccttgattgacacctagggctaatattggatatcaaagtcgctaagttccatagcccattttagcaatctatcggaagactccagtttcttaagcacctgcaaagaggattattagtcaatgccttgatggcgtacgcttgaaatcggggtcttaattttctagaggtgattagcaagcagacgtacaatctttctatcataggacatatggagtttataaaaggtagtattttgctgatgtaatacaccgacaatcggacccttccttcttctcacactagggtagcactcacatcatgatcgatcactgccaaatacaagtataatagttctccttttataagcttcgatcacattagagctttaattaagttctccttcaatttttggaaagcttcctcactttcctcaattcgttcaaacttctttcttccgcacaacacattgaaaaatgggatgcacttgtacatagacttagaaatgaatgaattgagagttgcaatccttctggttacctatgtacatttttatttttcttgagagaaggcatgttgataaaagcttcaatcttctccaggttagctttaattccccttatggtgactatgaaacctaaaaacgtcttggaggagattctgattgtacatttttttgggaatgtgaaaaagcattccaggagctaaaaagacactttgctcaacaacctatgttaccaaaacccttagaaaataaagagataggcgtgtacgtagcagtcaaagagcatgttgtgagtgtagtcgtaacaagagaagaagatggtgtacaactcccaatatactacattagcaaaagactaattgacactgaaagtcgattccaattcatggagaagctgacctacagcttgctcttggcctccagaaagctaaggttgtactttcaggcacacccaataaagatgtacattgatcaaccactgcagtagataatacaaaaacttgaagcatcaggtcgactactcaagtgggttattgaacttggctagctcgacatcacatataaactaagaatggccataaagggccaagccctcgcaaacatcgtgtctgagtgcaaaaactcatcttttgaaatctctcaagatttaggagaaaatcaggagatagtgaagaagcaagagcagaagcaaaagcttgaagaactaacgtggaaactccatattgatggaagctgcactgaataattgtccgatgcaggcattgcccttataacacctacatggcaacaactacgtgaagtaatgaaatttagcttcaaagcctcaaacaggggggctgaataagaagccctaatagtcgatctcaagcttccaaaagatgtacgggctaaccagctccacatattaaatgactctcaatcagtcatgaatcacgtccttggtgagtacacaactcgaggtgaaagaatggtagcctactttagcaagatccaaggcttgctaagtaacctcaaaggctacacaatcaggtagatcctcgaaaaacagaatgctacaacagatgcacttgcccgtctgtaagtagcaccattgccgacaaggcaaacctggtgccaatacagttcctagaggaactaagcattaccatccttaaaatagttgacatgttggatgatattccaacatggatgatacctattgcaattacctccaaactgaagcttttcctgaaagcaagaatgatgtaaaaagataagaagaaacgctagtaggtatctaatccttgacagagtaatgtacagacagagcttcacaatggcgctcttaaggtgtgtcaccatgctggggggctatggcctagcgattgatgatagaagtgcacgaaggcttctgcggcaaccatgctggggggcaaggcctatccaaaaagctatgacaagggtacttttggccaacaatgatagaagactcaatggactacataaaaatatgggagaagtgccatagattctaaaaacttcctagaggtccacctaatgagctcacgttgatgcagtctccttcgccttttgtagtgtgtgggttagacctgattagtcagctcccaaaagaaaaaagagggatgtagtttgctatagtcactattgactactttaccaagtgggcagaggctgaacccctagcaataatcacctccaagaaagtacatgactttgttatctagaacatcatatgtcgattcaaaattccacaaaagattgcgtgagacaatggaaagcagtttgacactaaaatgttcatggatttctgcaatagacatggcatcttttctgtcatggcccatcctcaagaaaatgggcaagtagaagctatcaacaagtccctcaaatagaccctgtagaagcaccttgaggaagtaccagaaaactgacctaaattgctctcagaggtcctatggttgtataagactaccgagaagaccgcaactggacaaactccattcgctctagcttatggctatgaggcaatgttgtgtgttgtttaacaccctaaatattaactttctaaaatgataatttaaacacatataaagttaagaaaacgttacattgatggcagcggaataatgtctcct

SEQ ID NO: 380234 - DNA, 3472 bp, Cannabis indica
tcgtcaaccttgattctcatcggctctgtttaggaggatagagataaaacatgagttgagtgtgttttgatgtatacatcgtaacaaaaatggtggtttggtcaattgagactagctgaatcaattaggattcaagggggagtttgtgtgggaggggaaggaaattaaacttctaagataacgatgttagtgttttacttatatttaattagacaaaaaggctttgctaaaaagttgaacaagagaataatggagtggttccagattatcaaatatttaccactttgcaggtgataaatttaacaaactagtgcctcagactaacctggaatggcatccaatacagtcttgtaaggtgtgcccctcatttgcatttgtcttctcacagtatccaaaggataacatgtgagtgtggcgagcgaagctgacaccagagctgttagcatcgatgcttcagctttcttttgaaaattctctggcaaagatttcttaaccctgtcaccccatataataaaacagcatttaatgaaaaatgcatagttttgtaactctattttagtatataacagatgaaagtataagtgaactcacaagtcgaaaacacaaaagtttacagcaatatatggagctattcctattagagatggccctaaaccgtagtaaaatgctgctactccttcctcctttagcatgttcaatgcaatctgaaaacgacacattgaaatttatctttgtaggcttatatgaagagacatcttatcataattatatgtacgcaaaaatcatacctcagacattgttcgataacccggttcaactgctaagcgtaacctcaggacatctagcggatatgtcatctgcagaaatggattcaaagataaaatggatacaaagtgagaagcatccaaatatatgtatatatatacatatatagacacacaaacaaaagaagcctatagccagtgcataaaacagtatgaatcctaattatactactcacaaaagttgatgtcatgcctgcacaagcacctgcagcaagtcttccaatgagagaaagctctccatcttttcccctaaacaatttctgcagtctcaaaagtttaggtcatttagttccaaatgcatgtagtgttaaaacaagatttttctgaatgtgattgatagttaccttgtaggtttcataggcaaagagttgcacggcgctataaggtatgacccttatgacctaaacaattcaatatataagaaagtggatgtagcacaaaaaactcttatcaatattaaggaaaataaattttcgaaatgtcaacagaattcatgtttcactaacctgagggagattgcctttccagtacccctttagtccctcttccttcccgatcattgttatggcctggacgatatgcacagttatttgagaaataagcagtgattatatagagtgaagcacaaaaacagacaaaagagattaaaggaacggtgagtccataacatacctcaatgaagccaattgccttcttagcactttcttgtccaactcgaaccccatgagtctgcaaacaacagcgacttactatcaattatcagcattatccccaaaatcaactaacatcctcaataatactggcaaaaccaagtcaatcttggcaaaagaacagataaaaatggatgaatctctttgacaaaatagcagatacatttttttcttctagtgaaattaccatattgtgatttataagggcattttgcagaatatctttattttaaagagcgtgcagacatgcaactactgacttgatagtaacaaattatcaatggaagttgcccttcttatgaattatcatcactcgttaagaagattaatgaccaacaaacagtcaacagtcaacatctggttggtataaaagagtaagtgtaagaatattatgctacaagcagttctggagtactatgccattattatgcttatataatacaaaatacaatggcaagccaagagtgtttttaacatgctgtgcttcaacaaatttaacactttccttttagtgagcaataatatgacaagcctttccgattgtagaaacccaagtttatagatttaaacttgatatcagaaacagttactattagagaaatccaaaataaacataaaaatgtcattttcatgtgtattttctttaattagaaaaagcattcgggaatatattgactttatactataaaaatggcactaaacagaacacaagataatagatatggaatcaaacctaatccaaatacttttaataattcaaataggaaataattaaatagcaaaaaactttaatgtcacttgtccacctttatgaaaataatatttaaatttatgaacaaaagaacaaatattatgtcttcgtgtaatcttggacaacatcagaaagatacctaattagatcttctcaataacatgaacaagagaaattaaaaacagagcacaaccaaaggttacccaggatataacctaatctggtaaaataattcagaatcataaaattgcagtttttttcccttaagagacatacaatcatttcatttccaatttcaattctcataagaaaccaaattctatccacattttctcagaaaccaaaaggaaaataaccagaaccagaattataaaagaaattaaggctatacacagaataatcaaaccaataatttgaaaataataaaatataaacctgcattagaatcttgatacgatcaagcggagcagtgacggttttagcagcagcaccagcgacagctccagcggcgaaaagcgcggcgtctttggggaccaaagcgagaatagacaaaggatgtttaaggagctgagccggtgtgggtgcgaactccttccgttcaccgtcgttcttctcagaaaccgaaagagaggcgaaattacggagtttgggaccaagagcagtcctattggtagcgccattgagagtgaaggtgagagtggcgaggcaagggtggttgtggtattccgttaggtctggaataggacgccatgaaagtagggccttttcttccctcataattgataattctgtttgaagataaggagaaaggagggaacgaaagaggtaaggcagttgcagagaccagagacagcgcagaggcgggtaatactaatagcccttatgcctacatatatatttatttttggttttttggcattaaacttagatataacaaataattgtctcatgaacatttaaggttgttaaaaatatctttatactattgagattgttgaatttaagaacttttgtcaaattttagtaaaaaaattctaacataaatggaaaatctgaggagtatgatttagtacatatcaatgttctagagacatgatttggtagatatcaaaatctggggggcatggtttagtacataaacaatcactaaaatagtaaaattgaatgaaattaaacaaaagtcctta

SEQ ID NO: 380235 - DNA, 1258 bp, Cannabis indica
taaataaatattaatatttttttatactgtaattggattggatcagtttttaattaaattttagaaatgacactcaataactaatccaattttattagaatataactttttatatccaatcccatataattataattaaactgaattgaattagttcgattcaataaattagatctatgggatgagaaaattaatgaaatgttcacaaaatttgaaaagggattaaagatccatttggtgtgtatagtgatatctatgttacagttactaaggattttttattcaacaatttgcattattaaagggtataatataatttataatatccttaagacaagagatgatggcattatattagcttattgaaagttgcacatgtcagtcactatgtcacaaaatcaattaatagtggaaggtgattttatttagttatttatttattttgggaaaaagagaaagatataatttaaatcacaactctattatttactttaaaaataattaatatcatccctacaatataataataataatgataaagcaacatttttctttttgatgaatcaatgaattttattgcacaaactttctttacaatcgaagtactcgtttgaaaggatgcaaaaatgtttatacataacaatatttacaagtattcaaaccacctcctatcttcatgatcgattttttttggcaagacacaagtaattcttgttttgatttgccatttcaattcctgtaagtgcatctgtctcggattctccagccagattttatcattcctttgaagccagatgaaatacaccagtccggcaatgattgcagaaaaaacctgcttcctaaacctactcctctttgatctgctaatacacctgattaaagttgttaggtcagttggttgagcattccatcccacccaatccttcatctgttgtaagaagttccctgttgtgctgcactgaaaaagcagatgggcaacactttcgttttgattgctgcagaaacaacaggcttcatctgctgctattttcattttctttaatttgtcctttgtctggagtctgtccagcacaaccatccaaataataaaactatgcttgggatgattgagcttagcccaaacctgcttacaccagtaaactctttctagaggctgctgcaactttttgtagccaatcgtgtagtcaacagccacaatctgcctggaatcccgattccttaacatttcatcttttatttccacaagcttcctccaata

SEQ ID NO: 380236 - DNA, 1813 bp, Cannabis indica
ttaaattaatatagtaaaaagtactcattatgaattcaaataatcctattaattaatttttattaaattttccaaagtgtacttttaccttattgtgttcctttgataataatgaagcaactccaatgagccgaagggtgaacgcggatggagaattcgcttacggagctggacaagtaaacccaagaagagccgtcagtccaggcttagtctacgacatgaaagagatgtcgtatatccagttcctttgcctggagggcttcaacagctcatctatagctcatttagtcggttccagatccgtaaactgctcctcacttatccctggactcggctacgacgctctcaactaccccacattccagcttacggtaaattctaacacaacgacgacgtatggggtataccgaaggactgtgaccaatgttggtcaggccaaggccgtgtacaatgtggcggttaagcctccgaaaggagttgagatcactgtgaccccatcgaccctgtctttcactgggaccatgcagaggaggagtttcaaggttgtggtgaaggcgaataagatgtcgtttagcgcgggatcaatggtttctggttctctggcatggaaaagtcctcgccacgtcgttaaaagccctattgtcgttcatagtccacttcaacagaatgatactcctcatcatcatcatattataaatagtagtggtgataatgataatgttttgtaaaaattatgtagttaataatcagagggcattaatattaaaggacctaataatgatatatggaagtacttaattaattatgttataagtatacatctgattaattattactaattgataaatggaagaaaaaaaaatgtcatatttaatttatccattatttgggataataatagtcatagattaataagtgtagatgttaattattctaccattttcgaatggaaaaatggcattttattaacatcagccattacaatctccaacaactcaaaaagagggttgtagtcataaaaaatatgaatggacgaaatacaagaacatagtaagaaaatgtgtcctctttaacagaacgtattttgacaaaatataaaattgacacattactcgaatttgccaaaagatgcttacatttcaaaaccaaaagactaaaatcagaaggcagttggatagaactctcaatggcttgaacaactacaaaacagtcagttttaagtgagacaccttgccaacatttgttcttaatttaagtatgggtttctttgatcctaattactttgacaatctcaggtgaaacttggcccgacttaccaaccaattgagacagcttcaataatctgaccattacaatttctagcaataaagccaaaaccaaaagaatttgtagcatcaaatatagtcccaccttctacctctacattaattcttcctttttgttagtgttattagtttatatgtaaggtagacattcgcattctttttgggtggttagcatctgtgacagactcttcaagttcccttctgagtattgcttgagaaaacttggagtttgggccagtactcagtaaggttccacagtggtaataataagtctttcgtattctggagcttgaaataaggccatgtgaatctctgcatatctctcgatcttggcctatctcggatctgcagagtttcttcgtgatttggtttaattgaggggacataattaaagagatcttgagattatatcttttcctttttatactgttgttttacttatcaacacgcaagtgtatgtgtacatatcgtaaacaagtaatagactc

SEQ ID NO: 380237 - DNA, 5405 bp, Cannabis indica
ctaaccttttatgtactttggatggtggtatagtaatttcttagatccaatcttaaaactaaaagggaagaaaataaaatcgtataattagtggggtgggagggcattaggtttatattactagaaaatgatgaaccatgctatataattccccacactttatggaggataggaggaaagtcatactaaagcctaatacctattacctatatcaaacctggtaaacaaatctttctataaaacttatctagctttgtttagtcatgtcatgtcactctaccaagtggttggaaactattattgaagatcgtgctaatctttttatcatctattctttttaaaatgtcacccgcaagtgtgtacgcttgttaatctactgtaacagaacttgactataatcattccttgcagctgctattatttggaggccatgggactggtggttggttaagtcgttatgacatttattacaatgactgtattgtcctagacaggggtgagtaaaatccatatggtagaattctggaaggttttgtgccttatatgccgttacaaattttaatagctatctttgaatacataaagttctcagcttcctatatatgcatacatttttcatttatgtatacacacttatttatgtgtataatctgaatgcagaaagtgatttaaattgtgcaataatagcgagtatgaaacgcaattatgcagcatatgaattctctttgcatcatttgttctgctgtccttagaaagtggcacacgactacaggccacagttaaatgaacaaaaacttaaaacagtaatagaaaggatagaaacctattgtattgaaaatgttaatgcagcagaagtgttcatcacttttcttattggaaactagacattggtgtgtgcagaagatagttttaatgttctttgcttgttaatactcattgagttaatttctctctttctctttagaatacaactcgttctgactattaacacaatacttttaattaattttgactttccatcttctatcttctcttatctttccctatgtttccagtatctgcacagtggaagcgcctatcaattgcgaatgaacctccagctgctcgagcataccattccctaacttctataggttcacgttatctgttatatggtggctttgatgggaaaacaacgtttggtgatctatggtggttggtacctgaaggtaaaaaatgctttcctaatgtctaatcttgaatttgtgtagacttcaaatgagatatttgacccttgggagtttttacacatgatatgaggtgtgccaagtttttattacgcctttaggctgaaaccttggaaagaaattcttcattcacttgattcttagaatctcaatggcttatttttttctagctattgctattgttgttgaagattcctaactatatcttgtcaatattagaaataaagttatgggaatcataatttaaaaagcatatttttctaatggatttaaaaagtatttagtttactgggagaaaattctacatcagcttgattcattaaatgctttaatacttatatttttcagctgattatatgatggtaatggtgatgatgatttccttattatcagtggaaatgaaaaggtgtttttaatgaataggtctatctttcagaagcatatattagataagataaaacttggaggaaatattcaccaatggtatgaaatagccaagcgtggtacttgtttggagggagggattgttcagttttagtgttgtttggttgccaatggtagatgatttggaatttagactcaacttcaaatagtttctctttgtcagttattttattttatttttatataggggaccctattgctaagagatggacgtcaataccaaacaatgttcctcaagatcaacctgttgcaactggagagaattatgacatggcatctagaatgaaggttgctgcttttgatacataattttcttattgactattaattaataattgtactgctctataaataaataaatattactgctgcttcatatttaactcatagttgcttccatttcaccggatatcttgttttcctatgagttagaatgaatttaagcattttttcatgattttttaaaaaaagaaatggaagtaacgatcatcttttttgcatgattgaaatctgattttgcagatttctatgattaaataatgaccaatcctaagctgaattgtttattataataatttgttggtctgacatagtttaacccatattctcattaatacaactacttattcacaaacctcctgtggctagcagtttcatttcccatcacatggaagatcttttttgctccgcttgctcctatctctctcttttggcattgcaccatattggcagatttgatgtattattctaactttgtaactgattttacttcaaatttgccgatttcctatataagattttgaagttttaagtaccacataaagataaagatgaagttaagttgggttttacattacttccaatatacttggacctcaacaattgcatttattttatgtacactgtttgtgctgttattatccaaaaggtctacactaaatatactgttggtgttgattttctgagatgaccctcttttcatttaacaggaaggccagcaagggcaatctgccatctcagagttacaacgagcattagggatatcagcttcactgtcttgtgatagggatccaattgtagatgaactagaagataaagaatttactgaactagcatctagtttggttggagaaactgtttccagcaatgtaaaacttttgcatattcaggtttgttttggtatacatttatcatgcatctaaccatctaaaattaacttcaacttacacccttctttgtgtgaatattatggcaactcaggctctacgtgagcactggagaaaagctacaccaagttcaatacgacttaaagagctagggcccttgcttcgtgactaccaacgattgattactcgccaccatttgtaagaacaacatctctcagttctatttcttcttgatcgtatatgatttttgttgttgcaatgtttaaggagggaaagccaactaagttctgggaaccttctgctctttttctttcaatctttattattaatttctacttataattttattgattaattttctttttgacaaatcacattctcagcccaaatggtggatctcaaatgcagtcctctgtgattactcttcctgaaaaagaggcttattgcttctatcatatcagaaatgttcagcaggtacaaatttcttggcctatgtatgtaaattattttcgctgctttatctaattacatcccaacttgaacatgtttctacatgtacatatgcaaacatatactcagaactttccgttacaataatttgtgtagtcactcataaaatttttcatctctgcttaaatatgtgtccaaattctgtacttgaaatggacaagttgcttaaatatgtgtctgaccatatacaagttgctacaagttcatcggtacttaattctagtttctcacttttttttgtactggagaaatatatgtgtggttatgtagccttaataataacatatcaccctgtactatgtttcgaattccccttccctagtcaaaaaaaaaaaaaaaaaagaatgaccccttctgtacttgttgagatcaacttttttctacgaagtttaccgtttgagcagttttttttaaaagctttcctttttaccatttgctgtgttattactgaatggaaaataaactatcaatataatattcttaactacatacttgcatactgatatttttcttttgtccccatgccatgcactcgttcatttttatttttctattttgctctttacacattcttactgatcaaattatggtggtttccagttacgaatggatgacatcaaaaagcttctggcagagtataaacagctgcaaccagatttgagggtagaagtatgagtgtcttgaaagtttactctcatgcttgacatttctatagatcttgtacatgtaatatttgttctttctacatactggccttgttatggcttctacaaatcttttacaaactaaattataaataataaagatatcaatatatcaaatcttttgatccatatagatgctccattttttttttaaaaaaaaaaggtccttatagatgttaggctgagcctgtgagtgagccaaacgaaaattgtatgctaaaatttcaagacaaaaatttaagcagggaatgtttgctctgcatgcatatgtccaatttatttttctgaaacaacatataattaaagaatcataatcaacacacatctgaaatgaataaaatgaacatgtgatctcattttagagatgatacgtgcttgctcagctcctctagctgcaccatcctcagtctctcactctcagccaacagctggtgaagaaaatttaatcaaaacaaaaccattagctaatttcatatacaaagaaaggagtcttcagaaatttgttgataatggagtctagaaaatagacaatatatacaaactactcacacacatatatattatttagaaagagagagagctttacctcctttaatgtgctgacaagctgagccttttctttacttttctcattgaacatatctaatacttctttatattctttctcctgtactcacaaacaaaatagctatttttttttcattaaaaaaacaaaagaaacttctctaaatttgaatcaaagcaagcattattataattatcaaagatttagtgagtttaattcactcacctttttctggcagcttagtccaagaggctttagctctcgattcgccatgtcgattttcttcctcacattagcaacttccttccttaatggatctgtcatttcttctagttgctgcataattaacattccaatttccactacttcaaaaacactacattcaaatttaatctctagacttgaccaaagttgctactacaaaagcataattgacttcatcactatgtggaactaacttgacttaaaaaagaaaaagtcagcaaagaacaaagctagaaaatattatgtagtgaacttacttcccaaatcctagctaagcgtttagtttcttcttcagcacggcctaactgaagctcaaccttttccttcacttccatcttcctcctctcaatctcttcctctctagcttgaaaagttgaaatggccaatcttgatatctcttgatcatcatccttgatctcctccactgattgtctcccattgctactcatgtttccagcactactgctactactactaccaccaaagttgttcattttctgcattttttggggggtttcttatataa

SEQ ID NO: 380238 - DNA, 1947 bp, Cannabis indica
tattattattattatttatgacttatagaaagtaataaacaagacagtccctagacaaaacagcaacgtattttacttactactaacaaagccatccagaactttaatatatccacagattatttaaatttttctgtacaccttcaaaaattctccgctctctctaaccataatgactgagtgctagacaagcataattccccagcttcatgatagagcagggaattagtagagaattagctaaaagggggctttgttatactgtggctggggtctaggctacaccttaatgaatagaataaatagagggaggatttcattcgtcagtgtgaatttggtaagaaaagaaagggttgtaaaccttagtgggagagaccagggctctcgaactccctggattatcaatatcaatgcatattttctttatttgttcttttatcttgctgttcatagccaattggtaggaaaattcctatcacttcattcctctactgtttttcccaggaccaaattccacttgagaaagatcaattccaagctaagaacacacccactgaaaagtaaagtcagccagcaacaaaacggaggttctcagctttaattaaaaccctttccattttaacaaactgaccaatgtaagaatctctgttcaattcctaacacattatcaaggaacccttccagtatgctacatgcaaagaagattcctacatctgaataaagcaaatgacaaaacaaaagtgcggcatatcctttgctgcttgtttatttgtaacttctcttgtacaatattttaatgaagtgaatagttttttgtctctaaaccaaccagaataactaaataatggataggtatgggcagattacatcaaagagaatccccgcatgcaatgcctataaaacatatagttagtgaggaaattttccttttaatacgaggaaggattgtaataaagagagacaccacttgcatgtctaaagaagtagtgaaaatccatacaatattaaaatcaagacaagcaatacaaacacaatgaataagacaacacacaatcacttgaataaagtaatgtcttcaaaaataggattgacgaaattgggattactgcaaaagaaaatacttttttttgccaaattaggagatgacaaatccacaatcactacaacatataagaaccttttttcgtaagaaactcttataggcatagtatgcacctgtttattaaagccatcgatagcctccaaatgtgataatgcatcaaccgctgccaatagtgcaatcagcccctaaaatcatccataaaaatgtttatccaaggtttcctaaacatcagaaaactaaggtggcgtttggttggagttaatgaaatggaatggaatggaaacaacttttattccatttatttgtttggttacatttaaaagtattggaataaaatttcaatggaatgatttttccaccatttcggtggaatgactattccattttgaaatggaaggaaagaccattccaatgcaagatgagaaaaaatttaatgagtcttttatcaatttttttatgcattttaatttgatactattacattcctattcttcttcccatttccattctaatgttttcattccttctaaccaaacgccacctaatatcataattcgacatgaaaagcgaaatgataagacataaaacctactgatattggggagtcagcaccaaggcttttgtcacggaaaaatgaagctgaatccattgatgccacagccaatataataggcttgccttgatctgaggaggagatattaagcggaggaagtgatgaccaaacactgccctccataagtatgagcaatagttaaattcaacgtgaattatgaaggttaagggctagtttggtaagccgtataagagtcgtattgtattaaataataaataatactatgtttgga

SEQ ID NO: 380239 - DNA, 3658 bp, Cannabis indica
tttatgtttttgtgaaataatctatagtattatttgagtttaacgcaatataagaagcccaggcccagttataaaccaaagtgcgcggctttcatttcatccttccaaagtagcttatggggagcacaactgtttcttaactcatatatgatcaaaccctagaattgtcatcaacgtccttcactgatcggagatcggagtctcggagactaggaattccgtttctcattttccggattaaccattaccttcactcacaacaggtactgtatttacgtttttgaggctgctaatgatggttaaacgctaagggacgatggaaactttgtctcgttgttgtttgagttttctcaagtgattctctctgttttgtatagtgttctacattcgctatgatttagctgttatccaatttttatttttctttttatattagtcaggtttgttataattaatttataatgtttagttgttcttctaagaattagagattgtgtatacgtgttgataatcatatgagattttgttctaatctggatggtctgaaattttgttctcatttttttttttcatttgaaacgtaaggaccagggccaaagaaacattcataatttctgcttttggtacaataaaattatttgtgttctgtcatgtgaattccatttgtatggtatttgtttctacatacattttatttctgtactgttttttaagtttgggataattctatatcttggtgtttatgaagtgttaccaaacactgagaaatttctctccaaaatagaatctaatttatgttgtttctaggcaatttgaattgtaattattttaactactcatagtaagttacctggaacaatgttgtgttgttgattggagagataatttgtagttgtttcaaattttattcgaaattttaaggctaattaggattggtgccccctgaactttgacatgtaccaaatattgccccatgaacttttaaggtcgctaaaaatgcctcctgaaatattgagattgttggatttaaggacttttgtctaatttcattcaattttactatttcaatgattgtttatgtactaaatcatgctccttagactttgatatctaccaaatcatgcctatcgaactttgacataaattaaattatgccccttgaattttcatccatattagacttttttactaaaattggaaaaaagtccttaaatccaacaatctgtatagttcagggagcatttttaacgaacttaaaagttcaagggcatgatttggtacatgttaaagttcaggaggcaaaaatccgaattagccaaattttaataggagaagcaaaatagacaagtgcttcattgaatagttaccaattaatagataggcaattattatacaggtaagatacttatataattggagctttgaacatgatatacatgttatgatatgatttaacacaagaaataaagtcattagtggaactcaatgataatatgtgtgaagaatgtattttctctttagttatcccatgttgattgttgaataacataagtgatatgttaggagaattacataataatttatccttgagtgaacattttaagatagacaacaaattagagaacttaaccgctctgtttaataaacaaatgaatcactaagattttagaacaaggtcgtatgtaagggttttaatttagagttggatcttttttcattcaaaccaaggaacaagaaattttagaacactattttcacattaatgttatgtggaatgtagtaaatgggagattgaacatttagtatcactataattaaaggagaaaacttcttctactttccaaaatcttcatctctaatttattgtgtttgtggctcatttcatcagtaaagttatactttgtgttgtttgttagtttctttattgaaattttatatacagggtagccagtgaagtaaaattgaacataatggaatttaaaaattgcaggccacagaaaaaactagaaggttgtaagaaaaggacttgttagagagagtaataggtatagtaaaatagaatggcattgtcatctagctttctacgcattctgggatcatctcaacttggtgccattcgttacatctcaactctcacaacaccaaaacttttcatcagtggtatgttttctcaatacataaaagatgagtttctctccttctgtgttggtctcttaataatattttcagattgaacatggaacataagtgtcttgtctactcatacaggactttcaagattaaccacagatgaaaagctgaaagaagctttttctcctttcggtcggattgttgatggtaattaaatctgttttatcattgttatgtatgtggcttttgttgacctactagtacttacatggtggccttgattataatatatggtgtgtcagccaaagttataactgatagggtctcagggagatcaaagggatttggattcataacttataccagtattgaagaagctgagaatgcaaaagaaggaatgaatgccaagttcttggatgggtgggttatttttgtggatccagccaaacccaaagaaccaagaccttctcctcaacctcgaacatctgaaacgggtttcacatccaataagactgttggatggtgtggatgattaatcatgttgtgtactcttaattctataattattttgttgaatctaagagtaattttttgaggtaaaatagctagatttaattaccatgtatcattccaaagaaatggattgcctcaacaacttgaaatgatattcttgaattttaagtacctggctttgggttaaccaataactggaagacctaaattttaacaatatacattaatatttctgaacatagaaactaatagatacttttattaaggataacaactgtttgttatgtagttaattagtgggttcgtttcctgattgcaaggacttgtgttgtaaccatttcatgagactattcactctcaaaaataccttaaacaaggatataattgacaatatgttgattccttcagttgtttcacaccaacatatcaacacatcagaagcttctccctctgattttgtaccttctgtcgcaaataacaggctcctacttccacagctcatcgaatttgcactgtcttttgataaactttcatcaccttaagtagatgtaatgaaaacttaacttgaaacattagaaaccaataaaacttggactatcacttctgctgctcaaggtcccaaaatcttacgctttggacttgatttttcacatggaaaaaatttataaggaaaaatagtacaaaaattatgaaagaatatttttcataaatttgattaagagattttattattattatttgtaaacaactcgcgttttgcagcgaatatttagaaattttaaattatgttataaaataaatcataattttaatttaatgataactaagtaataaattgtattaaattttaatctaactaattataataatatgttaggcttgagtctattttgagggtaaattgtcataagaatacataaatttatagaatactcatcatatgattttaaataggggtgggtgttcgttcatccaatccaatccgcactttttggtcaaacaacatccaatacgc

SEQ ID NO: 380240 - DNA, 1456 bp, Cannabis indica
gatatagaaaggtaaaaaaaaaaaaactatttttcgactgcaatgaagccacacttgacataaaaattcaatccatatgttaatttttaatgaagatatgatataagagttacatactaagtgatgagaagaacgttaattgtttaaggatcaatctcatcaatattttgtacaattctagaaagaattatagctctcaagatactaaaatgaatttcatcttctagaacaagaaagacaaaaagtaattattttacaatataacaaaaagaaacattaagctaagtacaggtacatttataaataagatattccttagctaaaaataattggaataatagctcctaacatactaatttacatagattctttcaaggaggatatatgatcaatcatttaatgataataataaaacataaatgttaagtgatgcatttatatttgtagataagaagataccatcgattttttactaaaagtaagccacaacatatatatagaacttagtctaataattttatgaggcacatcattttcataaatgcaagcaacaaaatagtaagtcaagtacctcttaagtatataatagtactgaagacaatagtcatttgagaacaaatagcacaattttactacgtaaaaattttctccagacataaacaagagcttatatttaaacaacatacctgattagaaatttctcattttgtagtagtagtaaatcatcccttatcactcagaatgctcttttttacaagagactttaaagcactcatcttcctaggatcattaagagatgataaggattttgactacatcaaggatgtaaagtttttgaataactcttccatcaaatgttcattctcttccttatttttatttttgtacctataaaaaaaataatgaaagaaacagagcaaaacaaaaacttttaaaggtcgaaagcaaacatatttaacattacatcaagaattcacagcttttgaagaaacaaatatcccccattaaatatttgctctttgacataatctcctccatcgcttccttcttggttttgtgctcctatggtaagaaagccataaacatgtgaaaacatcatacacatatatccttatggatataaacacacccattattgggaaaaaaatgaatcaaaatcaaaaaagaataaccaaaatagcatataataacacttatcatcgctatggagtgtacacaaaaatatgttggacaccacaacacgtgaaaatgtaattactttattattgtaaaagcaattacactaagacttgaacactttaacttgaccacaatacacaccaagcactcactcttttattttatcactagacacatttactacacacttgtatataactcacacttttgaaagactttagggacactttagaacacactctcactcttttgaacacactttgaagacactcttgtt

SEQ ID NO: 380241 - DNA, 4904 bp, Cannabis indica
aaaacccataaaatttataatttactcatttaattaagggtaaatagtggcataagtacccaaaattttaagttggtaagcggcataaattcaatgtttatttttagcggcataagtaccaaatatttgtaaaactataaattttctctaatttcatcaatacagactctgttattatcttaaagattgcacgtattagactcagtttttatatcattaggtatagacagaaatatatatagtactaattacttctaaatattctttcaataaattcaaacggaatctgtactaatgaaatttgaaaaaatttctaattttacaaacattaagtacttatgccgctaaaaataaatattatatttatgcctcttacaaatttaaaattttaggtgctttacacatctttctttctaattgtactaaaacaaatacaataagacttttttttgtttttttttgaaatcacaataagactttctaattacatacaacaattaacttattacatctacaaaatgaatttacacatatcaaaccaaaaatgactcccttgtttttccttctgtgttttttttttcttttttgggtggggacatggtatatcattctcttataagcaaggttgtgtagtcaaagccaatgagtttcacatgtttgatgttattagtatagtattacttttttttttctttctctcgttatattaaacatgttacttaaatacttgataaggatgggataataccacattcttttataatttttttttcttttgtaaaagaagaaataaccttcaaaatccaaatagaggacataaatgtaaaacacaaagattatctcagcaatggcacaaccaaatggagaaattatatcgaaaaaacaaaattactccccaaaaaagataaacttaaatataaatgaccaaataaattctctaaccaatatagtgtaggaaaaatctacaatacttcaaattgaattgtttaagccacaaaaggtcaggtaaaaatatcatagtgattttaagtgttgtctttactaaaaattgtggcagttttacaatattcactattacataattttcatgttgtatatagtggattgcttcacttttaaactaggattaattctagagaaatcttgaacttaactatgtaaacatgattgtgtcattttttatagttaaaatttgaatagttaatctaatcaagtgggtaaagaacccgaaaccacaaaattgaacaacaaaactgtaaaaattaaattcttttatatcacttgctacttacaacaaccaaatagaaaagtaaatacaataaaaaggctcatgattctcactcaccagaaataacaaactccaactacttcctaacataatttttgttgtacaaaccaaaattcctctgctctaattacaattgtaataacagctataaaaggaggagtcctcaccaatcctaaagcagagtagaaataccaaaaatgtgagacccagatttagagagaggagctcatgtgttgagcttggtgaattcatgcaaagaaaaataaaagagaattagtgagaaagattataaaacaacaagaagaaagaaaattgaaataccagtcaagtttgtggcttggatttcataccttatgtaatattcttcaaagtatagtgtagatttgagatcgttcttcaaggcgagctcaaagaggaagtacccctggatttaggacgaacctctataatcgctgtgtttgttttctcttttttttttcttttgatgcatgtacttgtgtttgtataattgtgatctattttttggggatgggttctagtgatatcggtctggtttgatcgagttggctatctggttcctagggttcgtttgaagaggaagaaagagaaaaagagatttggtttaaatctcaaaggttatttgattgaatctgagctagggttagctcatttagaatcatttgtttgctctggtcaacgacaaatcgttttgattcaaacgatttatcatagcgagttaaaccactcacagtttgattatttttaatcaaatttgttttaattatttttggtcaattttcactttatccttttaaaatattgagttggtgtagggcattcttgaaattaaagaattcctacaagaacaaaccaccactatattgtagccacacacatagagaacaccaccacttgtcattgtctcaataaatggagagcctcaccaaactcagcctccccagcaacaatggtgtcaaccttacattcttttatgattattatttttataaagtaaaatgaattacactaaaagttcacgatgaagatattagttatcaatgtatggacctcttcaaactaagataactaattgtctagtgtagatacatacttagccagggttactgtacgcaggggcagaggctggattgggccaacctttttaattttaaaataaaatgagattatcattaaaaatttaaaagccatctaccaaaaaagagtaccaaagattcacacaaattcttgtaatcccaaccactacactaacgatatcgatataaagagataacttaagaggggtcaactattaaaattggtaaatattagataaatatttttcaaaaacattattactttcaaaattcctaataaaatatgaactatttctatactaaattattcattagtttatttttcacaataaactaccaaaatatttttaaggaaattatattctctattataattattactataattccttataaaataaattctattgattgtaggttttttttttttttgtaaattttaaatagtattcaacactatcacaaaacgttataccactttagtacaattaaataaagaatcttatatatatttttatataataactattatagaatatcgtaaattattcgcaacacactatgtgtagtgatggtgttgggcgaaagcttgaagggagatcaagttgagtttcaaggggagcttgagcagagctagagggagtctagcagctggagggattccagcaaactagaaccactgggaggctagtaacttgaagccgaaatctactattttttgttcttggaaacaaattaaaagggagtttttatttagttttttgtatgtataagaatagtttgtagcaactttatttatatggtggattacttaacctttacagtaggtcccgtggattgatctaagagaaatcttaggccaaactacttaaaatgattgtgtcattttttatgttattttgttcttaggttttatttgattaatatctgaatattgttgatctaattaagtggacaaatagtttaagtagttaattagtcttttaaatggtatcagagctaatgtgttggtccttgctgctttcttgattgatttatttgattctttactcgtgttgtttgttctgtattggttccattttgtattgtttaattgttaattttttttactcactactgtcgtctaagtattctataaattatttcaaaaaaggtgggtctacttctaaaatcctcatgcaattttacttataaaaccgcatgcttgatggaaccaaatatgcttgttggaaagctcatatgagagcctttcttaaagctatatagtatatagatgagtgtgtgtggaactctaatattataggttggtctccacccattgtgcacattggtgagaagactaatgtcaagcttgtggttgaatggaccaatgaagagattgaaagtgaaaattggaattctaaaagaattcatgctattttaatgttgtttatgtgagtgtcatagttaattgtatttttttttttaaatattatccgtatttttggatgggacacgtgtaattctaaaaaaatagtataactaagttactttaagcccaatagcaggcctaactaagataatggaccaaatttattgtgaagtcatgtcttttggatattggacaaatgactcgttcaggcaggataaccctccagcacagcgtgtatttggaagacctcagtcagagcgtctagagaagtaactagtgagcatctggatatccagttcattatcatactcattaattaccagatcttacgatatcaggacttaattctaaagatttcattcaaggatcatatcttcccaaaacggaaagatagtaattaacaatcaagcattaatgtgtttttattatcaacaaaaataggacacgatttgacaaatttaaacgatatgtggtctccacatcaacatacaatcagcgtctcagggtcgggctccaccaaatgggctcaaagtcaatatattatttgtatttaccccatcagtgggcagagtcaagaaaacaagaaccctaacactataaattaagaaaactcattcttgcaaagggttagaatctcaatccttgagtgttgaggcaaattttaaagttcagacacttgtgtaaatcataaggtttttcgagtcttataacaataatattgattggtagactaaaactcatcaatgcctcaactacataaaagctctgatttcatgctttattgattatttttctttagttttattatattttattagtttctaaaaatcttagcaaatatattggtgttttaattgaaaactaaagaaagaagtgatatcataaaatgttgtatactgtaaccatagtactcacttgaaacaaaactggcagtcgcaatagagacatatctatggacgatgtagatcctatcgttcaggtgaaaacagcaatcgaaaattcaaaataatcgaccagtcgtcctatcaaaaaaactcattataatagttgagtgttcttaaaattaattatgatgctgcattagtctttttaatgtgattttttttttttt

SEQ ID NO: 380242 - DNA, 2142 bp, Cannabis indica
aacacttgatttcacgttgtttgggatccactcaacaaagtaagatgagttcttattttgcacattgatcatctgttcatccacctctttagtactcatcttacccctgaacatagccgaggcagtcaggtatcggccatggcgagggtcagctgcgcacatcatgttcttggcatcccacatttgctgagtaagctctggcacagtgagggagatgtactgttgggatccacgagaagtcagaggtgcaaaccccaccatgaagaagtgaagtcgcgggaatggaatcaaattaacagccagcttacgaaggtccgagttgagttgcccagggaacctcaggcagcaagttacaccactcatagttgcagatatcaaatggttcaagtcgccaactgcaaattgggagaaacagcaaaatcagacactgtgaagattgtcatgctaaatggtgttacagttaatggaagaagtacacacaaattaatacttacaacttggtgtgctgagttttagagtcctgaagcaaatatcataaagtgcttcattatcaagaaccatgcactcatcagcgttttcaaccagttgatgcaccgagagggtggcattgtatggttccacaactgtgtcagagacctttggagaagggaaaactgagaatgtgagcatcattctgtctggatattcctctctgatctttgatatgagaagtgttcccataccagaaccagtccctcctccaagtgagtgacatacctgaaaacctgatccaaagcaagaaagggtttaataacattaatgatgataataataaataaaagcaacgatctttactatccataataagaaaggatgtactgagaatcaaaaggctattacattctattatccaattgacattatatacttctatctcaaaatgttccgagctttttgtgtcgttgatattattcagtgtcgtcacaattaaagactaaattgtagtacaaataaattatttccatgagtaaagaactagtaaagtcactgtagaggacatgccggcgaaacaggaccaatcaatcctggccctgggtttgatcaattttattcactgccatgtacattggttaaaatattaatattaaaaatatgtcggtgcgtatatatatacccggaatggttgggccatcaaataatgacagaaaacggatattaaaatattttatttgtttgtaaaaattaaaaaaatatattatatatcttgaaagatagtataagattctatgatgactgtcaccacgccagacaaaaatggggcctgcaaacaactcagccggcatgtattatatgattatgtgtctctaaccccaatccaaatccagaaacaaaataagcgttaagcctagtctccaagtttacataccagcacactgacaaagcaacaaatgatttttacctaccattaaagtaactagatcttatatttttatactaaagagtgaagacacagtcaaaaaaaaaatacaataaatgtgtagcatggagtactgtcttataaattaatgtcgcatcatcaggccttatattacttaatactactttgacaaattcaacacggactatagaaaagaaaaatatgtacacaacaaatcttaccgtggtaagatgcaatgcacatgtgagataacagatccaagtatcaaacactgataaagagctgaagaaacagtagtacaaacataaagaaagaaacatatcaactaactttgaggttacattatctattgagatcggatttactgctctgtaacaggcacaaaaaacaaagaacctgcccatttcgatctcatcaaggtcaataatatagcttatgaagacccattactatatctatcccatccaattatttaagtcacgactaagatccaatccaacaaaacaaagctaaagacgtattctttataaacaaaagcaaatcagttcaaataacgcataaatggtgctcatagttttttttttttacataaacaatagcagaaaaacaagaactgcgaactactataagtctaaattttagtctaaaatagcctccaaatactatagattaattttgttcacatgcagcatcgcgttagtataatattcaattgcaagtaattt

SEQ ID NO: 380243 - DNA, 2486 bp, Cannabis indica
taactttgaggagttgtgtcaaacatttaaaatgaatggagttagtgatgacgccatcagattgaggtggttcccattctcattaagggatcgagccaagaattggttggtatctttgccactaaattctattaatacttgggaaaaattggccctgaaatttctctcaaagttctttccttctgctaaggtagccagactaagatcagagattaacaatttcatgtaacatgacaatgagtctctatatgaagcctaggagagatacaaggacctaatcaaaaagtgtcttcatcatgggttggatgcaagttcataacttctacaatggattaaccagcaccatccgtacccttattgatgttgcatctggtggagctttcatgacaaagagtgtgaatgaggcatatgatttgctagataagatggccatgaataatcaacagtggccatttgaaaaaagccaatccaagaaggtatatagaatgtatgaagtagatgtcaccacaaagcttacaacccaagtagaattaataaagatgatgacaactcaagtcaagccaacccagtgatctgtaaactatgtggtgggcctcacccttatgataattcccaagttgatgttaataacctaccaatagagcaagcataagccattggaattcctataattggtgactgtccttctgttgatggagtccatcggtacattcatgtgcaaccatctggccaaacttaacttcagcaagggttctttgaaccaagaaataggccatttttccaaagaaatacctgaacaacctactaaacaacctgcctaacaacagaataatagtagagtgtctaacattcaagcagatccattactccaattcatgatggagactagagcaattccattaaaaccatagagaatcaagtggagcagttaactgctaaaatggccaaccgtactcaaggtaacttgcctagtactacaaagattaacctaaaagaacagtgtcaagcaatttccttgaggattgaaattaatatgagaggccaagggctgagcaacaagtggttgaatagaagtcagatgataaagacaaggatcaacatgcaccaacaccaacataagaagaaaagaagactactaaaggtctgcaagcaaaagaagcaacacagcttataagcattgagcaccatataaacattccctatcctcaaatacactgcaagaataagctggacaaacagtttttgaaattctttgaaataattaagaagcttcatatcaacattccattcgagaaagccttggattaaatgccaactgacttgaagttcatgaatgatattttagctaagaaaaggaagttggaggaatatgagatggtggcacttgctgaggagtgtagtgcaatcctacaaaagaaattaccacccaagcttaaagatctgggtagtttcaatattccatgcttgatagggggttcgatggaaacaaaagctctatgtgagcaactatcaacttgatgcccatgtctatttttaaagactaagattgggagaagccaagcctacaacagtgacattacaaatggcagaccgtcctttgactcattctcgggctataattgaagatgtcttggtgaaggtcggtaagtttatctttcctgctgatttttaatacttgacatggatgaagatgaaaacattcccatcattttgggaagaccattcttggctacgggaagagctctaatcgatgtacaaaaaggggaattaaagttataggttcaagatgaagagatgagttttaatgtatttgctctaattgacattcctacctgctgtaaggttgaattagtgaaagactgttaagaagtaaccgacgagaagaagaaagggaagtgttaggatatttttagcctattatgtatgtcatttttagagttaatattcttctttattgtcattttatagaatagaattgtccttttttttttctttaatttcagttttcgacacttgaatgcataaattggtcaaatgtcacaaaaagatgatctataaaatagagaaaagtgtgtaagaatataaagctaaaactataagcctaaattagactatgttctgatcagattttaaagaaagtcgaaacataaaagttctagatctctctttcagctttccaggacatcttgaatcgtccaattacgagaaatatccagagagttttggccaaaatactatcagtcatcgcattaagaaatttctagaaaaaaaaaagataaaaagatattgaaaaaaaagatagagttgcgatttttatcttgtttaagtttaaattttgaatctttttagtgtcttttagttatctttgttagcctatataaacacattattattagtatgtttagtacgttttcagagctcaaaaaaactcagaaactcttaattagcaagcaattcaagagtatgaaatgttggaaattatttta

SEQ ID NO: 380244 - DNA, 9734 bp, Cannabis indica
ctcctcagatacgagaaggtagatttcagacacttgatcaatgcttgattcgggaatatcgaatgtcattgcagggggtatctaagcagatttcaggggactttacggaggtacaattttaaaaaagaaaattatagatatataaaatccaaggcaatgcgtagacttgctacaagaatttgtctcctactgggacgaaatcaaggccatgcatagactcgtgacaagtcattaaattaatcactacttgctgcatgcgttttatcagggggttcgggcaaaggtagtggagaaagatttggcaccaaaggtatcatgttcttatatttaattctttaacagaatgtgggttgataacatcatgtaataggtgctgaaacgttaatggtaacagtttctatggtttcaaaatgcagtgggatcctccaacattagggcaagttaccgaagatatggtggaccgttatttctctcccctaagtgaatttgaagctgacctggaactacccacgaatttgcgggaagcatttacctaattgggaagaattactatccaacatttgttgggatcaattcataccagctctgactggtttactttaaagagttttaccatgtatagttgaatcaaaaagaagacagaatgagtttgatatgttaaacaaggtaggattacccattccaaaccgaaaaagcacactagaattaatatgctgctataatgttgttacaagagactacagtttattgacatcaatcattttcccctgaatcacgggtagctaaattttattagttcctgtcaaaatttctggatttatgaagttcgtcttttcgactacaagaattgctatataatttaaaataaaagaaaaactataatgaagactctccatctaccactattcagcctcctttgtgcccttgtaattgttcactagctgcgcctgcacatcgtgagatacagctaaatgctctttatattccattgtgaactcacccttcccctgccaatatggaataagtgtatcaactcactgtacatcaaatgcataccataaaagagtacaccttttaaaatcatgacaattttcattacctgtgtcattgaacgtagagacgttgagtacccaaacatattgtttagagggacctgaaagaccaatatcacaaattgtaagaagcttattacctatttttctttcagagaatccaccagcggtagtatttaatttattaaattaattggtaagtaaatataacccgtttttacatgaactccacaaccccttaacagctcaattagtaggcactattcctttatcgagattaaacaaaaacaggtgtattttggcgcttttagatgatgcaaatggcaatgacagatagcaagaatttcaagtcaggagaagatttagttttatttggtatagaaacatgcaacgagtgtcattaatgcttatgaagtagacctagtgaagaatgccattgcaactcgatcagtcttaaaaattgtaaagacaaaaagctcctaaccttctacttataaatacatcagggaattaatatttagaagctaaagcatgttcttaaatgatcagtcaagtctaatctagataatactaacagtaagaaaaaaaaatgactcacatgggcagtaataacagaatcatcaccatcctggtcatttccaacaatggtaccttttctcctacattatgtgaacaccacccattattaattagtgaaatcggtatggaaccttgaaatacactacgtacaaaagtagaaaagcaacttacttattaatatcgccagcaacagtgccctgaaattctatgggtactttcaaatcaaccagcataacaggctccaatatcacaggtcttgctgctgtataacactgatttacaagaaaaagaaaattaaaaataagtacaaattcaaatttgagccgaagaagaaagcaaaataaaatagaaacaaaattacatatagttgtcactattaaaatacaaagatgacatagaaaagaacctttctaaatgcatatattgcagctaacttaaatgcaagttcgctggaatccacagcatgagaagctccgtctgttaaacatatacgaatattttcaactgggtgtccaattaatgagcccctgagcacataaaagaaacaggtcagctgttgtgaactgaaatattttcaaagatcaaaaatcaaccagcaaaggactcacgaattagctgcttctttgaaacccttctcaatagctgggataaaattcgatggaatagcttgtccaacaattaagttttcaaattcaaacttggttgatgaccctggaggaagtggttcaatatatctaaagatacaaattgaaacaaacttaagtacacgatgcagaaaatcaatcagcattgttaagctcactaaattagcaagttaatcaatatagagtgcatagaactaagcagccttgggcacatgttgtggtcatgttttttaaaagactattgtcaagcacaaacaaatattgtgcatgcttacccacatactcttccatattgaccttgtcccccagtttgcttcttatgtagataatcaaattcagcccgttgagtaacagtttctctgaagttcacacgaggttttccaacagtagcatcaacctgtataaaagagaatacaaagaaagaatagcacattttaattaaaaatagcgatagactatcccatattagacatttagcaatgaaaaaaggccaggcaccttatactctctcttaatacgttcaacgtatatgtccaaatgtagctctcccattccagaaataattgtctgatcaaaagaaaattgatcactaagaaacaagaattattcttacgcttggtaaagaaagtaaaattgatttgtaacaagcggaataaagaatgacattaacaaacagacctgcccactctcaggatccaaaccaacacgaaaagtggggtcctctctctggaaacgattcaaagcctttgaaaactagatcaaaaaataagcctgattagaagaacacaaaatcaaatagcctgactagaataacatttacaaacacattttcatagaactgacttacttgtcctccagaatcttttgagactggctggacagctaatgacatcactggttcaggaacattcatagaagtcatggtatatttaactgatccatccgtaaacgtatcgcctgatcatataacaaagtctcaggaaaaatttctcaaaactcaaagggcaagggaatcaaaggaacaaacatcataattaaattgccacattatttagcaccatcttcacttatagtaatcacacaagcaatttaactatcccctaagactttatggaaaagcaatggtccatcgaaagttaagtttttgggtggctggtagctctaggcaaaattaatgtacatgagaggatgcaaaaaaagagaccttttcttcctttatcactgggatggtgtgtttgctgcaagaggggtggggaagaagtggtgcatttgttcctaaactgccgtcttgctcacaatctatggtttaatctgatgaacgaatttgagaatcaatgggttctgcccgagtcagtaccccaaatgatagtgagaaaggtgggaggcacagaggcagtaagcgcaggtcttgcttgtggagaacagcagtcatggctgtgtagtggctgtttggttagaaggaaataatagaatttttgaaggatctgaatgttcagtagaggatttgtgggacagaattagattttggacagccacttgagtgtacaagactaatcattttgaacacttctcattcttagatttaagtagagaatggagaactttgatctaatttttcatttggacaaacaagtattgtttatactttgtgtcctgtcttgtttttgtgcttcttttggtgtgttttatgctaaaaccatatatcaaacggttttcctctgccacaagtgagggctttcaatataaaacaggtatgagccagtctaagacaatggcctctatccctttttaaaaaaaataacagcaagcaacttcttctcagttctcactaagttattattaccgcaattttttcctcttatgtaggcttcccgtcaaaccctacaataattggggaccagaaaactattgattgttgagctattctcaaccatcaattgatagtaataataacatgtttgtatttggagtaatggtcagacctgatgcgcaatctacaccaaacacagcaactatttgcccagcatgtgcctcttgaatatcctgcagaaaaagagcccaagacatacatgtcagtaaatacatgtcaagttgacgcgtagtctgcttctattattatactaacagcagcaattctacagctacctacagaattagcacttaaaaaaattatacaaatatttgattctaaaataatatcatatatggtagtatgtttatgtgctcatgtgtattgtttagtatcatatatggtggttcactatatatgatggttcgttttgtgtttatcctaagaaggacgagaggtagtagtgacgatccgttccatagatagtaaagataagtattttcttcataaaataatattttgaaatgtttttcaacattaaaaattttcattttaatattaccattaagtagtgtaataattaattttatacattttatataagtgtatttttattttactcacttggtcattgtaagatgcaaggacttcaaaagattagctttattacaattctcttttttaaatattattaatttatatgatataattttaaaattacttattttaacgttttcttatgaagttgatttatttgtttggtattttttggtctaggtatcaacttttttagcagcagttcttgctttttggttggattaagatgggctcaaaggaatctcacagtcacggaaaagctgtagctctattctctaatggtggcatgggattggttgttggaattattagacttcctctcattcttttgagcctgattgtttagctttgatttctgccttttataagagatttttcttctgtaatgatttaggctctcttttagatgttattttttagctaaccatctaattttcctaaggcgtcccttatttatgcaaatcattcggtcattatgactacgcatgaattagcatgcacgtacttagggtggatggtaaactaatttggatggaggatattccatctcttctttatgatttactcaaagctgattttttttcaatgaaattgttcgttgttcaaaaaaaaaagaatatatagaaaataaataataaaataagcttagtctaacaaattctaacctccatttcattagaatgcatccgaaccaagcgaggaacctgtaccaaggagttaatagacctttaggatgtgatgtaaacaaatacagagaaaagcatcacaataccattgtgggagaaaaaaggagcttcaataaagagaaacaaaataagtcaacagtcctgctatttaattatgaggcatctaaagtagacttaagataataatattttccgttaaaaaagctgattcgaattgaagcatgcatctatattctatagtataataaaaaaaaggtaaagaaaaagttaaagacaaatgataccatgcaaaaaagttatagagataatgataatcagaccacatgaccactacagcttaggcacagaaattagcttggaaccaaaacctaatagtgttcaaactcaccttaactttcttgcctgtgttaacattgatgatgaaatcacccttccgaataataccttcataaattctttatttaaagaaaattattagccaaactgatttgctaagtgatattaatgtgaaaataagataagcaacatgacaaacacagcactactcaaagataccttagatatgtcaattgcccaaaacgaccttcctccaatttaaaggccaaggccacaagaggtccatcaggcgttccagacaatgtaacctacatgctaattcacaaattacacaccagaacaagaattacaaaataaatgttcaggaatacaagtgccccagcttaagtaccttctcttcattcttcgtctgatccagagcatagttattgacttctactggacagggcaaataattaagcacagcatccaaaagtggctgtacaccctgagcaccaaattgacaaaagataaacggataccaatgaaaatatatacagcaaaaatgagagtggagaactttttactccagtatgagacataatgatattcatgataattcactataccacccaagacggtactcaaatgttcagccatgtcatttgcccccacacagtataaggttcatataactcctcctgggtactcacagggtacctaatttttctaaaactcatactaataatagataatttactactaattttctttttataaactggtgggccaccaattggactaacatattccagggcaaaattagaattaattaaaatagggatgaggtttttaaatgtaaaatctgattgattggatagtttaagtaatggtaagttgtttacgaactttgataagagagtttgctgactgtataaatataccaacagctgccttcgtaaggcatctgattattgtgtttaaattgtgtaagagtagtaactttgtggagctatcctagtgccttgaagacattgaactttgtaactctgtttttgatatcaatgagaacactaatcgcagaattccttcaaaaattaattttctatatttaacgtgtatcctaaataaagcacacaagtttgaagtgataataaaataaataaatttaagctctactttacaatcactacacaacattgcaatctcaagtctcaactcaaagttaaggaaaaacaataaaaatgtaaaccttctctcaatttcaatttaaaaccaactgattagaaagagaaacttggaagtaccttgtttttgaatgcacttcccataaatacaggtatgaatttctgtgctatggttgccctgcgaattgcttcctggaagagataaagaaaagaaagccatacgtttcaacaatcatgcaaacactttgaacagctaaaatctcttgaaaaagtaaactacatacggtccaaaagagttatagaatttcttcgcatatgattatattgaaggatgttgtaacatcttatcacatgagctgtgaatatttatcttcattttttaacacactccaggatgggaagcaaaagtaaatatttctaagaaagaatattacaaccatgtgatacatatatctgatagcattttttgttttgttaattttccataattttccctacctcaagatcagtagaagatataggctcctcattaagaaataactctgcaagtttatcatcaacttcagaaacaacctcaattaattcacgtcttttatccattgctaaggcctccatatcagcaggaatgtcttcagcaactacctcttcactgcaacatgcaccatagaaaacaacccaagcatgaaaatgaaagaccaggtatgttagacccgctcgtgcaacatgatgtctcagaaaacatacccgctaggaccacgaaaatagtaagcttttaactgaacaaggtcgataaggcccttgaaatcttcttccaatccaataggcacttgcattgcagcactgttatgccgaagtttagaccgtgcctgaaagacaaaaccaaaacgaaatatattaagaacagcacagcaataatatcaattaaaacttaaaaaactgaataaattcaagaatattgcaaaactatccaggcatcctttgtcactaatataaaccagcaaggccattcatcagtcttgtcaagccttatcacatcatttgagaatggtcttagagtttcatctcagcaagacaatttgcatcaattatcgttatcataaactatatgtgctaactacagttttagccccccccaaaaaaaaaagtaaaatgaaagtttataaattttaaattattattatctaaaaaaataaaaacaattttaaattgttaatatgtacctggttaagaactttccatggatctgctcccattctatcgagtttattaatgaaagcaagtcttggaacttcgtatcttctcatttgccgatcaacagtaattgactgactttgcaccccgccaacactacaaagcacaagaatagcaccatcaagaacacgcagcgccctctcaacctctatggtgaaatcaacgtgaccaggggtgtcaataatgttaacctgcaattgtagcaattccacgtatatgtgaaaaaagttatataaatttataataaatgatagcaacttcaaaaataataagtcatatttaaacaataatagaattactaaaatcccagttctaaaaaaaaaaaaaaaaaagaaaaagatttctacattgaaatcaaactgaactggaaaaatcaatatgaaatgagattatattttagttttgtcctaagaaattgatgaattacgccacattgtaactctgtgtgcgtgtgtgtgtggccagcatgctcaattggcaaattgtaaacttcataactactcgtaagaccaaaagaaacgattagccgaaccaccaataatcaacctagtggctaacgatccaaacagacaaatggccaacttgttcagatttaagtacctgataaccattccacgtgcagtaagtagcggcagactggatagtaattcccttctccctctccaaatccatggaatccatcttagcgccgactccgtctctccctctaacctcatggatctcatgaatctttccagtataaaacagaacacgctcagtgagcgtggtcttgccggaatcaatgtgagcagagatcccgatgttgcgaagcttctgcatcgactccttccaccatggttccttctcctcatttgatcgcgctagattaccggacgagaaattccggaaatggaaggttccaaggagtgcagcggaggctggtgacggagacggagatcccgaaagcgacgattttcggggtgaattgtagagagtatagagaaggcgcggtccagagggtgttggaaagcgccccatgttaggtttatgctagggttttggatcggggtttgttggttaaaccctgaaccctagtacaaacaagctctgcgcctgtgtttggcgtggactgctagattgtttcaaagggttttggttggggtttttgttttgagtattacgttatgacttatgaggaagaggaagactcgtgccatgtcagattgttgggtcggatcgggttggttattcggtttggtgcccgggtaaatttgataaatgtatttgaataattaataattttgccatctaaactttactcactatttaattttcctccttaaaatatatggcttgttaaaaaatttttctaaaatataacatttatataattatgctccttctgttaggcttcgtttcttttgctgttaaaaattaacatttttactccttaaactttgaccaatataaaattagctaattagtaatttttccccccgaactttgacatgtactaaatcgtgtcccctgaacttttttggccgttaaaaattctcctcgaactattgagattgttaaatttaaggacttttgtc

SEQ ID NO: 380245 - DNA, 2706 bp, Cannabis indica
cttgttattgtcaatcctcttctactaataatgcagcacccctgttgtgagagaagaaaacaaaaacagcaacaagatcaaaagcatatagagatttggagaaactaacatgaccccagatcgttacgcacccaaactagactaaagtgtcatctttttacccttctattgatagagagtcttcagatatttcttttccttctccaaagttgaatattgacacattaaaacagttacgatattgataagacccgacaaccacccgaacaagattaacctcaagaacagtaaaacagtagctatcacacaatattggccaagaaatagggagtcttattgaatgaaattgcaaaaggaaactatagcctctacaaggatggtgagccgaagctctctaagagatgctgagaaaatactcaattctcgcataccccaactattcccatactcacctacatatacttactaatttccttccaatcactaccccgctacatcatcaccatccacaaacatcagagaagtaagtttaaatgataagcgaaaaaaaaaactcgattatataagtctccttacactgctttacatgctccagggacatgatatttcatatgcaatcttgccaaccaatatctggcatgggtgtttgagttgtcagcctctagagccaactcaaaattttcctttgctgtctgtaaaattaaaacacaaggtaaagaaagaagctaaattaacaagcattcaatttcgagattggtttcgtaataaaagaaatggtgaactaaacaccagcctctccactaagcagaaacacatgatatcactcggagagtttctcgcattaacaaggtaatgtcgatgaattccacaaccaactattatcaccaatgccatattaaacacaagtaattaaaaggtagaatagatacagagattgaagatgtcaaatttagctaaaattataggagaaagaaaaacaattgttttcccaacctatctaaactatattgggagtacttatgaagtaaccgaattcaggaatttttaaaatcgaacgccatatttgaagctcaagaaaatgaatgaaatttaatctacaaaacaccaaatatgacaaaacctttagcaagtcaaatcaccaaattagccattcttttctaaaatttcagaacccaacaatattacaataaaatctccaagtgggtattcttcacaaaccaattataatcaaaataacaagtattatacaagaactatcatccttccaaatggatattcaccacagaccaatttttacaaaaacaataacaatagtgaaatcattacaataaaattggtagtagaatcataccctgaggagaggaataagacgtttatcttggaactcagcataatcaatgactctatctacttcctgcaaagcaccataccctttggctataaactccatggccttcttgttcctactatggacccatctcttttggttaaataaaagaaaaccaactgtagtatgctcttgttgagccttcataagaagttgccttatcatcttcttctatgcaaaatcacaatcatctaaggatgggaaatttctgaccaaagtagaagaacaagcatgaccctatcaaacagatgaagaagattaagctgagagatgttgtgtagtgaataacagaacacagcacaccatgtgtgataacttgatattgatacaatacaaggtggaaccaaatgtttttctttttcatatatgttaattctttcttctcacttaaatgactggcaccaaacatgccctatattatgcttgaccgccggtggcttattagttctctagttgaggttgctgttaggagacgtttggtatgaagtttaaacttgaatgggaatgtcaaactaaattaaattttaattaaaatgatggtaatgttaatcccctccaacacttgagtttcatattcccttcaagtctactctctttaattcaaattcacataacaaacaccccatcagatagcgtttgatcggaagaatgaaaacataactataacaagaaaacattccaatactttaaaatgagaccaaacaaaggaactgaataaaaattacttcttttccattccatttcatttcattacctcaaaccaaatgccacctaaaggtaaagcggccgggtccaacgccccttactagcccataacatcccccaaaaaagttttttttgtgctgaaaaatggttttaaaaattatttgaattcattttatttcacaaataagaacccctagttctttcttctcacataaacatagttgctaaatttcattaagctaaaattatataaatgaaattgagaaagcaaattcgaattgagatttggattcaaaccagaaaacatccctaagaagatgaactcccaaagagactataatctgatcaatggataaagtggtaataaaatttggtcagttaccgttatggtgacagtgattgaggctgttgggagatagagcgtcggttgccgtcgccgttcccgttgccgtcgccggtgagggatctgagagaaacgtgaatgagtgaaaccttttattactacttcacatttcatttatgttaattggggctatattgggcctaagtcgctcaggcccaatgaaatagattttttttgggggtaagttgaaaaatgcctcttttattcatca

SEQ ID NO: 380246 - DNA, 1678 bp, Cannabis indica
ttattttgatatactctctacttcctttttaaggctgactttagatataggtggattagcctcattaaagttcacatttttttggagtctaaaataaaaataagaaattttattagatttttatttgaataaaaattatatatatatttattataaataataaatattcataattttaatagttgaggtgtataatatattataccatatatgatttcaaattcatagtattgttttccaatatttagacactaatatcttacattttaaaatttgtcatgcatgcatgtaatttgacacttttcacgaatttggggtataattagatataattcgacaaaaacctcgaaagtagaaactctttgactaaaaccctcaacagtcgttttataaatcccttcaatttaattatatattcttccactaaatttaacttaataaatttatatattttaaattatatgaatttcatgacaatgtttcctaagcttatttgttaaagtcagggcattatttaaaaagaattattttatacaatattgtttgtcgctttttttaaataaagaaatattaaatgatggcattttgttccccgcaaacgacagtgcgctcgtgtaaatgtgtgtgattttgtatttttcttttaggaaaagagacaaattgaaattttggtgacgccgacactaccaccatatctcaaattcaatggtgactttcctcaaaagtaaaatcctaagacaatacaatttgaccgattcataaattcaaattgctcgatctcatcatcgccaattaactcctatggtaatgttaattaggacttccactttttaagaatgtactaatatagtacaatactaaaacaaatatccataaagttttttgtttttttgacataaatattaataaaacctcaactaaagacattctccctcgcccaccgaaatgaataatacatcagaatcttaaagcttgactcaataaacgatttattaatgtgtcactaaacgtaaatatagtgctatatatagcattcatttgctaattatacatatagatatgttgtattatattatatatgtgtatatttgtgtccatgtgaaggcagctaaattcacatggaaataattaaatatactccaaaatatcgaaaggatagtatggggagataagtgactgattggtgattgaatgagtgcatcatgatacatgatcaatcaaatttgtacgtggcgacccgataagaataaagacctaaaagactatgatatgtactaaggaatatataaatataaagtccatataggtacaaacgattttaatatagataaatatacaatttaacaatatatatacatatatgacatgctaaagacaacaacgatgcatcactataaaatgtactattagtataattaaatacatattataattaaaaatgacaattatacttttgggtacctatttttaatggagagggggtaaacattaaatttcaaaagcgaaagtaagtatgggtttaaatattcatactcgaatttggatcggatcgagagcaaagaaaatagtatatccaccccaaattcatcccaatatgatacatatgtatatatttaagttttaaaataataactactataattaaaataacttcatgctttaaaacttttattgatta

SEQ ID NO: 380247 - DNA, 2381 bp, Cannabis indica
ttaatttcattattttagagaattcatatttaagatgttaatcaacatacttgttagtaaatctagatcctggtaaaatattcccaacaaagtgatagttgatggaaaagacacgaatatttgggaaaaatccctgggtagccatgtgaagtattttgttatgaaacctaagggggtcccgtccattgggtttaacagagttgctgaccttttgactgaaaatggtgattgggatcttcaaaagttaacctacttctttgattaggatacgatcagtgccattttaaaaagggatagaccttcaggttaaggctgtgacttttgggtttggactaaggagcctaatggtaaattctctagtgacggcttacctattcgaagctcttcaacaaacccctcattgtgatgtctctccctcactttagaataggctctagaatagtaagatctttgagcgtcataagattctttggtcaagtgttctttccgatgctttgcatgtgcgttcagagtaaagaaagagactgcaaatcaatgataacatttgccctatttgtgggggtgaagaggaatctatagaacacatagttctccattgttcactgtcgtcacatttgtggaaatcttccccgttgggtatatatccaggacaatgacattcgtatgtgggattaggttaaattcatctagggtctgagtaaaaaaggaatcaatgtggaggaggttttcctgtatgcctccattgtcgtggacactatttggagagctcaaaatgacaaggtacataataataatctgggtagcataaaacattacattgactttatttcttattgttatgcagattactgtggtttcccttctctcactcttctcctgtattggtggagaaatggtcccctgcccctctagattggatcaaactgagctgcgatgttcgtgtggggatggaagatatgtttagcggttgttgctcctaaccaccttggtgaggtagtttgggtgatgacgaagagtgtatgtttcactgaacccctttgtagcgaggtcgctgcttgttatttggctttggatacgacgatggagcgtggtcaccaatttgtaattgtggaaagcgactctagtgtggttatcaacacttttaatggtgtttgtgctagatgggagattgataattatgccaactattgtaaaaaatttttctcttcttttgtttgttgttttttttcctaatattgtaagaacttgtaactttttggcccacaatgtggcaaagtggatgtttacccacaagaagtttcgtatagtggatatctcttcgataccgagaagcttttatatgtaatgaccgtgaagtctaatctcgtcttatcactgaactttttttctttaaaacatgatttttgggtctgtgttaaagaatcagtagaatgaaattgttcttttcctttccatgttcattttttttttccgaataaaatgtttgggattctaaggtgtacgttaatgattaagttaacttaatcaattatgctaaaaaaatctatactaatttcaattttcattctaattatgtttaaattttttgttttattttctaatatgtaaaatattaattttagtttatttttctttaatttataataagaaaatatatatactttaattttaaattaatttttatattaaattacacacgttgacgtgacaatgacacaacattgactagccatatcaacattcagtaagccacataggatagaacttaacagaaatcctattttagaacattgtgaatagttcggaactatttttaacgcgatgaaaattttagggagtacaataatacatatatcatagttcgggagataaaaatcttatatagtctacataaaaattaataacatttcttaaaagagttgtgaggagaataaaaaaaaaatcattctcaccctttagatttagggtttcattccttttgtggcttggcctccttggacgtagtgtgccactacccttggggccatggcaggttacattcaagaggccctctcttctatgcatgtacacaaacaaacatgagttggtggcagatcatcttttcccacgtcaattaggtagtcttttgcttctcttctcgttttcctctttccaaacccatattcgtcttcccaacgtgcaacttcttatgtaccatggcgcaatttgtagggggtaagccttgggttgagccttgatcacttgaggttgatagggctccttcagagatgggtagtggtttgcgacaatgggaatttgaggtgggtcatggtatgtgacgttgggtatcgaagatgggggaggaaattacactctataccctttttatattgtcttctttt

SEQ ID NO: 380248 - DNA, 2072 bp, Cannabis indica
ttttttatactatcaagagcttgcattaatattccacatctaaaaagacaacatgctgttagagagtagcagaaagttagaagataaataatgccttttaaaatccacacacaaacatgtgggactagaggaatcaaacagaccaaggagcaagggtaccttacattaattaatagaatataatagagaaatgttaaagggcatccgtgtgcctagcaccctcctgtatgtcaatatcgctattggtctaattatgtattgggtctcgtataattaaatataataatttttagagagtatcgctattcaatcgcaatgcgacatgtcgagaaggtgctagctaggtacaactagtgccgaatagcaatgctcaatataatatactagcttagattaagaatttaattaccgacaacatcattaacgattttcatttgttaactcatattagatattttcgaaatcattaactaataaaataaacaaaaattggaaaaagatttaaatgataactaattacaatctatataaaagatataatattcataattctcagttacgtacccaaaatgcagcagtgaaaccagccacaccagcagagaggtgaacaacaaagccaccagcgtaatcaataaccccaagcttggctagccacccatcagggcaccatatactaaaagcaacaacagtataagaaaacgtaacccaaagaggtacaaacaacatccacgcaacaaaattcatcctcccaagcagggcaccagcaaccaaaattaacgttagccctgcaaacatcccatggtaaaacaccatcgtggccgttggaaacaaccctagaaacgcctgccctagtagaaacttctcgtccaaggcaacagctggcttccctaagaaaacaacaagctttctccaaacgacatgcggaaaccccacccgacccagcacactaaaacagcggcaaatgcataaaaggccatgaaagccgagtttacagcccatttcttcttcaccatgcttccatagagaatgacaaggcccggaatgctttggaggccgacgagcgtggcagctgtcagctgccacgcattgtcggccttgttcatccactcagggcttgcctcatctggaatgagatttgctggaatctccattaccatatgttgtaaagtaataattcaaaatatataattttgagttgtcgaattaatttattatttacaaaagattaattaacagacaatgatcttgtaatatatgtacaatttattttattttttgaaaaaaaaaaagctgtgtgatagtatttataaggacgtgagtatatgtaattaatacgagagtttgtaatatagattttctttttcatggtcatgttttgagttataaatgagaaattggaatgtttcggccggccgggctttggcttcaacttttgaactcttttatttgactgcttatattgtataatataatagtaaagcaatatttgaggaactccactcggcgcttcaatatagtgttcgacaaacgaataatcaaattcgtactaaggtatttactgtgttgcaatcatctctttagtttgtatattatatatatagacattttattaaattcataataaatgtaactcatcagaaattaattaatgtgaggtttgattgaaataaaaatataagaatagtaatatgaatgagaataaaaatcagaatagaatgaaatataatttaaatgtataaaaaaattattaatttttttttaaaaattcaattggaatgattttttttttattttaaggaatagttattccatcgaaatagtgaaaaaatcatttcattaaaatgatattctaatattttaaaatgtaagtaaacaaacgaatagaatgaaaattatttcatttccattttattttattaacttcaactaaatgtcatttaattaatcacacttttcaacaaacctattgattagtaatttggattgcacaattaataaaaaaatcacgataatatgcctaatctagtagggtgttatagcgcctgtacaggttgttggaatatgttttacca

SEQ ID NO: 380249 - DNA, 6912 bp, Cannabis indica
ccgccaacgtccactggcttccctcattcctcccactaactttcacactctctcaggtccttctcaaacccttatctatctatgtcctttcttttatgtgattgtataaagaaaggattttggtttaattgtttttctttttttcctttaatttcatagttcgggcatggtcaatcgaatcctacttatcttattgaagtgggttctgggtcttcattgaatcgctatgttctgaggaagaagcctcctgggaagttgctggagtctgctcatgccgtcgagagagagtttcaggttagtctttttccaattattggatttggcatgaaatgaaacaacaattcatttgaagtcttttatgtaacttcaaaatttgattgtttttctctcccaatttcattgctgtatttaacaggttcttcaggcattaggagctcattcacaagttccagtccctaaagtttttgtttgtgtactgatcctagtgtcattgggactgctttttacatcatggaatatttggagggacgcatttttattgaccccaggctaccggtattgctttatagtttctaatatctttgcctaataattgatagtttgttgaattgtgaagaaaactatgcttggtatgagagagttgaatcaagtttttgactttttcatcagggtgttgcccctgaaagtagaagggagttatacaaagcaactgcgaaagctttagcttctatacataatgcagatgttgatgccatgggtctaggaaagtatgggcgtcgagacaattattgtaaacgacaggtgaatcaatttgtttcggtgtttagcttgtaagtatcaaaagagagaaagatatatagtgtcagcaaacatgcttaactattcatatgtttgtcaaggttgataggtgggctagacaatatattgcttcaactggcaagggtaagcctgcaggaaatcctaagatgtttgagctgatagattggttaaggcaacacattcctcttgaagattcttcaggagctgtgggaggcttagttcatggagactttcgccttgataatcttgttttccattccgtagaggtttgccttttttttttcaaagctttaattaatgcaaatgccaaaatccctctgtttgatgggattagttcaatatggtcctaaaaaattattgtttcttatcctattttgttttatttctctagccatttaattgatatgatagacaaaacaatatgtaactgtgtaattacatataaaagtagtgcatgtgtattttacctatttggatttttaggtcaaagtccaaggctttccaaaacttcttactttttcattttcagaatcttgtttcccaatctttttcatttcttttctttttacttcgttatttgcattagctgcacatctgatgtggtgcctttatagtgcagaatcgagtaattggcattcttgactgggaattatctactcttggaaaccaaatgtgtgatgtagcatacagctctatggtacttatatttcaacctccactatttggaaactaaagatctacagtattctgttgagtttgaagtgcacctaagattttgttacttttatagcctcttatcatgtgctcttcagtttccaaattattttgatgtttttcaaaacccttctaatcactaaattttggattctcattgagaggaatttccttatttaatgttcgtatccttcttttgcttgcagcattatgttaatgaccttgcagttgacaaatctcaaatttctgaaggtatggaacttactgggattccagaaggaattccatcacttgcagaatatttggctgagtactgctctttaactgtaagtccaatgatagtactattgtgaacttgttatttacttgttgctcccaacagttttggaagaagtctagtaattaaagtaatgaacaatgtcagtaatttgccacataatgagatgaaatggtgatagtgaagagcatagagagaccaagctattaatgtgttaagtttgactctgtatgattccattctatgttaattaatttaatttcgtatcagtttggtgcgagttacaattgtttcctattaatattattgagtgatggacttatgttgggactgttgtaattgcagcataaaccatggcctgcagctgtgtggaagttttatgttgccttttctttgtttcgaggagcatcaatctttgcaggaatatatagtagatggatcctggtattttctgaagaaattattcacattgttatcgtgcataaaatgttttgttaaaagtatcaatggtttactattcgaatgtagggtaatgcatcggcaggtgagcgcgcccaacattcgggagacaaagctaatgctcttatagacgctgcatgggcatttattaaccgggattacgtgcttccgaatagtcctccttcaagtagctatatcctgttgcacttttgttgatttttgctatattttctgcatgtgactagtttattcctcatttcagtaatgctaatgtcagagtattcctcttaccaggtgcttttgttcaaaaaaatatattggagccatctgaaaatgcaagtaaagatcaggtattttcaggaacggggagatttgttcccagtaagaaggtaatggaattgagaaacaaactgattaagtttatggaagatcacatataccccatggaaaatgaattctacggactagctcagtctggttcacgttggactgttcatccagaggaagagaggttaaaggaactggcaaagaaagcaggactttggaacttatggatacctgtatgtgcttcagtcctgctactaaatcaaacatttcttgttttattcttctttctattatttaattatacatgtattttcagtatgctaccctgccgcctcctcttaatgatctttctactcaagtgtatgttgtctcaagtcatttcttgttatgcagtttgacagtgcagaaagagcgaaaaaactgatttttggtggaagcaattatcattcctctggtggtacattcaatcagttactgggagaaggcctttcaaaccttgaatacggatacctttgtgagatcatgggccgttctgtttgggcgccacaaatattcaattgtggagctcctgacacaggaaatatggaggtgagatgaaactttaagttgtcaactaaattttttatttaattaatctgacaaggtcattttcatggaactggctccgagtggttcaatttttatgattgtttttattgttgtcaattttattagtgtaagagaaatttgtggaatgcagaatgtgatgatacattattaatgtttgaaattctcttatcaaatagattgactgtatgttgttattattatgtaatatatagagttaaggtctattttgaattttcaaaactatttcgcagtagattttgaattgcctcaatgaacttgattgtatgagttacattttgtttaattttcgtgtcaccattctcaatcttctctctattctctgcatttctacatctttcatctttctcttctcttccttttaagacaatctttgtgttttgggtgttcatgaagataaagaacaacagctttaaaactttttttttttgtaagaaaagctttatggaaggtcattgacttgataacaactttccattttaggtattactgagatacggaaataaagaacaacagcttgaatggcttattcctttgcttgaggggaaaattcgatcagggtttgcaatgacagaaccaaaagttgcgtcttctgatgcaactaacattgagtgttctattaaaaggtgagtctactcagacctttgtaaagggagtttccacttcacatgttgctaacacgagttctctcatcattgattgttcgagatcattaggttcaataataaagtcttcctttaatgaaattgagtttcttttctaactctgaaaagcttttgttcgctttcgtttcactaaaaaatagctgtatgtttccataaaatagacagtattattttatctttattattactcggaattgttatttgtggatgtccatgatcattataggtagcatatgttgcttccgtggagtttatgctaatcatgtttattgctgctgtgaacatgtgcagacaaggagattcgtatgtcatcaatgggactaaatggtggacaagtggtgccatggatccaaggtgcagacttcttatagttatggttagttcttctggtgttgtatgggactgtatttttattttgataatatattatttgtctgctgtatgtgatgggagtaacatttctatttggcattgtattatgcaactactttacagggaaagactgacttcaatgcagccaatcataagcaacaatctatgatcttggttgatattaagactcccggtgtgcatgtaaagagaccgctgatggtttttggctttgacgatgcacctcatggacatgcagaagtatcatttgagaatgtacgtgtcccagcaaaaaatattttattgggaagggcgtggatttgaaattgcccaggtataattcattgtctttcgttgaaaatctagatctttatttggtatttggatgatttgaaatcacatttaagttgtgttgtaatttttaatcgttgcagggtaggttgggccctggaaggttgcatcattgcatgaggctgataggctctgctgagcgtggaatgcaactgatggctcaaagggctcttagtagaactgtcttcgggaagttgattgccgagcaaggttcttttctttcagatttggcaaaggtatgttgctttagtaccttgtagtaggtaatagcgggaatgggatttttgttcttacatttgattaaatcagtgaagtgctcatcaacttccttcatgttcataatcaacttaagtttatactgcctatttgttatataatgatgatattcttttttgtgtcgtgtttctgtcatatagtgtcggatagagctggagaaagctagattattggttttcgaagcagctaaccagcttgatatacttggaaataagagagctcgagggaccatagcaatggccaaggtaaattattttttctgtatacccccttgttttcggctgcacagataaagcaccgggatttgattttgtttattggcggtttcatggtttatggtgcaggttgcagccccgaacatggcgctgaaggtgcttgacatggcaatgcaagtacatggtgctgcggggttatcttcagacactgttctgtcacatctttgggccacggccagaacactgcgtattgcagatggtccagatgaagttcatttgggtactattgccaagttagaactgaggaaggctaagctttgagatctttgtattgactgtttcaataaaagggtttttcctttttgtgctaaacagaggaggaataatctgagtatagtatttatgttacattgggggtgagggaggataactaaaagaaaagaggaaaaataacgtctactttaaacttatactgacactgtattatcgaactgaaaataaatatagcgctcatatattcttattttattgtaagatgttaaaatctgaagccaatttggtttgccgtttgatttgccgggttatattgtattatatagtattgtgtttgattacattgttttgtatacttattttaatataatactatgattggtattgacttatattaatagattattataaacttgatttagaacccatttggttttggatcccagtcttcggacccgtaccttgactctagcctcggactctagaccttggatgtgaactgagtcctagacaaatccttgactttggatcttgactctagccttgaccccaaatttggaccccgattttggcgttggccccagaccttaatctaggctctggtatcggatagacttccaactttatgaaaccccgaccactacctctaaaaaaaacccccacctccgagaacccatagctccgtaaagagagaaagagccaataaggttcacctgggttggcggcagcaatgactcaagtggctcgtcgaggttaagcctagagagactgcgagaaaggaagagaacacgaagagaaaggagattagggttaggttaaatctataacattctatttatacttttttttttttttaaagtgcttataagtgtcgatttataagcgacaccaaatcttttagtgttggttatgatttatattcaatctgtatatgtatatatttttttaattttttttgctctcagttattgtttgtgtcggtctactaaccgacacttaaaatcattataggtatgatcagttataaaccgacaccttagagttggattggtctttaatgttatttttttttttaaaaaaaagtctctcaaactgatatcaaaagtctattttttagtagtgaaggatagttagaatcattgagaagtggttggacaagaaatggatgacttccttctaaaaaaataacgtattgcaaaaggaaacgtcaaaggatcacactaagagtttaatgtcccgctctaatgccaattgaaaaattgtatttttgtatatgccaataaattttgttaataatagaaaagaaaaatatgattgtaaagatttacaataatatattgaaaacttattactgcagaacacagatttgtagtaatagaacagaaataatagtgcagaatataaaaacttgatacaagagaattatatgtagtatcagggttcttcaaacactcttagtctacggggccacacctagataataaaatcaattagtaaagtctcaaacaattacaagttcaattgacttaaacaagtttag

SEQ ID NO: 380250 - DNA, 3451 bp, Cannabis indica
attgctgagaaatgaatgcaatagacatactagaaagcaagctgtactctaaaattgagaatcagctaaagcaaagcaatgctgatatggggttaaaaaagaaataaaagttagcagtaggtttcattaattatagtttttcttgaatttaaataccggggagacattcctaaatttgctttcttaaattctcttaatgaaacctggacctctggatatcatgttacattatcaggtttctattatttcattttgtagatctttgttaagtgacctattcaactacatatttttttgtttcttgtataatagacgggagcagtttttgataatttcctaataggtaaacaatagggtaaacttatcttcttatagttagcagaaggatatttgcagttaagcctgagcaaaacactattccttcctcatgttccacttccctaagcattcctaagagaaaaagctatctgattccccttctcttgcttagtgtaagctatagcctgccctttaccccatcacattttcctaaaatcagcacaatcctatgactcttcagcttgttaatacagaattctgaaattgaatctcatcaaattcagcttccagacacaaaaccctcactaattgaatcatttaaagtcttgcagtctagaatcatttaaaccttaatcccgtagaaaatgatttttaggtcattcgccccaagtaattttctcaagctttagaaccagaaaatactactataagaattattgccatccaacctgatattattctgcctttaatcctaagccattgatctaaagttcttattctacctcggcacttattcaaggaaaccattaatttaacatgccagtgcctacataaatgggtgattcggtagcaaaacaacagcatttgtaaaaaacgtgaaatgaatgacattgacctatgaacatactacgtggaattgaaaaaatgtacaaacaattttctttaagattccagttaatatttgttaaaccaaatctattgaacctacacatgggattaaatggaaggacctcttcatcgccatgctgagcttctaatgctgaaaaatttacagtacgaatgtcaacacgtgctggagttccagtcttcaaccgatcagtttcaaatccaaattgctgtaagctttcagtaagtccatgtgaagctgactccccagctcttcctgcaggcatagaagttttgccaacccaaatcttaccactcataaaagttcctgtcgtgaggacaacagcaggagcatagaagttcatgccaaaaaatgtacgtacaccttctacattgtcattctttcccaataatatatctgttaccatggcttctctgatggaaaggtttggggtgctgaaaatgcatgcagacaaaactggtcaagaaacagaaagaagcatacaccaacagagaaatgcgtgtcagaagtaatgtacaaaaattgcttgctttcaactgttatctctttaaactctcgcagtgattttctattacattgccgactctaaaaatggttgttgtcttaagtagcagtggtgctacaacaatgatatgaagatcgcattttaaaggacaaaattctgtagaagatgaagttattgcctagttagtctttaagacaaattctagggcattactaccatggagtgcatgcagattatcgtgacatgtgcatatatatatatataagataatacaccaatttctcattaattgtatgatcaatcaataacttgaaaaccagagtcaaatcaatcaggtagcattggcaatcacatacttactgactggagacatatcatcaactgaatattattatcatgaagttgattattcactgttgtaaacatgtgtacaccatagcataaaagccatcatgagcaagaatatggcacctaaaatacgaagcataaaggtaagcaaaacttgcctgtccacaatgtttttcatttccatagcatattctcgtttgtcagtttgtgcacgcaaagcacgaacagcagggcctcttgagacattgagaatacgcttttgtaagtagcacctaaacaaatgacagtttaagatacaatacaatatatgaagtgcaaacacaagagatgaaaatcaaatgttctctgccaatcaataaaaactttaaaataaaataataaatgtaaattagtgctagtaattcctttctcattaaccgaaaaaatggtatgaactaacaatgcagcaatttacacgtgatgaatttagcatttagcattcaaaagaaacttgtagtcacaggtccaaagttaaatgacacaacaactgggatgatatttaatgaagccttagggagaaagagtacaaagcatgaagactaattatgacctaaaatcacagacagccatcagatctcccctttcaacagaattcagtcaaccatctgttccttcatgaactcaagtaggatctgaccatttgtggaaaaactataaaaaaatctagaacagaacttctaccatccttagattcatgattcccaaaaggttaaatgaaattatgcctttaagttattcaatttctatatcaacaccacctatatcatttcctagtcatccactcttgacagaatatacatatttggctcttcactctaggatatgtatattatcaatgtccaccaacatgctgctgaatagctgatttagtcttcatatttcagaaactagtgaaaaattgtttttcaaataactgcatgaagatcatttcttcatatgatgacatgtaacaaacattgaactctattgcaaattaaaagaagcaaaattataagtgcattgatgggcctcctgttgctattcgacacattgctgaaaggtaaggatgatgctttcaaatccaaaacccacaatgggagctgaagtaacctcacaattccacatacgagcacaatctactaatctattctttttcttagacccaaaaactaaaagaaaaagaataacaagaaacaacaacattacatgcctcgaggcttgggcaatttaggaataaccacagggggtctttattgttttacctgtcagcaatcttcccaatctcaccaccaagggcatccacttcatgcacaagctgcgatttagcaggtccacctactgctggattgcaaggctgtattgaaatgttcttagtaagatgatatattttttttttttaaactagcatccccacctaaccctacaatatttggggaccaggaaactgtagcaatttctatatacctaggaaggactcaaacctcaaaccttgtgagagcaactcacatgcctgaccatttgagctacccctcttgggtcagtaaggtgataattaaattgtggggataatatatagggccaaaactagttcaaatgagttttgcctaaatagacatgagagagagagagagaga

SEQ ID NO: 380251 - DNA, 3363 bp, Cannabis indica
ttcgtccattatagacaatgcaacagctatcttgccattgcattcaattttttgtgcttcattgcattcttgaaatctatcacatacagaagtacttgagccaacactagaccgacgaacaagagtccaagaaaatccttcttccatcttgtgtttcaccccaataagggtcttcagtttctcaaatagctggcagaacaaaaacaggaataaatctgtgcgatcaggtataaatgcaaattagatcgacaaagtgttcaattgggaatacagagttcaaaagagagaaacgtaacacttcctcttaatgacaatcaaatcaaagtcttaactcttaactaaggcatatttcacaatatgaagaaattcaccattacgcagtatgcacgtaaaacaatttttccaacaaaaactaagggaatatagatcactgagaggcagctatgtttgcaatgattaataaatttatattcctatttcctgcttacatatttatatatttatatatataaatatgtatgtataaataaacttaatcttgaaaagcaatcaaactcatgtatacaaaattcacttgtgcgctcaccataatttaacatattaaattaaaggggccaacaataggaaacaatgcccctaatcactatcttgcaaattcaagctgcataatattctaccaatgcaaatcatacctgttgacacttgctcccacagaatggtgaagcgctggaaaaattataccccgcatcactttccctactacaagaatgatgaactacaacaagaaaagaaaaaactgtaaaacataaatttattctaaacaatattgataaaaatattatcaaatatgcacgaaagctagagctttacatttttcctcacacaaatggcatgtaaaaaactctgaagcacccaaatcatcatcatcattctcttgaaattctcttccaccagccatcccacaaaatttgcatgagcaatatacacaatgccaatcaccagaagggaaattctgcagtaaaagaaaaaacagtgttctcgtttaatacaatgtcaataatcaaaacgaaccaactgcaaaaaaacaaaaatgaaaaaggtcaacaattaaacatgttctgtttctggaatattcaataaacgtcttgttatcataatataattaaacagtaaaattctactttccaaacatttgttgccgaacacaatgtagtatgtacatatctttactgtgcaggcaacaaagcaacaaacccataagcaaaaacatgcaattacagcattgagctttttatatacatataaaattgtagcattggttttggtcttagcatggtaacaaaacatcaaattgttgtcaaccctccccactacctgtaatccatttttgtctttcagttcaataagtaaactcatgcagtttgaaaaataaaaaatatgacacaccaattagggtcacacacatcacatgagttactttagtttcacactgtatgctcaaaagtaaacccttgacattattataagtagccaaggaaattagtgacatggcaacttcactgttgcatgcaatggaagcgatatttaaagatgatatacacatttcaaaaagtgcataagaggtcagatgtacatacttgaatatctaaacaactttggtggaatgttgatgggcaaccatcgcaacagatcaaatctccaccatctccgcagataccacaagtgtcatcatttgggtcttcaccattgacgtctacgtcaagaaatcccttacactcagattgaagttgcttattccaagagtctaacaggcattccaagagggaaggtccagactctagaaatatgttgttatatggttcgcagagattacttcctgcatgactttcaaattctgaaattgtcaaggttttacgacagcagtcacagagaatgccatttcttgtaatttgaccctcaagcagcacatgtgtctttcttcggttcaaacagtgcaccttcccgtttaatgaaacagttcccatgtcaatcatccaggcaagcacagttctactcccagaatacaagatatagccatcagaatctgaatctgcatcctccaaggagctgcgaaccaacaaagtacgctgttttccattttgagttttcttctgcttatgacctcgaaccaaaattggtattcgcttgtgttgagtaccagctgaattttctcggttacaatgcaaagatttctttctggacctccctctctgtaattttgcaaccaattttcttgtacgctctgtcttgccagattcctttcctgcttttcgtttcaatttattttctcctcttttattgatagctacccttttaagcataccaaattcctcatcgggtataggaataaatttgaaaccagctttataaacctcatcttcaccatcaccattttcgtagtgttttctaagcctcttataagctagggtgactgaccagtgagtcttcccatctggactaacatacacagcgtcaaggtaatccttggaagccctaggcctacgttgaattgtccagcctgcactcagaagcaattctataattttctctctcacagactgttttaccacacttctaggaggttcctcttctccatccttctttttagttttccctttcacaacactacgcttcgcatattcgaggctctgttcatgaactgccttggatctcttccgtgttgtggcttcagcttccttgatcatcgaatccaccacaattttgttcttgttaggtgatgataatatatccacgttcaattcatttccattctgctctgtttcctggcataacaagcaagctggcaggtttggattcacattgtcctgctcattaggttgcaggacagaatgtactggctgccctatatcatccacatctatttctctttccttcatatcaacatcccccttcaggggcatcccacatgtatgtcttaacttctttaattgaccatcagatatcaacttgttattctcttgattttcaacattgtgcagtctccctagattgcgttttaaagatttatttctctcacgtgtttttgagggtctccgaagcttaagtttcgacactccaggcccctcttgcacttttcgaggccttccacgagtctctcgcattttgaggggtcttcgacgcttatccctcaactttttcttcaacccactgcccgatgctaattgaacatgcacttcattttccactttccgtggcctcccacgtctctctaccttcttcagttcactggcaccactctctaccttcttcttcaacccactacccatgctaattgaccatgcacttcattttccactttgcgtg

SEQ ID NO: 380252 - DNA, 2257 bp, Cannabis indica
agataaacaagagtatcatgagatccatgaatgaatagtgaagcatcagacttggacgcatgaaaacccattgataagtgtttgtttcagcttatcgttccatgcccgggagcttgtttaagaccatagagtgctttgtgcaagagacaaacatgattcggtttggctttgtcaatgaatcctgggggttgctgcatataaaccgtttctcgaagagtaccattaagaaaagcattactcacatccaattgtttaactatccagctttgagtgacagcaatactcaacacaacccgaacagttgctggtttgaccacagggctaaatgtgtcttcatagtcaatcccaggagtttgtagataccctttggccaccaaccgagatttataccgatccaaagagccatctcggtttagtttaacacgatgtacccatttgttgctaataatgttcatatgaggtgcatatggcacaagagtccaagtgccttgtttctttagagcagtgaattcaacattcatggaagcaaaccaatgagggttattgagggcagctttgagtgatttgggttcagtaggtaagagagactctggaagtgggtgtttggtggccatatatgcttttggtttatggatattgtgttgagatcgtgttaccatggtgtgagttcttgtgggttgaggggctgtggaagcagacggttgagtgacattgggactggtttgctgaggtaatgggtggtctggtacaagagtagtggtatgtggtgaatgaggcaatggttcagtaggtatagtgggtgtattaaaagtggaaagcattggtacatcatgtatgagagctgcagcaacagtactttcagcaggggcattatcgggagaggtgtcatgaagttgatgtgacacatcatgggcgtgggaaacatctgtagcagcgggtacatgtgttgcagcaggctgtaatcgggcagaggcttgtctttgaccagtagagcatggtctagcattgtgatcctcagcaacattggaatgaccagtggtgaaaccaatgttagtaaaggtactaggctgagtattaaatgtggaaaaacaatgcaaagttgaatcagaggacaatacctgcggctgtgttgcagagttggatgctgaagtatgtttgtgaggataaaaggcttcattgaagacaacatttcttgcaacatagatccttccgtcattattttcacataggtaccctttatggtgagaggaatatcctaggaaaatgcattgatgagttctgaaatccaatttgtgcctgttgtagggtcttaaatgcgggaagcaagcacatccaaagggcttaaggatgttgtaatcaggctttgtgtgaaataatgtttcatatggagtagcaaagtcaagaactcgggtgggaaggcgatttatggtaaaaacagccgaactaaatgcatgccaccaataggagagatcaagaccagcattggctaagagggtaaggccggtttcattaatatgacgatgcttcctttcagcacgaccattttgttcatgagtgtggggacatggactttgaaagtgaatcccttggtcaagcaaaaatcttttaaatggcctatactcaccaccccaatcggcttgaactgccttaattggaagattaaattgcttctcaactagagccttccattttataaagacttcaaaagcttgtcctttgagggtaagaggaaatatccaagtgtacctgctgtaatcatccaagaaatggacataatatttatatccatctttggaaagaacatgagagggcccccatagatcagtgtgaattaaggcaaggggttgtgatgcacgggtatgggatatagggaagggaagagaatgacttttgccttgttgacaagcattacaaaaatggaggtcttttaaggtgccagtgtggggaatatggggtaatagtttgctcatgacttggtcatttgggtgaccaagtttacaatgccaagtggtaatgtgtttactaactgcagtatgaaaaagagaggaggtgctagacacataaggggaatcaatagcctttttataatatcatctgaagtacatggattgattacatcatttttggaagaacaacagacagaaaacaattcacacagtaatgcttgtttcggttttgatgtggagtcatctcctagcatgtatagtccatctctaactttcccccgaagtagaacctggccagtatccttgtcctt

SEQ ID NO: 380253 - DNA, 2637 bp, Cannabis indica
ttataaacggaccggatttgaactgaatttaaatttttgacatgatgaataaataagtcggtttacttaaattttaagcgacatcaacacaaattgtcccaaccctatacatttattaaagtagtgacaaataaaccaaataatatcacattgattaaaggactatacattccataagaacaaaagaaagtatctaaatcatgtgattgccttgtacataaaacactggatttctttggtaattgggtacacgattattttatcatgtcactgaaattgataatttcatgcattcttttcaacttctattttagatttcttgaagaaaaaaaaagaaaaactaatccttagatcgatgttagttttctatttgatggtcattcgttgctaagcttttccgagctagtattctctaatttatctcattaagcaaacattaatttttgcataaaaaaaattaagagcaaacattgactggaagtcctaatgaatgcttccatatatatgcttgattaggacaatggagcaagcaacacgatgaccttatgtggttgaaatttttcctcatccaactttttttctcaagtaatatttgttggtgtaataaaactcactttttctcatcaatgtgactttacaacccaaagattattgaaagagaaaagccactaacacaacatgtaagcccgtactctgacaaaaagaaataaaaaacatgtaagccaatacggttaaagaaaactgaaaatttataaagaatggtgttaagattcccaacattattcctcttcatgcataatttgtccaacacaattcacactcaataagagaagaactttctgatcatgaaaatgctcacttttgtccacaactcatgcccgaaaaactcccttcataaatccttgcaaagaactccccatcccagctccaacggtttcagccaagtattttgcctgcaaaatttcaacatagggcttttatggattacaacttctaaaaggacagcatagttagtgagtaaacattatagtttttgtgtatagacctcttgcatggttttcttgaaatcaaaggcatctttgacacgaccattcaagaaagcccaagtatcacgaaaatctgtcaaaatcagcaaactgtcaaattagtatattgcagaggagtggaactaaccaatccgaaactaatgtataggccaacagaacaagggatccaagaggaccttgtgaaaatcacacataccagtggaactatcagtaagcatgtagatctcagttgtcgagtatattcctccaagaacagtgcgctttacataccaatcaatatcagaggcctcatcaccagcggcatgccagatttcatcgacaagcatagctcgctgcttaaaactcgttggaacattcattggttgtgcctatacaagaaatcttaaaaaataaattttgtgcctatcatattagtctcttttttctttttctttttctggtgtgtgtgtagagtatcattaatttattgaatgaacaccacaacactaaaagaagatcataagcaaggtgatacctggatactaagagcctgaggccattttgttatgtatggagcttgcatttccaagcgaattctaacaagcttggagatacgctcactaggtatcaaacttttcaagtcctctccggagtcaattctatcaataagtctttgtaaacaatcatccatgaaaaactgtaagaaatagatgaaatgatattcaaattagtaatgtggggaaaataacacaagataaaacttacagcaagcaagactacacaataccgaaaaatgttctgttaaaattaagctttcaatacattagttcaaaattgcatgactaaatagatggaaaatagtatgtatcactgacttcccaataaaaacacccataattcagtctttatctttcattctaattagcaaaaagactctctagtcatttttctttctatttcgcctcagcaaggttctgagaagaccttaaagttaataatagataatatacacaggtactttgaagttgtagtttataatcacagataattaaaagcgtatttcagcattagaagacgaacaaaactctcgtaaaatctaacattatagtaaatagctaacataagagtacgtatagctataacattttactagataactgtaataatagtatgtaatttatgtacagagaaaacagaagagaaataatcataatactagtataacacggatgggtcataattaatcaaattatatacaaatataacgaatagttagtgcctaaacataactaccaagaaaaattcttacaactaagggaaaaagtgaattcaaccagtaaagtaacacaaaatgaaatttggcaaatgggatgcgtggatgctatacaatatacatacatacatacacaaataaataattataaatagtaatacctccactagagcagcctctttcctgggaagtgacccaattatggcgggagacacaccggcgtctctggcacctgcaaccattgcagcttcggtccaccccaacttaagctgcaccaactcatcccaaacgctacaattaaaaattcacccccaattttgactttacatatacaagatc

SEQ ID NO: 380254 - DNA, 2100 bp, Cannabis indica
agtatatttttttttttaaaaaaaaaattaatatatatttttaaaattccctatgtattttacatttcttaagtgtattttgaaatatttgaatattttcaacttttcaccaatactttttagtttgttaagaaaaatgtaaaaaaaaaaatgtttaaagggaaaaactaatcaaggtttttaaactagctagggctggatgtccatctaaggatagagatattagaataatatgataaacttttgtgatctatgccaaataaagtatttattagacttaataaacttttcagaaatttaaaataaaataatttataaccacaatataatatatatataaatcagtgtgtgtacacttaaatatcaagaacaaagaagacaaggattccagagtctccagtataagcccacaacttgcacatactctattatatattaattaatataataatctatctactttattatttattatttgtttaagtataattaattatataacttgtatcaatttacattattttatactcctcacgagggagtagaatcagaatatcagatgatatattgaggaagttgatattggtatataaatatttatatatatatatatatatataaatatttatatgcaaacgtgagctcaatcttagcatcaataaactaatgtttattatttccttaatcttataatattgtttaatattaggagaataagtaatataatatcaagtgagaaatgcttataattgaataataaacattggttatgtatttaattaattgtagcttattcgaacacaattattattataatattttttttggtcaaattacacgagaataatttgaacaattttcgaatgaaaccgattaattgcattacttgaagagagttattattacaataagtaacctaatacagctaactaaaactaattaataaatacccatgacaacatatattctaattaactacctaactatgttaactatatacattgatgtgtccatcttgctcatttgagtattgagaatgagtaggaaaatgccttagtaaaaatatatgtataagcaatttacaataatgaatcttcttgtttctaagaacatgataatcaatcaatctttacttgctttaatattctcttgtaaaaaaataaaggtaatgtctaagagcaccttatgagtgactaataattttcatagtaattataagaaaattattagagatgttatctcattttattgacatcaacaataaaaatgtggtgtgtattacaaaaaaaaaataccctacataatggggttgaaaatacataaagctagaggcctaataagaaaaaaaaaccttaatttacaaattttaatacctccctccctcttaaggtagaatgtatagatttttaaaattcatctaggataaaatagattgaaaataatagggaaacaaaggttttgtaaatatatcagctatgttattcttcgttgtaacatgaatgagctttaatttgccctcctgaactttttcttagacaatatggcaattgatgtcaatatgcgctttgttcgttcgtgaaatatggggttctcaaatgaattgtggttatattatcacagtaaaggacgattggatcttcatgtttgatgccaaagtcctgaagtagtgcttgtagccaagtaatttcacaagtggcgttgatcatagcccgatattctgctattgtcgatgaaagagagattgtagattgctttttggacttccagaaatcaaagattagtgtcactacacgaagcccaatcaacatctaaaaaaattatagggtgaaaatctatattggacatgttagtttcaacatatccacataaattagtgagagatgctgaatgaaaaaacaatctctggccagaagtgcctttaaagtattttagtattctatgagttgtagtaatatgagaaggtctagaattagataagatttgacttcttataacaaaagaaatctcagacgtttcatagttaagtaaattagtataggaataatactatagtaaaccttcgaatctttcaatggttccccaactgtaacgtcccgcttc

SEQ ID NO: 380255 - DNA, 2271 bp, Cannabis indica
aagatatcatcgaatttggcctgggcagaatctagtgaatccacaatgtccaatgtgttatcataagcactgacagcggataagcatctagcccccagcccgagacatctctgtcaaaatataaattgtgtaaaagacaggaagcctttaggaaagctacatgtagatagatcttatttcgtgaaatggggtataagagttgtacaaagtcatctaaatgaataaactttaactagaatggtccttgtactcaatctcaccagttgtcattcaaatgaattatgccaaacaatcattaataataaaactaagttgaaaaagaagaaattgaacatgattcaaacacttaccatcacgatcctccaaaccgtcaaaggtctcggaaagtagggtcaggtagcgaaaaaactcttcactgaaatctttacgccgccttgtaacgattgcgttaatgtctgttggactatcctgtatctccttaagaagttcaccgttcctctccatttcttcatcaatctgcaaagctcattcctgatcaaacacagccagaaaagactctaaactcaaagtatctctgtatatgcagttctttgccctctctatgcattatcttacagaattagacctaaaaaaaagatcaaaacaccaatacactcccaattcccagaaaaaatataaaaagcaactggtaatctaaagtaacatgttccatattcctccgcaaaatcaaacagtgttcagaatgtaaatattaaatttctcttcactcagtcatttcagcaaacagatataatgcaggtacgaaaatcaaatgattagaacatgaatacatatacacttgtgccttaccttcttcaccttttgccccaatgaaatcaatttttgtttcatggttggatcactctcggcatctgcacgtcttctacaacgactatagaagctctctctatatttattccattcctccctaaacaccaaatactttctccattcttttgtcttaggcttctcatttagaaacacatcaatcatcttatcacaaaattcagttatggtgtaaccctcagcaacttcaacctgtacttcttcttccacctctgcaatggccattttgctagcttcaggccctgaaagaaactttcttcttagatttccatgaaaatgattattcttttaaaccacaaagtataaaattttagacgttttggtttattacatgaaaaacccacctcaaattactcattttgcttaacattcgaaagttatagaaggttcaaaactcatccaaaaacacactatataaaaagaaagaagaagcagaagaagctgtgctcttgttcatgttcatccataaaaactaaaaaagaaaaatagaaaaaatcccaagaaccaaaattagccaaaaggaaaaactaagaccatgaaaatggaaattctcactcactgactgtggagctgaaaagggcagtgtgggttttaatgtgaagactttttgttttccctttgagcttagtggaaggtggaaaaagagaagcagaggacatggtggggattgtatgtgtggttggagagttattttccactatgggagagaagaagaggttggtgagtagagagtatttggctatggagttggaaatatccattgccatgaaagtgctcatggtggtagtaggcagttcagagtgcaaaaagagtatagagaagaaaagcagcaaaaatgaggtctgagtccaatgaacggataaagtggagtcatagtcatactaattaaaacgacgattcaggggcttacaacgacatgtttcaattacatggggagatggatggagccatggaggggtgtttcgatttttttttttcccgcaaagtttggaaagtttttatttaattttaatagaaatattaaaggtgtggtgtctagaatcctccttaatattgttattagtttaattaagtatctatatagtttaagtatcacatttagaggttgtttggtgtgcaagttttatttatcgaaatgagtttaacattatttggagagtattgaagggaattataaatttagacaatcgcaagacgacatgtctcgatcacatctaatagatttggacataacgaatccaatggattttgaattttatcatttgatccaatccaatcaaattgagtcatccgattcgattcgatccgatctaatgaatatattggattggatcagttcttaccattgtatgcattaactgattttctattagattagattggatc

SEQ ID NO: 380256 - DNA, 4488 bp, Cannabis indica
caactaattagagtttggaacaacatgttgcggagagttagcatatgtatcatgtttgttcaattatctaaatgatagcattctttttaaaagttaatgctatttcaattacaaagaaaaatgtttttaatcagcttgaacaccaagataagatttgagaactataggagtttaatgttttgtgtgtgtgtgtgtgtgtgtgttcacgcgtgcatgcgagtatattgattctgcatatgaaatcattacgaatgtccgaataaagtggtcattagaagtacaagagtttgatctacacatattctcttgaatctgatgattgttgcattgcaaggttacggattttgctttggacaatgtcactttaacttttttctgtgttagtcacatgctcttttatgcaattatttgataattttgctgaccaatttttattttgtctcgagacattttgtattaaaatgtttcataatttgtatgttcatgttttaatgctatattacctataatttttgggttcttttttgttataatttttgggttcttttttgttataatttttgggttcttttataggctataaccatttgatttctgtattttctgttgcaggatatcttgtggtggatttgaagttctttttattggaggaacgtattaattataataacttggtaattcgcctcaaccaatctcacgtcatatttgcacctattttggttttcatctcagaagaatggtgaagaagaaatttttcgacaagaagaagtctgcaactttccagttgctctctcgtgattcttctgatcctaattacgacgattcacctggtagtgatcgagtcttcatccgtgttgacaacaatccatactctgttgacactttctttgcgggcgataatcccgacaatgttgatgactccaattccatatttgatgatgcgcctgaggattatgatgctggtgaagagggtaatcgggtttttggcagctcatcacagtcgactgcacatcccctgcctgaccgcttgagaaaggaaattgtggagttagggtttcctgacgatggttataattatctggaacatttgagggagattaagaatagtggtggtggttctgccttttatcacaacccaaagaccaagcttgagcagcttcccaaggatattaaggttgaatgagtttttgacttgttttgtgtcctgttgcttttatgactctgtttggttttagccaggaagggaagaaagattaaaatgatttcttctcatgactgtattctggggatttctttaggaaaaaagttggatttaaattaacttttttttttggtccaggcatatgacgcatcgaggttgaagatttcggaagtgaaaactgatcccaatgaagaatttgtgtacagtgtagcgtcaaagacggttggtataaaagttaagaaagcggttgatcctgaagtagctgcattgcttgatgatgatagtgatgcctcgaggtttggttcagatgttgaggacttggaagaggattttgtgatccaggcaaatcttcccaaagacacagatgatgatgtatcatcaaataataggtttaattcatgtgagcaagagcagtttgagaccaaagatgtgattgaagacaaatcctttgggcaacaacagattgcagctgacttaagttataagggtggagctggatgtcatgtgccagtaacactggtagcagatgattcttctgtcgaaaagccacgagttcgccgtcttttggatgagcaatttgacatggtgagtcttcttttactatcttctgttctgtccttgcatattcttcatagttattatatgtattttccagccttatattgatagaaagtgttactctttttatttttctgaaactcttgactttataaacatctcttttctcaagagggtagttgcttctctaaatatgcgtttaagtttcagtcagcggatctattacactttacatctttttcattccaaaatatgtccatacaatagcttgaaattgttaagttggtttaattaaagcattaggtgcgaattgctccttgcccaagctgtctaatctgcaattagtttatatttcaatgcactttatagactgaaacatttttcatttcacattcgatatgctacatttattagttttgaatttgaatatttatctcatgatttttcctatcatagcttgaaagacaggaatatggcactgacgacgacgacgatgatggctatggttacatagctgaggaagatgaatctcttgcagagaagttaaaacatgcccttaaggacaatgttgtggatgactttgacattgacggtagatatatggctcctggagatctagttcagggaaatgagaatttaggaagtacagagctagttgattctgctaggactgtaattcgccgctgtgtggagtatggtgagaagtatgagaatgatgatcaagatgctgatgcagttattctagaagaaagtagtgatgaatctgaagtgtgggattgcgagacaattgttactacatactcaaatcttgataatcaccctgctaaaatcgaagctcctggagcaaggagaaagaagaagctttctgaagttgtttctggagccttaaatgataccagtaatatgatatcccttaaaggaagagaaaaactgcctgtggactttttgcctcgtggtaagaaacctactacagaaaaggtgaaaagcggagatagtttgagaattgagccgctgaaaaggaagcaggacgagacagccgaggagaagaaggaaagaaaggtacttttctttctttctatacttctacatatagtgcctatacaaatatatctgtagaaaataacttgaattgacttgtctgaaagtgaaccatactttaaatgtctgcataccattatatttttacttgttttttatgggtgtatcttaatgcaggctgctgtaaaggaagaacgtaaagaggcacggcgtattaaaaaagaaatgaaggggctttacaaaggtgaagcgcatcgtgcacaaagagtagctgcgatatcgggtccatcttccattcatcttatgtgattttaggtgatcagtattttgagtgaatcagtttgctttgctgtttctatcagtaacaatctgatttcaatgagttttgacttttttgagtagttaaaaaatagcaatgttataattaggcaatctaccattttggttggtatacaattgtacttgacgatacactatttttataaaaaaaagttgggagtgtttttctcttgaatagattttatttggttatattacactgagttgttgtacatgtagtcatcataatttattacgatcttatatggtataatacattttacacaaattacacgtaataattatacaaaaacatcatatatttgcactctttataaaatacaataatacataaacctaaactcgagagaatgatctgggcatatgagttgagtataaagtatatgataaagagagtatatactgtttaagacttctcttttgtgaccattttacttgtatcagtttgaaacgaatttgccatggaagagtctttacaagtttctttaacaacataactatgaggaattggggctgcattacctccaccaaaatatggggtgggattccatatcccgtagtcttccatgaattccggtgggaaatggtagtgctcgccgccattttgaagcgggatctcaaccatttgaaggggagaaggtgcaggaaatggagtaggaggagtcggttgtgacggtgaaggcactgtagttgcatctcctgttagtatcattgtcattataatcaccattgccatactgcaggcatgctcaactaagttcacagttgttgatttcatggtttttgtggctaaacttacttgggaactaactcaagaaaattagccttaatttatacaaccataattgtgtgacaacaattggaggctgcaaagatattctgtatggtaatggtagtgtttaaattaaacttgaacatctctcctttcacacttattaaatgacataccatcatgttctttgcatgtactaagttgtgtttagagatatggaaacctagcatacctaatagagtagtataaaaatggtggaatgctatattttagcacattaaaaaaaaaagctaaagattgtaccaaatttgtgacacataaatttttacaattttatttatatatttgtcactagttaatatatatatatatatataaatatatttataaaaattctaaggaactttttgttttcgatatgtagaataattataccatacattttaccactattcaaaaaaataatttaaaattgtcagttgcctgtgtatgaaaataattaaaaattagcatgcaaccaggggcggacccacattgtagcgagggggggcagtcgccccccctgaaaaaaaaaatcgag

SEQ ID NO: 380257 - DNA, 4863 bp, Cannabis indica
ggggaagcatggactacgaagcaacacagatgcaggcacatatgtagccaacacaagattactggcactaagtagccatacaagattaaatactgtgcaaaagtacactaagaagaatttcaaccaaaaagacaagctacagttatcaaaagccaactactaatcacctcgacaatgcactaaagttgagctaaacaactactgaattgctcaataaagaaataaagtttaactgaaagtgttctgttcacaatacccaaaccaattcttaaacattccaaggaccctagactattagaccagcaacaacagagttgaatgtagctactgtaatgaaatctatttacatcatctgatggttctagcaggcaacccaataacttagccgaaaattttaaaaaggtagacataaatcaaaaggaacaaacaggaagaaggattgacctgattagattcaattacgtcaacaaacgcaccatcaccaagtaccacttcaccagtctgcacctcttcaccagtcgggacctcatcatcttcccactcttcctcaataaaaggtgccccatactgctccccattcttgggcccagtaccgctcttttggaatatcctacagagcacaaacgcatccttctccatacaaaacccaaaaaatacaacaatcaataccggtccaatgacaaacacccaaaaacgaaaaacaaaagccaagacatcctaacctgttgaattcccacgttcttcaattcctcatcttcgaggcggtactcatgcatgacccagttggttctgtcgcctttaggagctcgcccagtatggaagacaagggttttcttcatcccaacagttcgggatttatgattgatggggcggtctttcccggtagtcttccagtaccctttctcagtagcccgattggtcctccaaccgtttccatacttcttatccaaagcactgaagaaataccactccaagtccctagacttcagctttgatttacctagtaaaagaaaaagacgaaaaaaaagttaaaaagacaaaaacaacaacaaaatttagataggatgaacaaagttcgaaagaaaaatatatagtactaaccaggaagatcccaaggctcggtcttataaatatcaacgacggagatagggtcgacgcgcacaggtttaccgcagaccttccgtttcaggtaatagctaacaagctcttcatcagttggatggaatcgaaacccaggagcgagcgaggttgaagacttacgacccataaaatctcaagccgaaaataaccaaaattgttgatcgttttcccaaatataacaataaaaattgaagaccgaaagaaattaaaaaaaaaaaaccgattgaaacttgaaaaaaaacccaattatggattcaaatcagagcgattttaagaaaaagaaaatgtaatgaagatgggtgaaataagaattagggttagggtttgggttgtactggtaaagtcagtcagaggtgagagtcggagaggactgaaaggaagcgagccattgcgagagcgaatagggagccaaaacctccacgcgaggcttatatatattgctctttcttctacgtcttcttcactaagtaatatcagacaactttcgatgacccgttggtcattaaacacactctcacccgcataacgtgtactgtagaagttttaagcttagcaatagcaaccttcagtttggtgggttcagctgagctgggacccattccttgtttgatgacgtggcgtttttaatcgccgtcaacgtttaactctctgctattgacgtaattgcacgcgtcaaatgcaaatttggaggtaaatatggtatgagaattggaatcatattattattggtatttttaaaaaaatattgctaactaattattaaaaaaatattatatccaataataacattcatattttataactgacggatcaataattaaatacaactatttgctctcctacaaaaacaaaaaatacaactatttgctagaaattcttaacggcttgttgagattgttctattgattgttcaaaaacaaaatacaattatttgctgatatatgttaaattgttatcaataaataatggtaggtgcagaaaaccaacactaaacttttacacgtctttctttttttgaatatgcgtaaaaaatgaactatgtaaggaaaaaaataaatgtttttctcaaacaaaatatatacatcaatacttgatatgattggctcattaataagtttgttttttcttcttttggttcagtaggttcattaatatatatcaactcaataagactagttcttcaacgttgattaaactcatttaatagagaaacaaaaagtgattgaattacaaaaaaggaatcaaagatgcattatcttttcgattgattatttaagacatagtcaaggaattagttaaaacggggttttaaaaggagagaagtgattagagaatagtgagaagatataaaaaaaagtcaaatctgtaatggagttattcagcttaaaatgcttatttgtggatagaaattaaggaagaaaaaaacaagacaaaataacttggcaatcacaccagaacgaaaaggttatcttttttttccttttggaactatttgagtaatcttttttcctcatatcactaatcacttttaaaaagatagtttatgagaaaaaaaaatatgcatatttaaaatctcaaaatgtagtgagtaaaatactttacccacttttgtatcagcacataatgattgctaaaagcacagccctagcaaaatctgttggtggtggaggtgacaagcttcagcaatctatagtaggagcccctcagaccctttcttctgtgttcatattcagtagactagcattatcaaaatagcaatagtagtagcagaaacaaacccaaaacagctcagtttccactaccttgtgtcatgggcaacatgcaaatgcaccagaaaatagtaatcaaagaaaaccacacaaaaaatctctgccaagcttccaatttattggaccgcaactcattctctgcaaaatttgaagatgagtctggtcccttttccctgtaagaattcactcaccacaaaatctttggaactcagaaggatctagctatttaaatgagactagataaggttcaatttagaaacatgacggtttacgctacaattaacgttcgacagagaaaagctaatggacaacctacaactaaaaagatattacattatttagtctgctatttcatgataaaatagccaatgactcgattacataggatagaaagtttccaactctgagggaaaacaatcccccaaaataaacgactgcgaagacaagagaagggtcataaggaccagctgggcccccgaaaagttccccaggtgaagaaaatggaattatgagtccactagatacctccgctgcttcttttcaaatcactgttctctttgttgagaacttcaattctagattgaaggatgttaatcattgcttgggcactcatcatttcgaatttcagagtgtctctctctatagatatctggtgaatttcacgttgcagatcctgaatgaatttcaagcagctaggagacaaagcggaatcagtattgccagcatcaagctcaggaggcactggagtactctccttcggttcaatggattctaacagagaatactccaccaatgcagacaaaaaatttcttgttgtcggtggtcttgttgtcgctgttgtgactgttgacattgttgttgcggctgttgttgttgaagagctacgatcttgagcagctccacctgagttttctgaagcaacaccattgctagaactcgaatcattatgacgccttcttttatacatgagcagtggtgaggacacccggtcacccaatgacaagtgttgctgctcatctaacccaggtacagaacgaccatccaaactatcttctcgattaaccacacatggcattgtgtagtcatcttgtctctcaatcttgcacacacgtaaaacattttgtttttctcttggaagaaccagagcgtgatgaacatccttttcagtggactcagtatcctgaaaatgattattaacatcatatgcaagctttcaatataacataaatggaagtacaatttcaaaaaaaaaggtaacattactaggttaaaaagtatctaattttatttcaggcaaaacaacatgataaatgcaacttgtaaaagtaaagaatcagcacaatgcgatgtatcaaccatacactaaagcagaactctactggaacttgtttaaaccagatatcccaagtacataaaataaattctaagtaactagatttaaacattattttccttatttcttccagctacggatttagaaatgatcttggcttagttagttctactaccaaaagatattttcagttctcagatacttgaagatttgtggaatatacaaaaatatctactagtgtaaaagcctccaaatccaagacaaaccaatcatctaacataaaaagcatatcaatttggccacaaaaaatgtcattttattttttattatcttcttcctaacaaatccccaaaaacgtcagagcaatccacaacaaaccttcacttttgcatacaagaatttgtcgaaattcaaagatgggcaacaaagaatatttaccccttgcccccacgaaattttgatgatatagtatggtccacaaggttattccacaaagtatatgcaatgcttcttcacattaaagtcagtaacttcaagagaaacactcatatggaggttcatctccttcagcgtcgggaataaataaattcatctacagatgttagtgtgacagtcagtagt

SEQ ID NO: 380258 - DNA, 1969 bp, Cannabis indica
tactttttgaacaatctaatagaatataaaacttatcagttgttttgcagattttgtcatggggttcacttgcattgatacctgttgctggtcaatcacttcttacagttatgacaattgttcttctcagtaattttggagcatcaattacagaagttgctaaggatgctcttgttgctgaatatggtcaaaaacacaatttgaatggtcttcaatcttatgctttaatggcttcagcttctggtggaatacttggtaacttactaggtggatatttcttaatgaaagtgccacctagatccatgtttcttctattcacagttttgctttccattcaattcgggttttctttaagaacaaatgaggaatctcttggcttaggaaaattgccaaataccaaacttgtggaaaaatcaattcttgatagcattagaacacagttttctgagttaagaatcgcgattagcaatgagagtgtttaccgccctcttgtttggataatagcttctattgtttcggttccaagtctgtcaggatcaatcttttgctaccaaacacaatgtttaaatcttgacccttcaatcattggcttgtcaagagtagttggtcagttattgcttctctcaatgactgttctttataaccgatattggagagaaattcccatgaggaatttggttagtgcagttcaaattgtttatgctggttctgttcttcttgatcttattttgatgaaacagattaatctcaacatgggaattccaaatgacatctttgctcttattttctctggactaaccgaaaccattgcacaattcaagctgttacctttcttagtactatttgctagttcatgtccaccaggttgtgaagggtcactcacttcattcttagcatcagctctttgcttatcatcaataataagtggttgtttgggcattggattagctctcatgcttggaataacatcaagtgattattcaaggctgcctttggggatatcagtacagttcattgcagctatggctcctttgttgtggactcattatttgcctatgtcacaaggaagtgttgagaaggagaagaagaagggtatgagtaaaagaactcggcgaatcagaagaattggtagagttgttcttggttcaatgtatgtttaccgacgcgaaagagaatccgagatgcagagttgaaagagaagaagagttcaaatgggaagagtatttgagatgaggcttgggaaattttccttcattatcttgagctgatgagtcacacaaggccttccctaccatttctcccttgagtgaatttaagatgaagtatttgttttgtgtgaggtgaggtcatttgattcatccttgtaaaaatgattttgatattgcctttgcacttgtaaataatatattgtatatcatgaaatttgaacattgaatttggattcaaatttgcatctaataagtttaagatatcttgaattcaaaataatttattacatttaaaacaaagtttaaattgttgcaaatgttatttttattttataaacatgtggaataaattattttatcttatttttttattataaattattctgaaattctcaaaaaaattcaatatatattaataactacaatatatgtcattacattaaaaaaatttaaattataactattcacttataaaaaaaaatgtatatcaatgcattgcatcaaaataacctataataaatattaaatttacaagtaccaaaagagtatccattaaaatatattaacaaagcttcatttttttaaaaaatttattatatatattaccaaaacttactccattctttaaaatatattactaaaattctattttctttacttaaaatcacactcttacattgtactatacatcaacttctttaaaatacatctcactttttttaaaaacaaaaattattatattttattcatttcaaatatat

SEQ ID NO: 380259 - DNA, 3147 bp, Cannabis indica
tatatatatatatagtaggtgaggggttttttcctttatattacttgaattgaattgaactgatattaaacaatgaattctgatttggagaagaattgagattctttctttagatttgcctgttttctcgtgggaaagataaaacatttatgttatgcttcagttttgtaagtgccatgattttgtatagcaacttatattgcctaatattggtttagttgtattctgttatggtttctttcctagctttttgagttgttcatctaagttggtcttagttgcatttatttagtttggtttcattttatcttttgtcaggtcaacttttagtttgtttgattaattgtttaagctctttgccagttggtttgaatagttgctttggtagttaagtcagttttatcgaagtgttaattatattaagctgatccagctttttttaaactaactctctatctttgatggatcttctagtgattcttgctctgctagggcaaagtacatttttgtatcttttctttgttgtaattgcaggttgtaattcgttagatcttcaagggttgaaggaagattgatttgcaatgtctgaagggagttcagcttgatggaagcaagtagatcttgtcttctccttagatcttggtacttgattgtgttcaagtgtatcgaaactcttgtgtaaaatcatttttaatttatatagttgatttgtaaattaaaactggtaaatatattcttaatgattttatagtgaaagttactttattcagtttttgggacccaagcactattcagttagaatgtgtttcaattacagagaaagcttgtaaattttgtgtgttgtggtttatctttttagctgtaattcgtcaagattcatacttaaaatcaattacttagctttcggaataattaagactttcaagtttattttctacaataaaactcaaatgtatggtagctatatatttggtattaactactaaactactaaagctttatctaaactattatatttttagaagggatttacagtgaaatacttaaacaaatatctaagcctttttattaccgtaaatataacttttttaccatatttatttaataatgaacttgaattaagttttgtaattttttttttttacaacgaatttagtgttgttagattgtagatagcaatggagcaaaaaaattgtgttatattttgcatattatttacaattaagagtcaatgcataagatatgtatcaagtaaaaaaaatattattattgatagataatttaatgttttacatgaatatataaaatatatttttttattttttattataaaaattattttaatatgatatataaaaatgtgaaatattgtaatagttaatgatgtttgaatattttatatagactgacacaattaaatatcatccatgcaatatcattattagcatatgaagataattgtatgtttatatggtagagcatgactataatgggatggtcaatttaattaacgatatttgagctatatggtaacaccctaatgattatggaatggcttattaaatcatagtccatcactagtattatgagtccaaaatatactcattttacctcttaaggtacttaggcacatgtgagattcctgatatgttgatatataaggttatgagatgctaagattttgtatgagaaagttgctctttataatctctcttgtctataaacacttgggttttcattttaaaaaaatacacttgattttgatacttggaagaattaatggtgattcaaggtggctcatgaaaaattaatattcaatattgaagtatgttcattgtctaatttaacgccttaaatagaacgtgatattgaaaatttataagcataattttatgttgattattgttaataatagcatgctcatatgtattaaaacttacaattggtatcagagcacatattatttgattttaaggtttaaattttgatataaatccattttcttaatctagttgtcgcagaaataatattcgaataatattaaggttgtgtataaaatcgatttttttttttgttttacaattgttaatgagttttatatttggtttgggacaacaaatatcactttgctgagatttttgaagcttttataagattgttcatagcctaaaatgagtatacaagttttcaagtttacagtatttttagtcaaaatatgtatgagatatgatagagcatgaaaaattgtagaaaaacccttaaacaatgtcgaaaatggcctacggagccacgttttgcagtcaacctgaacgagttgtaaatccaagttgggaacaggttgcacgactcattctggaggtcaaggacgatacaaatgatgggttaatttttgcctctatcaggcaaaaatcaacaagttggtagtcatgaattgcaccattcttaaaaaatgacatgacttacggtatttaagtaaaaatgacgtgtcatttatgcaatatgcataaacaagggatgtcacttgaggaatacgacgttgttttggccaaagtatagtttttgttcggccaaaggacatatcattttctataaacaatatgtcgtacgaccacccaagttaataaaattgaaatattataatcattatagtttcatagagtatactattttggactctacaatttggcaaattaccattttgggcttatgagacttaccgagccattaaccatgaattgaggcttccatctctttttcctttgaattgatttttgtatgagtttgaactttgaacatattgatcaagataataataataataataataataataataataataatagaagtggtcttttaaatatttcttgctggtagaagacagtagtatggaatgagttctctcatcatgatttagtattttttttttttttggtaagatttgaaaatattcagatgaaatgagaaatgtcagggtaactatggaaactaaaataaaatattattttctattttgtaatgttaacattattagagatatggtgtgtagcgtcaaaattgaatttactaagagcatttctaatttatacgctaaatttagtattacactaacattaaatttaatattaaaaactcttttcactttaa

SEQ ID NO: 380260 - DNA, 1990 bp, Cannabis indica
aaaagatcaacctttaaatcgactatacctgcagtcttaggaaccgcctttccgaagagccccatgacaacacgacctgagatcacaaagataacaagtgaatcaacatcaaagaattctgatctaataataataattaagtagaaagaaattctgagagatgcattgcactaccagctggttttccattaatctcaacatcaaagtagaccttgtgtgtgatttctttcagatctacggtctttttctgggcctgaataaaacaatatcaatggccataaagataacaacaacattaataataataatgaggtcaaaaagaggggtaaatctagggatttccaaagtattgtgtatatatatactatagtataatctgtgtacctggattagggccatggtgccgaatagaaacatagtacacagaagaaacgacgccattttagccatatttgatcttcttctccggcaaaattctcttgttttggaatcgcagcagctcaacccgagtggttttagtgtgagtaacctgaattttctttataacaactctctctagtcttacggtttattcgtgtcattaccaatagacatgagacatgtggacttcttccaatttcgttggcagctggccgcttcccacatattggacttggtcccatttgaattgggctacaatcgatccatgttttaagctatccccaatattatttttttgcatggtgttctttttttaaaaaaaataagcgtgaaacattcattaagcaattaaatagttagatctcgcggtcattacaaaatagattttgcggtaaagaggagatcggaatagagccatacagttggtgggagaaagctcacttagccacattatgggcaacatagttacaagtcttactattattagaaaagttacaacaaataaaagcgggagaagacttaatacaaaaggagatacagttctcaagagcccaatgggacaactttctattgagcgcatcgatagctagcatcaagtcactctccacaataacatacttataccctaaatccataaccatcgaaacagccaagcagcaggccgcagcttcttcacataacgcatccgagaaatccaaccgagacatgtcaacccgaaccaccttgcccagatgattccttgctacaacagctatgcacatgctctctaagcccactttaacatcacaattcagttttatccaatcctgtggaagagagttccaagtctcactcaaggtcggtgtaggagcaggcaagagagaatcatgtaactctgcaaaagaagtacaaatattgtcaatacatttcatcacatctgggggagagttattgtgtaccatttcattgtgcgtcctccaaatggtgtcaacaacaattggtgcataaagaaatacatcctcaacacggatcccctaatattttagataaatattagggttttttcatttttaaatttatagctacataaaattattttttcgctttggccaagcccaccgatcttccctaagcttaagtgatgcttggtcggaatcttattttgctattgcgatttaatttttaatattgcgattagtcttgtctctgtgacataattttgaatgttttaatttttgtctctgagacataattttgagtgttttagtcttgtctgtgtaatatagttttgttttgttttgttatttagttgcacaatagttgagtgctcaagctacaaggttgaatgaacctaccacaatagattctactgttgtgttttttttttttttgtttgagggatttttttaagatctcagcgcccttaataaaactaaccaaaacgaaatcagcggttttatggacagacaagtgtgaagcaagctttcaagagctaaacagcggttgattttagctccagtatcaacctaccactctcgataagaaaagtttagtggttactgtgatgcatccagacaggtttggggatgtg

SEQ ID NO: 380261 - DNA, 4218 bp, Cannabis indica
ataatatatatacattatatataatgtacatgtatatacatatgcaaaaatacatatatatacaatagtgccggtcgagtttgggtatagggccgaccaccatggccttaccgtggctggcggctccggggagccaccatggccatggtggcaataaccggccaccatagggttcaatcgcacaccagcgacacgaggaggagtagtcacgggtcaagatacccaagactcgattgagtctttagtgtgtcgtcgggttcgaagaaccttgctcacgtcgagctggtgcgggtcgagagggaacaactcgaagttgttctggtctgagaagggtggcttggaccactagggtcctagttcggatggtggtccaaccaccgtagtccatggccacatggaccgaccattgccttaaacccaaaagggtctcctcccttttcaaccgtacatgataaaggacaatagtccttgcatgcatctcatgcatgtttcgacgtaaactttgcatggtcggggtccctccatgaactcgagctcgcatacatgtggttgtgatcttcatagtacatggtcgggttttaaatttaaaaactgagctcacatgcaataagcattactgtaatattctaaaaatataattgtgtacagtttaacatattttaataaatatgagattatatcagtatttatgctataaagaataaaattataatttataatcttattaagctaattatgttataattaagaattttagtgtaatgcgtaaataggtttaatttataaattacgaagattttattggaatgtataagtataatatatgtttttggtaaaataaaatatttttaggttcgacacccatggagatcaattggtggttaagatatcatgacactaataaaatgagttatagaattgtattgggagcggttggattattcggggtagataactttgaccaaaatatccctaagttataaagttgtttaagattggaataaataattgagaaattctcattcaacttctctttctctcttcatcttcttcttcttttcttcttatatattttatattattttataatacaatcgtactaattaaaaattgttattgttattatttaaatggagaagaataagaatcgaactttataaaaaatacaacaaatactagttagaaatttttatttcaaattgatgatcttcaaataaaaaatcaaatgataagaaattttttgttcatctcattaatcactaatgagtaatgatctatataggtgccaattaatttgttgtaggccaattctaacattatcttcatcttcatctgaatcatatctcatatctcatatgatagtggtgataatcttttaattgaaataagaaataaaccattgcccaaaattagaagtttaaattaaaaactatataattttttaggcaagaaaccacataacaaaaataatatttttatgtgaaattactaataaaaattaaccagacaatacttaccaaaaataattatattaaatactcatcttatttgcagattatacattggatattttattattatttttttaagaaaaaattttacatagaaaatttatacctaccaaaaacatacccattgaatatttttcttatttgcatacctaccaaaaaatttatctgacagataattttccaaattcgtagaccatatagggaagttttacagaagacatccattcacatattcttaattcttccctgtaaaggcaataatgggaagtaaataataaaaaatcagacttaattatatactaaatgtgttaagcaaaaaaattatatgctaaatgtagtaatttgtgtgactaaaaaaatataatcaaatttgttatatatatacataacttttaatttattattaaaaacattatctacaaattgatgataattttttatttatttttggaaactttttgaaactataccacctccatgattttctgtttcttctaaatacagatattaaatatacaacagtaatatattttttcaaattcaatttcttgtttttttatttttctttttaatttttattatttaattgtataattgtaaaagttctttccttcaaaataataataataataataataataataataataataaaatcgtttaattcttttgtaatactggaacaaaatacttattataatgcataatatcactttatttattatcctccccgcttgtttgtttaagtactagttcacagcccttctgctttgtgaaaattgtatttgacaaactaatacaaaaccatcctcttataatcttaatcaaatttatatttaatatgactaaattatttttgttttaatcatataaatatcctattgcaataaaaaaatcttgaagatacaaatacaatacaataaaaaaatgttaaaagacaccatcactacccaatatattcatatcattattgttataagtaattaaaatatataataaactttatgaaattttactaacaagtgtcacctcatagtagtgtttagacatcattagcaatgctcctaatacaatacatttgattttacaaatgaaacttagaaaataggtgttatttgtagtttaatttggccttttggtacacctaacctaacacaaggaccaactggggttacgttatgacatgatcatcagcctaagagtgtcctaatgcaagactttacagtagtcaaagttgggaactctcacagcctatggacccatctctcaaggcgaagctgtttcaatggtggcccatgatttggctttcttttctgggggcattgccattttccagtagcctcaggtaccccagagagagtaaagtttgttctttcaactaaagcctttctttgtacttctacaacagaacttcttccaccagctaatgaatctgtccctcttttcttcttctttggcaattcaaatagattttcttcattttctttgttaaatctaccttttcttgttgttacaaaaccatcttttgaagtttcttctccgtcgttttcacatccatgagttgatttttcaattgatgctgcaaaaaccataagctcatctgtcttcggattaccactcttaggtgatagaaagctagcttctacttccaagtgaccatttgtttttgaatccttaacattctccattgtatgtgccaactcttcagaagattctccaactttttttcttgtatgcgccgcaatactaatgactttagataagttttgtttgcctttgtgatcttcttgatccaaatttggtaactcaacatctttagctggactaatttcctggttttgtagtgctttgccttttaagcattttgtaaggacagtgtcaatgcacacacctctgtcacttgccaaggtttgactgtctccactccttgaatcattctgtaatttgcaaacatgatagtagtgactagtgaggaacaatgaaatagttttaatcttattcattatggtacaaattctcagaacccaactcacaataactatagcttttaatcatttcaaaaatagaaacaaaagccatcaacaaagggaccaaaaaaatagagcagtaagaaccttgtcagaagactgttttccatgtttgtaatattcacatgttttgttgtcatagtcgccaagcccatttgaaatttcagcatcatcactacttttatttctcctgaactctctatagttatttcttttactctcttcagacataaactcattgttttcacattcagtctccttagcaagagaatctttgaaaccatcagcagtatccaaaattggagattcatacacatagcttgagaaccagtttctcacgtcaataggctctagtagattacaaaaagagcaaaaaaataaaagttttaaacaatcagttttccatttcaataaattgaaatctcaatttcacatgtctcttgccttttagctcatgaaaatcaataatgattcaaaagcttccattcccacatatacattttcctcaaaagacaacctgctgataaaatactgctaaagaacttaggaggcgtttggttgagaggaatgaaaatataggaataggaatgagaatgggaataagaataggaatggaatggaataaattaaaatgcataaaaaaaattgataaaaataattaaatttttttcttgttacat

SEQ ID NO: 380262 - DNA, 2780 bp, Cannabis indica
ctcatcttgacgaggagtattacagtcttcttgacaattagttattgttagttggttatactgttagtctaattgcgttaggcttagctggaatcgtaacaacctcatggttcttaagctttgtatatatatacatatattctgttttcatcagttaataacaatatactttcgatcactaataaggatcccaaatgatatagtaaatatgattaatggaaaataagattaaaatatatttattttaataaaccaaaatattaaaggggccatggccccgcaaaggaggaatgtatatagctagttcagctcctggtttagtggagcagaccttcctttcgttctgcctatgaatgcttgtagaatcttgttgctttcatattcatatctctatacataaatggcacaaatataccgttttctccagaatgagaaacatattaaagaatgtgttttgtattgtatattttctcttaaaatatgtggtcaaaataatcacagctatggcttggataacagctagtccaactcaatataaatggcgttcatttcaaatcatagctcttttaaaaggctttattaaggaaaaaacaagacgttacttctgacaacataaatagaagacataagtgtaagaaaaaaaattagaagagaaatgtaagctaggtaattagtccaaaacaccctcttttggaaagaggcttcatataaatggtgatataattatcaagcgttacacacgtgaagtgataagaaaataaaaacaaaataaaataaaatcacattatggaacatgagaaaggattttcatcattaaacatgttagtgatgcaaaggcattgagcagaggagtgtggataacactgttgtgatgagtttaaccttattggacttatattgcaacaataataggctgcttttacttcttcagtttcttgtttcaagatctcagcatttcttccaagtcttttctttatgtattcaactaattttgatgcatcaacaattccccttactgtcaccaatgagttctccatatctggaaccactgttaaaactcctgtgaagacaaaaattagatcctaattatcttagaaaagaaagaaatttcaaatgtccaaattatttatatttatatacctacctctcatcctctccaaatctctcttaatatcatctacacagccttgacaatgcatattcatttttagcaatatcaccttcaacttgggctattagaaaatcaagataatattaattaacaaataaacaaattcagcgaggtttaaaaaattataaaatttcaaaattataaacaaaaatgagaaatatgtaaatgggccatacctgatcttctacaatttcttgattgttttcattgttctcaggttttggtattggagagataagcttaacattttgactatatttctttctaagtttttccaaaacttgaattgggttagccctttttcctcttactattactatatgtttctcactatcaagcacaacatcttcaactcctaaattcaagttatagtgtaaattaaacacatataataacaaattaaacgactgtgttttgatagaagagttaaaagctatttgatggatgaaagaacttttattgcgtaccttctaaacatctcaaacatttgtatactttgtctttgcaaccaggacaatgcatatatactttcaaaacaatttcttcacacattgtttctgattatatatttcaataacaatgttataaattagtactcatttgttgtaatatatatagctatatgacagtgttgatttttagttaatacaattttttcaatggatttggaatcggttctcatatgtgtgtacatgcttatgtttaatatatccacctaattagaatgaaaatagtattaattttttttgaccaaacagtgaattcttaaccatgttaccaattgtgaatatatatatataatagagctgtcgaatattataacataaattatatcctaaatacacaaatataccaagtattgcatgctatttcaaaaatttaaaataaaatattgagtaataatgaagtttccaaccatgatgagattctagaatatcatttgtacaatttcaaaaattaaagtctaatcctgtgttttgaaaaattactatttggatcatatgtatgtttaaaagtttgatcttacgtttttaagaaaattatttcagaacttgtatttttttaagagattataattatgaccctaaaattgaaatattcttttacaaaaatacttttagttataaaataatcagttatactatttttgaatatatatttattatattatattatatgacactgaattttaaaaaaatatatatatttttgaccttactttagaaaagataaaacaaataaaaaaataaagaactaaaattgattcataatcaaagtatttttttttttttgagaaagtgattaaaatcactcttgaatttacgacgtccacgtctgccaccggcgttggaacctcctcgaacgaggatagctcatcatctaaccgcagagcatgctttgccaaccatgggcgctaaagacttagagcgagccccataagacaaaactgcccccgaaaatttagacaataaaactataatatcttcaaacgacgctccaaactcattaaaatactggagttcctcctgaaaaaaacatcaaaaaataaaataaaactttaattagaaaataatcaaattgaagagaatcaaccaaccaccaagactaa

SEQ ID NO: 380263 - DNA, 1694 bp, Cannabis indica
aatttttttttataaaaagtagtgctttatataattattctgactgaatttaatagtaaatgtaatggtaatattaatttttaagattactattattatgattactcattttgtattgaatattgtaattaaattttttatgagattatttcagaaatacattaaaaacaaaaatacatttgtatttcatctacttattccgctctttaatataggattagggagtcaatatttaaagtaacaaatcctttcgttttatgcttaaaactgttccattctaaacttccttagcatttgagtttgtcttattctggatagataacatcatatcatacacaacatgttacttaagtacaatttaaggggtgtgatgactgtgaagatgatcccaaaatagcaaacgttttaagtcttaacttcttcattgattttcatatataattcttcaaaacccatggaagacaaccactttggtctcatacaatctttcttcctttctaatctaaaagaaacttaccttctccattgtacacctaactactgaaaaggctaaaaagaaaacaatggaaaaatagggagttcctaagaaaaggttcaaattaaggctggctattggggagtctaactaaaatagaatgctctggcttgtggtcacattcataatcaaggtgaacaaatgctctctctacttcagggagttcttcaatctttatttgtagtgattcaccaattgcatgagcttctatcaatggcaaatcttctggaagttcaatgtcaacctgaatttaacaattaaaagaatgatcaaagtgaaaaaagtatgaaaatttatgacataatacttacctgaaaagacaaaagatacttagaaaattgctttaaaagaagactaagaaataaactaacctctacaaaatacagaacaccaaaggtgtatgcgcggactgtgtcgacacgtctgattagaggatgatgtctaagaacaaggtatgtcagtttctgcaagacttctggtggagctgattgcccaaccagagacactacatgaagaagaaaatgttagtttattaaagatccagtgttgttaataagagtaaccaaagtgacatgtaagtatgaggtgtttgtgaaatagttaccaatataagattgtttaagtttcatatgttccggctaattgacatgtaccaaattatgcccttgaatttttaaggtcgttaaaaatagccttaaattattgttggatttaaggacttttgtctaattttattcaattttactatttcagtgattgtttatatactaaaccatgctccccaaagtttgatatctaccaaatcatgcccctcgaactttgacatgtactaaatcatggcccctggactttcatccatgttagacttttttactaaaattagaaaaaaaatacctaaaataccaacaatctcaatagttcatggatatttttaacgactttaaaaattcaggggcgatgatttggtacatgtcaaaattcagggagcaaaaatcataattagcctatattttttaggctttttataggaaaatcaaagctagtatagtatgaagtttcataagagcaaacctgcattttccagcacagtgccagaccagttggtaatagtatagactgcaagaacaatggcaccaactggatcaatccaccagtgaaa

SEQ ID NO: 380264 - DNA, 2874 bp, Cannabis indica
ttttttacaataaactcgaccccaatctcgaccacgggcaggacttagacccggaccccgacccagaacccgactaaaacccaaactctggacctaaaacatgccccagacccagactcggacccgaaccccaacccgacccagacccaaaacatgcgttgaacccaaactcaaacccaacccgtgacccagcctagaccctggacccagacccgaactcggacccgaactcggaccctggattcaaacttggataacggacctgaactcggacccagacccagaccccatacctagatccaaactcaaacactcagactcggactcgaacttagacctcgaacccaaacccaagtcccaaacccaaatctaggtttgaatttagggtttggatcccgagtccgggtccgggtttgggttcagagtctaaagtcgaggctggggccaagtttgggttcgaagtctgggttcaaagtaggggttgggttcgggtccagaccggggttgatctgggtgcagagcaaaggccagatctgggtttgaggtttgggtcgtggttcaggtccaaggtccgggtccaaatcaaggtctaaggtctagggtccaggttgtctttcaagtccagggtccgaatccgagtctaaggtcaggtcctggtccagctctggttataggttccagtccaaatgttggtcccggtccagatgtggtctagttctgaggtctaggtccacatctaggtccgagtccgggtataaggtttggggtccaagctagagtccaggtcctagtttggttctgggtccacatccgaatttgggtctcgagtctggggtccgagttcaagtcgttttggtgttcgaggtcgagatttgggctagggttcaggttcaggtctaggtccattataagggtatgggtttgggtctaaggtctagggttgggttcagggccaagggttaaccgcaaaccctttgtaaactttataatataagctaatacggattatttattatatattaaataatacaactcacgttgtattaaaatttatagtcgcaataattaataaaataaaatattttatccatagtattattatttaataaaattcaacttaaatagaacctactaaacaggctcttaaagttctctctctacaaatgatttgtatctctctcttctattcatattttttcctgaaatgattgaaaatgaagtcattataaaggctgagaaataaacccaaggtaaagacaaaattactcttgtaatctatctcaaaatactaatcaccttcagatagaactaaaaggttcacaatgggcgagtgtaaatctctctctccatctttgtctcttgcgtttaatttttacaaccattcctttttcatatgaataacgtgataccgttaaaggatctgttttctcggctcattaatttgcagcggatgaaacactgttaatagtgaatatctttaaccaaattaccacatttttttcttcatcaaattcatggtatgaacaatttgtattgacttgtatgacgagaaaactaaaacttagcgcatggattggctcccatagtcgtatcagtacagcagaataaacaagggtactgagcatagtcatctacaataaatttgatggaaaataaaatacgttttgatttattacagtaataatgcttcacttcatcttcttcttatcgtgtttcctcaattttgatcgtcgctgtttgaacaaatgcaggtacagtttcaaccagaggaaagggtataaaactagcaaaacctgacagaggaataaaaaaagaattaaggttacatatatttatactgtgtctgtcataaacaaataagagaaatctttatgaggtaaataaatgggacctagctagcatgaggagcaaaacaaggatgccataagagtaaacatataagagtagagaaatgagacagagatacgggtacggccattatcaggaaaagtacatgcaaattcacaggaatgttcagaaaatattctctcatacaagttatattatcccacttcacatcctatcctagaagtaaaattggtactgaagccggtctgggcctttgggtaatcatatgttataacaaaaccattacagatgtaaatatgataaatctgcctatcaacagcaaaaaaagcagcgcaataatgaattgtgtagttatagttaaaaaaaaataccacattaaaagataagtacatgatgaattcaaatcatatccgaaaatcagtgtcaaactttagaaacattgtaaaactgaactagaagagaatatgcatcacatatgtgaccaataaatgaatgataaatgacttgtgttgtgagtaatgaacaaacagagtaaaatatagtgtggagatttagaataggaaatgtgccctgatcccctctaggaaaaaaaagttcaaaacttaccctaacaaaagtataataagtgaaaggaagtacagagaagaaatctgcgtagaggttcttcttctttataaatggaagtgcttcatacataagccacactgcatggaattggaccaatcaattgatcagaaatgaaaaaatacaaactggagaatgtttaaacatcataggtcatagcatatatttacagctcaaaattaattagtaaggacttactttcaccagtaaacaaccccacgggataaagcacaataaatgcagtgtacctggtgaacacaaacataagaataattacataaaacaatttgtttcttccctccagagtccgatttgattttctagatcacgttttaagtgaacgatataccatagtattaagaacggtatatatcattttggactctatgttttgcaaaagtt

SEQ ID NO: 380265 - DNA, 1951 bp, Cannabis indica
atcttaacatttttcatataagaaagaacaaaagtacagttaacataactacaaagttcggcgtcatcaaaatgaaatacacaggaaacaattgtgaaaggtatattagtattttctcagctgttcttcttcattttagtctctctttattttttcctacttcaaatatcttttgaaacaggccataatcatatcctagattcttgctagtagctcacatattgatcaaaacaatgtcaatatcaactcacagtgttccaatggctaaaattcgctgaatggggtcgaaagcaagaagagaagaggtagcaggaatgccatagtgaactgaaatccgcaggtccaagtccgtttcggtcaaattaccctgtttcaagttctgctgaaatcaaatcaaatcaacacaaaaccgaatgaacttcactccattttcccaaaatagattgaaaaccaagcaaatttgttaattcaaatcgaacagtaccccgattctcaagacttcaacaatacaatcaatttaaaaacaataaaaaaactaaaacaatccaaaaagaaatatatgtagatatattaaacctaaagcaagtccaatctccgttcccgatgtaatggaacattttgtggagggagaagaagaagaaatagagaataatggaatccaatgagtaaagtacctgagaattgtgagcaactttgtgtaagagacgcttggcaaacatggcgaatcaggtgagctctcagagattggaacaagtttgaagctttctttctttctatctttgtttcagtgatgatcattacgatgcattttgcacagaatatttcaaaccacaccaaagagctacaattttttaattttaattgaatttatttattagtgcctaactttatttatttattttgaaagtcaatcttatatgtaggttttttctttcttttgtttaatttttatttttaagaaaatctttttcataataagataatgcaggtggccagggtgagtgatgacgccaaatgtctgtgcttttcattgatcctcaccagatctgttgaagattagtggaaaaggctaactcacggattgattcactcttggaaagaatacatattttgaaagcagttcatagcgacacgagagtacgacttggagatggggtctatcactaatatcagcaaaaaatatcagtgttatctgtctatttaacaagcgtaaaaatactccaaacacgagtgaaagtaaactaaaaatatactagaataaatctaagttaaatactaaaaataacctgacagtctagttactagtagcttagtttcatggatgcctattctagatacaattagattaagatgcatgttgtcgatgaagaacacaccagcttctacacgaatataggtgtgtattgttgcaaggtgataccattcggtctaagaaacaccagagcaacttactagagaatggtcaataaaatgttcaagaatcaattagggaggaatatggaagtgtatgccgatgacatgctagtaaaatcaaagactgtcggagaacattgtacagacctcgaggaagactttttggttctctgaaggtacgagatgaaactcaatcccaataaatgtacattcggtgtctcctctgagaaatttttgggtttcattgttagttctcgataaatcgaagcgaacccataaaaaataaaagccttcatcgacatgctttctccccgaaagcataaagagatacagaatgtcactagaaggataaccgccctcaacaggttcatctcaaaatcaacagacaagtgcatcccattttcaataagttataaggaaacaagaaattcgaatggaccaaagaatgtgaggaggccttctaaaaattaaaagagcatttgactactgttaggtttttaatagtactatttttaggttgattttagtgtgtttttaa

SEQ ID NO: 380266 - DNA, 6953 bp, Cannabis indica
ccacagtaacagttctttcagccatacaactagttgagtgaggtcttaagttagtgactccattcagaaataaattgtggtccaaactttacagtactattattcacatcatttcatattcacatttcaaagtttcacacacagttactgtagccactgttataagaatcctacaatgccgcgtgtacttcccatcaaaacttattaatatatatatatacatacatatatttagttgctattgtcgttacctggatttcgtggtgaccttttccattggtttagtcttactttctttcacgtaaccctttttcataaagtgtgtttcataacttttatgagcttgacccttcactcaatatgtaggcgcacataatcaaatttcacactatatctcctcttcactctctttctgagcatctgggaattcaaataggtgagtcttttctgtgaacctcaaccactttactattgaaatgagcatcattagctattattgatctataaaattactgatccgattcgttgaaattagcaaagtgaccctttagctatttttgtagtttgttggaataaatagacgtattgggtaattttcaattcctcatagtccttgccttttgattagttagttagttagatacacatatttcctacaattgtagaagtcttgacccttttctattcttcttatccccttctctctttcaaaacgattgactgagaaacaaggttgaatctttaagacgaagtgggggtggattcaattatttatatattgaagacaccaagtgggttatgtttttttaatacttaaattttggtacagaacatgtcagggtattatatggaatcaaggaatcaaaagaagaggcttccacgtgctcaaccttggaatcaactcagttatctcatcatccattttgttcacgagttgaaatctttggtaggcagccatggttgagttttgatccgggccttacatagaataaagggattatttttaaatccagaaaagatttatccatattctcaaaggttggaaaggaaagttcctcctttatatattttccttgtgtttgtttttatcaacttcttctgttggagcaacaaactcagaacatctaataagaaaaagaagatggtaaaaaggtcagcaggagagagaggagacactcccttgcatttggctgcaagatcaggaaatcgtgaactggttatggaaataatctcaaatactagtgaggaggtagaattaaaggaaatattagcaaagcagaatcatgcttgtgaaacccctctttatgtggcctctgagtatgggtatgttgatatggtggaagacatgataaagcactatgacattgatacagctggtaccagagctaggaatggcttcgatgcatttcatgtagctactaaacaaggaaatttaggtaaattccagtggctgttagcataaagttttgagtaattgatggcactatcttttttaaaaaaaaaagtcttcttttgatgattttctgaaaatgacattccggattccccgcagatgctgagaatttttgtcttgaatgtcttctttcaatgaattaccaaaagatactattttgtttctttattatagatgtattgtcatgaatttttctggattgagctcattgttgtttgtataacgaacttctgattcaggggtgttaaaggtgttaatggaggctctcccagaactcgcaatgactgttgatctgacaaacacaacagctttgcatactgctgctgcacaaggccatgttgatgtggttaattacctcttggatagttttggcagcctggccaacataacgagaagcaactgcaaaaccgcactgcattctgcggcaaggaatgggcatttgttggttgtcaaagctctgttgagtaaagagtctggaattgctgtgaaaattgataagaaagggcagactgctcttcatatggcagttaagggacataacgttgagctggtgactgaaatgttgaaggcaaatcattctttgataaacatggttgatgctaagggcaacacttccttgcatatagctacccgaaagggtcgagctgaggtgatcatagttttatttttgttgatttgtcatctcaaaagagaatatatttaatttggagtttatttagtgcattgaattgaatgatacaacttgtgaaaatggacctttttccaacgtaacattgaaaatggcctgctttcaataatttcttaacagagtagcattcttaatatggattatttaaaccaaaccaaaagcttagaaaaaagaaacaaggaggtgtatagtaaaatacatatactattttttacaaaacatgtggaaactagaactaggaaattagttgcaacaaagacatatctgattaagtctaaatatggatttttagtagccagaaacactgtagtatagagtaccttattaacgttaaacttcttacagattgttcagctgctgctaaatcacaagggagtggacacgactgtcattaacaaagatggcgaaagtgtacttgacactgctgatcgaaatggacagccagagattgctgctgtcctaagagaacatggcattcaaagcgccaaattcattagaccactaagttcaacaagatcccgagaactgaaacaaactgtcagtgtaatcaaacatgaagtacatcaccaacttgagcatacacgccagacacgaaaacaagtacgaggaatggttaaacgactcaacaaaatgcacttagaaggcctcaacaacgcgatcaactcaaccacggttgttgctgttctcatagccaccgttgcctttgctgctatcttccaagtccctggcctgtaccctgttgatgcttcaaaattaactccaaacctctcaactggtgaagtccttgttggtcccagaattgaattcatcatcttcttcatatttgactcatttgctctcttcctatcactagctggtgtgattgtccaaacctcagttgttgttgtagagagaaaatcaaaaaagaaactcatggcaatcataaacaagctgatgtggttggcttgtgttatggtgtcagtggcatttttagcactgtcatatattgttgtgggacatcatagattattagccattggcgtaactggtataggaacagtaattatggcaacaacactgggaactatgtgttattgggtcatagtaaacaggctacaatcttccaaattgaggagaagccttaagagatcaatgactaataatagtcagtcaccacaatcatggtcagttacaataatgtctgatactgatatactaaatagtgagtataagacagtgtatgcactttgaaaaaccaaaggtagcatatattaagtctgagatgtaaattggcctcttcacaagtaacatagacagtatgtatatataaattatattatgtaagactgaacttcagtaatttgccaaattgtgatatgataacaataacagaagatcattactgtagtattactatttcaatttgatgatagcccaagtgatcgtgttcgataaaattatatatttagtctgtgctttcttccacctcattttcatatctagactaatcaacatcgtgtctttattatactttcttttagaatgttgtagaaggtgttgctaattggagtgaagagcacgttgttttcagaaattttaaagtctctttttgtgtgctatttataagttgggtttaaataattttacattttttctttttcacagaagcttgtttggataatgttgtcggaggaatttgaacaacaccaaaacgtatgctaacagtaaataaataaaagagaaatagcaaatactctacttagaatagcgagtattcaaaggaaattgtcaagataattgaacaactggaaaaataaaatgaacacaaggatatatagtggttcagtcagatcacggtctacatagtccattgttgcaaataatttttgtttcgtctattcatcttggatcactcgcatttatttagaaagcaagtgtccttttagtcattactaactagttatagaatcgtttttacaataaataacaatattaataaacgtaaaagaataaatgaagaacaatttaattcgttctaataagtgcagcatcatatgcgacctatagggtgcgagttgcctgttaatattcttgcacaagctcgcagactttaggtgcgttctatattcttaaaagggttaatgagcctttcactaggatgtctttgttctatctgagttgcattgacggacattttgtgtgttgacaacatgagacatgcaagtccctactgagtcatcgaacacatttcgtcatttggaccaatcattatgtaaagaagctatctttacttagtcgcaggagaaggctagttagtcatcgcatatgtttcgatatatgtgcgacttgtattaatccctctcggtctggcttatcttatgcaaggcatagtatgagactagaccctgtcaaggccgcatcatctcgcgagtttggttcaagcaaggtcaactcttggacagtcattaattaacagctcattcatcccttgaggattggattcacgtgtcaattttataggaggctgatctcgagtttctaggaaaagatattgcactagaacacatgcccctagtttcgcgactgacaattgtatcattagggaaactatcagagagagggaggtgagttgttgtcacgagatggtgacttttggttgtcgtgttgagggttttgaaaagacgactgtaattattattttatttctccgagatgccacatcatcaagaccctttggggtatgtgcaggcgtgttctttggagaccgttggattgagacaccttaggcattctcttgccacgtgtcagcatcccagtgaatgaggagtattagtatttaacccccacagatataaatcaattcttattcatcttcctacttccatccctctacccaaaaatttaaacttttaaggacttctctaaagtctcaaattcttacagattggagacaacttcaagggcttgaatatcttcaagagcaatctatgaagtaattatgttgaagattagtgtcttccttttatgtaattattagtttcttcaaaattcgcatgcattctggttttaggtatagaaattgtatgaaaaaaatagggtttattgagagaatcaaaaatttaggcacaatacaatatttttcccaaaaaataattgcccgaacttttaatactcgcgggtttttgcgatgaaattttgaatgatcggatcttcatggtagaaccttcgcacacccgcatagttaattagtttatttaccgccaagtcaaaatttggtagtggttggggtttcgtagagacttaatatttacttctctgggtaacccttaggtcactacgagacccccaaccactccattcatccttggagttggtcgttttacttttatacatatgcattcaaatcatgattaggactaactgagtctcaaagtggtggtgtcccattaacctaatgtttatgctctcgcatgacccttaagatacttggaaactcccaaacactttttgagatagtcgctagttttgtcacactaaaaattttgttgtttgggtgagaacacttttttatttacattgcattcacatcccgcagaaaaaagatcttctatcttttagatgagcaacctatcgtacagccaaaggtaccattctagagatgggagtattgttattgaatgtcaaagaatatgtttatccccatgtcgctgtcagatgaggagattcctatggcaagagcttgagaaggctccctatctaccagcaagatagattgcatggtacaagaattagcaggaccggtcactatagagatgtgggggaagtgaatccacagtgtctactcaaaggtagttttgcttatctccaaatttcccagacgtggaggtcgaagagatgggcaaggacttcaaactatccacttgcgaggtcaaagatgatgtgggcaatgaagagattgaaatagatttagtggataatgccctgttagacgaacctttttcctgcgaggacctagtcttgcaagttaaaaagtatgatctaaaaacatttgaaagactgaatttaatccatattacaacttcaaaacccatgtcaatgcaatgacctcacctcccgttcactaattctggtattatctcgacccaaaatgtagtggtttcaattcccattcttcgctgcagtgtgatgcttcctttccaccttttcgatatgacgtctctcccttctaacttacacccaacaattatcgcataattcttggattttacgcaatgtacatggaatacacgcgaggggaactaaaagttgaggattttagttacttttatggtataaaaaatgttggtcatgacaatggcttacactacttcagtaaatgggccaactctgaggtcaacggggtagaaggcactattttcaatatgggggattgaaagtcaaagaggttttatacatttgaaatgccacgggcttcaatcgctgacctcgtacatcgcaagcctttgcacttgactattgtttttttgtccttttaaaaatgctaacatttatcaatgctcacaggtagaccagctcaatctgtgttggacaaagaccgtgtagaagttgctgaagttctgagcagtcttccaattcaggatcacgattggcgtctactgtatatgttgggttttgtgccctaaataaaactcatttcaatataatcagatttacatatgaataaagatcagaaataacatttcatgttacatggttcacatgatttatttcatgattatatgtatagaatgtatgaattctttttaagtccagaacatatgagtttgttaaaga

SEQ ID NO: 380267 - DNA, 4219 bp, Cannabis indica
tacgtaatcaatcctaatatatatatatatatatatatatatataaacaaaattcagtgtcatgtgtcggagatttaattactgtatactactactatagctaccgactctctcccaccattatatctccaaattaaatcatatatagttccatatttattaattcatcatatcaacaatatcgacttggggaaaacaatcaaatatatatacgatctctgacaaattatatatcaacgaaaattctgaccattcttctttagtttatttccaatcttttaattaatatatagagtagtactatacatatattttgcagttatatattctattatattaaccatttatatacataagcacacgatttcatatttatttaatatttaattaaggaatataaaattttccaacaaaatcaaaaattcagaatggtgggtcagttagatgatcactctacatgattttaaaaggcgatttgtgctatcaatatcctgacctcctcagttcagttagctaagccctatgtatatgtatatatatattagtactagttcacactacaaagtgtagtagagagaccaagaaacgtgaattaaaaaaattgggggagacaagcaggaatgtaccactgcaatttggtatactatttataaaatagagtggtccggagatggtcattcatccctagacacaacatataaatatatatacattgattatgaagagcaaaaagcctgtacatttctcgtctctctcaatatcaatttattaattaagtgcatgcatgcccatatatatttataacaatatttgaatatatatatatataatgtttaaatgccaatttaacatttgatcattataaatttatttgatacggatcatcaggggcttaatggtcattaaaaattatataaacggtaccccggccccttcatcttcatcatgtcctgtcctttttagacacgtacaataaataaaaactaacattatttaatagaaacaaaaaaaaaagatggtctactacatataacattgaaggatttctttttttaatatatgtattttttatgtggtatatacaaacaaggaaaccgtaagaggtatagaatagaatggtagagggattgtggattctcttttgggatagtagtatagtgtcccacacaaagttatatagagtaatgatcatgcgtagtttgtgaactgaaagtactagagtggtggcaaaactatcaaaaacaaattctaggggtttagctcatggaagcctaggcgaccgtgacacctagctatacccaccaattgatcaagtcctatatatatatacaactccccatgcatgcttcggtgtgtgtctataatacaaaacactactgttcttagttcttaccaaaggctactgatactgatgagagagagataggacacgtagtacactgtcctgtatttataatgtgtgtgataatatgtgacaaaaaaaaagggtcgactctctctagctacctacatatatatatatatttatgtatatttttattttacaactcatcactatatatagctagctagtgttcaaaacaacagttgtcttagtaaaaaaaaaaagttaggtttatttatttatttattttgacttggacatgtaacacataaaaacgttacactatgctgcataataacgcaattatataaatatcaattaaatgcagccgcataattgttccattaatgttgtttttcttcaacgagtttgcttgataatatggttgattctcatataataatgtacatacaattaaattagccgaaatttttgaaaatacagtataattacatgaattgtagtcgcctaattgtaccgtcattaatattatatatagttaccatagaacttttgttccggccatcaaaaaaaaaaaaaaaagaattattggttaccataaccatatagtactagctatagcttaataactaatttttttctttttctttttcacactagctatagttttaattaacaggtgtgagtgaatcttaactgcaatgaaacccccgggtcctttattattttcttgctatagatgcttctgaaaactgtttaattaattgaataaacaaccgaataataatatttaataactagagtacttcttccaaaaagttgagatttaagtagctatattaaatcaacaaataatgtataaggatgtagctatatatatatacatacgaatcacgatgtttgtaacgtagaaactcctgcctgggtacgtgatccaatggggcctgattaatctggatagtgtaaagtccaattctaaaatgttacatctatatatgtactacactagctagtttttaagttaatgtatatataattagctggaaaaatagtattgcttcactaaatgtgtcatatttgaattcatatatattttgtttgcacacgtacgtatcattattcgtaatggttgattctttttataaaagggagaaaaaaaaagccaaatgatcatacgtacgatataatctactgtagagctttccttcaatacaggccacattatataaatatcatgtacaatacaattaaatatagctttctatccatatagctagggtttgtggaatgtttagtcttgaaggttgaggacagactacgcatgcgacccactattcatctctttcttcttggcacaatttgtaaagtgctcatgacctccatgatcatcaatgtcctatgtggtccaatccaaccatcagatctctttcacattcagctagctaagttgactgtttagcagcctgtattatatctttatatttatatatatagcttagagctatagagtgctaaaccttgtgatttttatcaataataatttaaaagcaatacaacatgtataataatatatagtaataatattggtttttagagtggggtcatgatcgaggtaggtcgagcccgatctgtctaattttccctgactcttgtttaatttttgggggtgtaatcatatacaaatctagtctcctagttattgtataacacttattaatttaaaaagttatagaacatccaaactagatagttttttaccgaagtttagtaaacgaaatttgagacctcttttcttagtttggagaaaaaagatcaaaccttggagtttttaatatgacatgacagctggctcttaccactgcagcaacgctacctacatatatgtatatattactgtactatcaaataataacttttaaattagataattaaatttctaaactttctacataaaaagtagccaaaagtttcataaatttaatttaactatatttaaaactacaattaggtacgtagaaccttgacaacctaattagtaaaaggtacggccagctgttaaataatgttattacatatggcgcttgatctgttgagttgttgtgtgtaattacatatataataatattatacacagttcttcacatgagcttaaaacaaaaccgttcaaaggttttctttattatacaaaactccaaattatatatattgcaatcatcactaaataactaatcccttatatccaagaaacacgtgatgattttttctttatttgtcctttgtggtcaaagtttgaaagtacgtcaaatgaatgataagaaattcaaattcctgaacccctgtcgaaaatcgaaattctttacacgagctatacagtatatatatttatatataaaaatatttatacctaaacgataaaatcttttgagtagtcatcaaattattgcaatatgattgttgttagactcatataaacatttggatcccagattatataaacgatatacgtaattttttttacgagcagactccattatatgtcctatatattacatatccgaagcctatatatatatatatatggaaaaatatatatattaattatctaatagtgtaagttgaacttagactacttacaaaattttagaaaattctcaatgccaaaagttaggtttaaataattttttataaaaaaaatagtgaaacttgcagataaatatttgaactttatttaagaccacttataataagagatgtgaataaaattgtgctatgtttgacataaaaaataactttgtagtacatttacatgtcaaatattagcattgtgattcaatgcacaattactaaaacttgatgtgaaatttaatatctaat

SEQ ID NO: 380268 - DNA, 4913 bp, Cannabis indica
tgtttggatttaatcaaaaaattaagaattctatgtttaaaaattaaaatttgtttgtagtatagtttcattcagttaagaataattgttatacacacacacaaaaagaaaaaaaataagatttgtctggcgcttgtacaactagttttcgcacctgcattatgataacaagctctttcttttatttgtgttttgtttcttgcgtgccatgacttagcctttgttcaaatttttttaactgagtattggacaaatattttcattacatttggttgtgagtttctataacagtagtttctttggggtgagtttcagggtgattttaaaaagcaagaggataagaaacacagggagacatatagaggtctaggtgattctgaacaaaagcttcaattcttttcagctcgacagatagcatgtcgcttggttggaagtagaggttacctttgtcaaaaggtaatatgttcgtgtttggtatttcaatattttttgggtgctccttctctctgtgtcacatctctctctgggacttgtggtatggattttacgtgaaagggtgggaaatgcaacatggtctaacgattttttcccttgttgtgctgttttacatcacttctctcactgtgcagtgttggctacctcatgaagattgtatgtgttcaaaggtcacaccttgtaaactttggcatggaattaggttctggctgtatatgcatccaaaggttcggttcaggagtttcagttattcatgagtcagtgtaattcatattacatgttttgtaatgtattcacttaacagatttcatttgcaggatttcttgcgacaaaacaatactggtaaattgttgtggcaattgtttggtgttgaggcagcaactttgtgcctttttggcattgctgaacaagaggagatcatgtggaatgcattcaagtgtgcaggtctttttaatgtttttggtgcttattcctagattttcaaacttgtaactcttattgtgtttatgaaggtgtatagttacataagaatcatcacatcacatctaattgctatataccttattgccttattggaaaatatcttttctatgtgcataaatgttaaaatttaaagagcttaaacttcaaattgtacaatactcacattacaatgacatggatcttctaagattttggttgggcataaaatttgatgatacacatagttggcatgattttgtttttgaaaaaacatagttggcatgatttaagtaccatgaaatcaataattccaataatctgcattctgcaaaatggtatcctattagtgattgcatgttcactttagttactccaatattcaccatgaaagtcattctcgaatacccccagcagaaaaagaacagattattgaacaaaatggaatatgtgcatctgtatgcatattattagacagttttcaaggaaaggcacagaagggtgggtcctaacattaactgtgtgttgattataattaccgcaatttgcatctcggttgattgaatctttttgctgtggaattgaaaattgagatagtagtgttgtttgctagctttacaatactttaaactttagagttactaaatgtaagcacacatttcgttcttcaatttaggaaaagacaaggtttggtgcctctatccaaacaagagtggagtggtaaaatcagttcaagaagcatttgatcaaggattgtcaactgacctgggatttgcagaaactacggtgaatgttaatgtttctttagcataattcctagtgctggactggttggtttattgggttcatttcaatttggtattatcacacatttgagtgtggaacccatttgtctagcttgtaaattggtgcatcactatgtcgtctaatcatttatatgcatttcctgaagatagtacgattggctgaaaaaagctgtattctactatgaagtttaggtcgatatagctataaattttcagacatacatattgtgcaatattagtcaagagcgtcaattatagtcttcactatggccttcatctattatgatttaatttcactctaatatacttcatattgtccatttgtttcgaagtatggcctgctcacgttatcttcaacattaattgtgaactacttaccctttttcttggtgtaatgaaaggtttttcattgtactaataaataatttaaatgttgatttcaatattctgctgcacagacaaatggacatgatattttgaattttgttctgattgatggtacatggagtaattctgctgcaatggtcagaaggttgaaggtattatcactagacatttattttctcatgtcctgttgcttactgttgcacattgttattattgttcatgccataatcctagtttatgctgcaaagaactgaatggaaaataattggattaatagaagaatttgtttaactcttctgaccatccaattctccctaaacgggcgcattttaaagcctgctgaaaagtggatgggttgacaagagaagagaatgagttgggtgcaagttgccctttcctccagcggtcggtttacctacctgcttgcttgcttctcactctcgacttaaaaaacctacttttttggctccatatgtttcagcttaaatactaaatttgatattctgtttgcaaaatttcaatgataaatctaattatttttaggtaaaatggtcttacttatttattttaattttgaccaaaataaggactgtgaataattttggtttgtttattattcaagtttttgagaacaaatgtttgttatcctctaagtagggttcaactaaatcttagtactcgagcattgttgtctgcccgatgttggtgcttagcaaatgtggaatttaatattctacgataaatcaaggagtacaaatatgtggttagtctttattgcatctaggatcaatcagaacacccttacaaaaatgcacacaagaatgaacttgtttcacccaagggggtagcacaaatggtcaggcttgtggtttgctcccacaatgtctaaggttggagtctgtagtttataagtctccaaatatagtaggttaggtgggagtctagtttcaaaaaccaaaagaatgaacttgtttgactttgatgagggtgtcttgaatattgatgaacttgtttttagtatatgctttactggtttcaaaattaactctacagaggctaataagttagcctattgtttagccaatcatgctagtgctattttggaatggggatctttcctcttgttgctcgatatgtccttgtgatggacttgcctttcactttgtgtggtatttgtttgtgttaaagttgcatttgcctttataaatatcttatcttgagcgtgcaggatcaagctaagttagcttggggagaggaagacatttgctttatatccttggccgctggtgcctctgctatgcataaacttcggtgagaactgatacattattataatttccacctccaattatcattcatgtttaagccgatctttcaacccagtgtggaatgtttgattgcagaccccaaccatcatgggatcgtacctgtacagcagctgcagctgttggccttctctatgagttacaacttcttccaaagttctgctcaattggcttggataaacaagccgaagctatagaggatactttagctgttctcttagacgctctcacagctcgacgcctccggatgggtaggtccataactcgtaaaatgaggcaccatagtgatatatgttaatcgcgttccaacaacagtttcatgcagaccaagtgaaatgaggataggctttatgaaattccaaggtgatttttctgaatattcacgtgaagtctgtgttagctcacatttcttgggtcttaaacgtctgctgaggctaggatttgcaacactttgttactgctttttcgagtagatttattatcgaatgagtggaacaacagatttcagttacattgttgatgattttggtccatatttcaacttttttttttcttattatgtttttcctcattactcatcataccaaccttgcaaaatgttttgttctcttttaggttgacatatagttggctacttgggacactaaggatggtatcaacaccaaatactggtaaaaacaaagcaaggaccaatactaactaccgatatttgtaagcaatataggctcctcctaagcctttaattttgattatacagttaattttttgaatacctatttggtttatgaactttttagattactttattagaatttgtttagatttaagatatatttatagacttccttaccaagaacaaggaaattattgaaaatgtacaatttcaaactaatttacagcatgtaaagtattgaaatggcattaagcaacacaaacaataaggtgaaggaattaagcaaaacaaacaataaagtgaaggaattaagcaaaacaaaacaacaataaggtgaagaccttattgtttgttttgcttaacaccatttcaatacttttatgtaaaatcaaatccctacttaatagtgatgcatcttttgccttttctatatagaccattaatattattatataaaagggtgagtatttcgtttttatttcctttcttcctagcaatgaatatactttgttgataataatcagagtaagatatcatcagagcgaaagaaagaatttattttcactataaaagtttttcatccactctgagaaattgccaaattggacaacaaacttgtaatctaactaatcgaatataatatatgcatcttttgaaggagagactacagttagtaaattatattaaacttgtaaaggaaaatcaagaataagagaccaagatgttgtttggctttacagtttaaaaattattttctgttttttaaaa

SEQ ID NO: 380269 - DNA, 5987 bp, Cannabis indica
atgattaatggattaattgaataattcaacaaactcaaaaggtcatatttgccgttttgaatctttaatttccttctttaaacagtattgaagtaaccatgtgcatttcattactttgttctccatacatttatgtccacttctaatgcaacttttttccccctctaatattaaactaaatgaggattgcattgccatacaaagaattttttgttcactttcccaggataattgagtttacttttgttaacctttggatatgattgtatttttatcataaaattatatggtcatctgatgggtgttactttttcaatatttgtttgcgcttccgtggaggttatagagttgtaattttggcacaaggaaacgggaacttattgcatctctcctttcttcgtataaagacaacgaactatggtatataattattctctatttataattataaaattatagttgtttcttgttcacaaatcattcaactttttcctttcctgtcatgtttgtgattgttatttgcagctcaacattaccgagtatgattttggagagaacaggtacctgtgtgaagatatctcccaaggctgaattgcttttgtggcgtgctgaggttgtcttctattgctcatccaaagtgcaccagcacccaagcaattgttttcgatgcattctaaattctttactgcatttgtggtctatgtagaggcttttctttctgaatggagagcaggatctgtcatcttttttattggctgatttgggaattattaagtatccgacttacaactgtgtaattacagaacagatcttctcaaacagaaatgctctgcttgcttatgaggaggtggtgctcttttttctttcaagtccttttgtaattttatttaataaaaaagaatatggtaatttttagttccctttatgacacatgggtatactttcaggccattgaagtggcacaaatgattgatcaagctcttgatgaaaatgacaatgaattggttttgagatgcataaagatatctgaatcacgtatgtgcaatgcaaaagcaacggagacctcaatgtctgaaacgatggttacccctcttacatgtttttctgcatcattggtttactctaaagttcttaccctaggaacttcctttcttgagcgtgagcgtaggtataaatttgggaattcaaatctccctattttatgattgcattcctttgtaagttagcatttttctcattgttttggcaaggatagctattagactttactaacttggttgtaatgtttgatttattatctgtgggtagacatgataaatgtactatctcagttacaattacttataaggtttctcatcatgttcaccaattatgcagctgaaatctttttgaaacatgtgccattcatctagttttctagctccagtttggttcttctgttgaatgctaagagaattatttgttctggtcacaggtataatgaagcaataaatttactaaaacggttgctagaatgttttacttgtgatggtagaaggggatattggatcctgagattgtcaattgacttggagcatataggatatcatgacgagagcctttcagttgctgaaagtggattgttagatacttgggtgcgtgctggattaagaatggcattgcagaggcgggtccttcggttagggaagccaccaagaagatggaaaactcctagttttgcaaatttggtgaagaggaaaatcgacgaggtaatatcttagctgtggtatgcattttaaatctgatacctagatatgaagtggttaccttctaatctttgacttcattctttggcatacaagttaggttcatgttcaagggaggcctttgaattctgtaattggactgaagagcaggttctatggagaagatgacaagcaatgtggggtggagcagcttgccctccaatattatgctggagaaggaggtggatggcatggcatacatacagaaagtggcatatggctgactatatttggactacttatgtgggatgttatgttttctgatgtaccaaatgtcttccgcaatagatttcaggtaaattttctatgtttgctattcagctcttgatttggatgccaagtaagggttcacgtctctttcttttttaagctcttatttgaaattagttatggtatttcagatgacaagtgatctctatcttcattttttttttgtttcagaaaaataataataataattagttatggtattatattgtattagactagaaaatgcaaccaacataagcgcattgtcttctattgagatagtattgaaaaaagaaagaggccacttgtcttggattgctcccccggttatgtattgaaaatcctcacttgtggctagggatgcacacggagcggggaattggcggggagtgctctcccgtccctattcccgtttagaattttaatccccatcccatccccgcttattctctgtcccacggcgagaaatctcctaatgtgaaaataaatgttatttaaaaaacttacatgtacaaaaatattaaattacataaaaattaaaatattgcatattatttattatttaatatcaattattatacaaaatacaacttaacaaattatgggatctctatgcacaagcttgagggaggggtgatattggtgtttagtctatcactcggtatcctatcaattaggaaaccactgtgtacagattgtattgtttctatgtttagtttatttgataggctgtgtattatatttgtcattaccaaaatcttcagtgtttatttaccaatatttcctttttctgtgcagtacctatttaaaggtattctctcattgcataaaattataagtgaataaccttacaaaaaaaataaaaattataagtgaataatttccacaatattctcttgtattttattgaattataatgcacaaatatacaaactatacaattatatccctagaattaagctaattagcatctatatacaccccattacattctattaaccaaaaaaaaacaccccattacattctgtaacaatccccagcaaaaaaatgaaataaattaatccatattttctcctactcttaccgaaccatcaaccacaacagaaaacaggaagtaaaactaaagcaagtaactatgtaattataaaatgccatatgcatagtaaaattataaaaataaccattaaattatgaatgcatttgtatatttataattctactgtctctgtctccgaacataaaaacaagcacaagttagctcaaaatttttgtggtacagctggttgcaagtttttcgatgtgttcttgaagtggagtttgaaattgaaaaggaaagttgttctagacatgtaattattctgttaatcttgctactgatagatacttgaaattatttaaagtgttaatcgatttggttttgatctaaatttacgtataaatagtttttggttgaaatctatgaaaaccaattttgattttttgctgtcacacctgttagttgtcgattatatctttttatttaatattgacatttgcttgatagttttatcttgttgatacaagcattttaataggtttttgatattgcatctattttttaatcggtgactagcacaatttagaattttattcagatgtaaacttagaataatatgtcctaataattttgactgatgtgtagtgaaaggagaattgaaacggacaaacagtgactcgttattgcttttatcaatttcatcatgttcactatgattcaattgccacgtgcttatggttttatgttgtgctttactcgatgaaaatgagaaattcagatggattaaaactgttattgcagactgctccgttggacctggagactgatagcttttatctagtgagaaagagcagcatagagtctcatcttcaaaaaattcatgatggcatggctgaggaattcctcatcacatcatgggaattacacactggaacagcttgcagaggagtaaactggaataggcatactctatctgagctccgagcagctgttgtatgtattggtggcccttgtttagctttactctgtagacatcttgcacaagattaccaaagctggtcacgtggaatgccagatttgttgctttggcgatttaacggagatttcacaggtgaagccaagcttgttgaggttaaaggccctagggacaaactttccgaacagcaacgagcatggctattgcttctaatggattgcggtttcaacacagaggtttgtaaagtcagccctgaaccaacaacttcctaatgcatgctgcagcttcaaatttaagctcccacatcctaggaaaaatcatggtgagaggctttcaggctattatgctttagactatttttagtgattttggtaggcaatccaagcggagggtttcgcaagaaaagttcaggtctcaagcaaattcaactttataataattgcatgccgaaaacgtcaaaggatataattgacactacaacaaacccaaatatttgattgatgtgtatagttgagtacattatttttacgattattcaggtggaaaatagagagacattgatgtcatatacgaccatcactgttgtatttatttactgtcaaacttgctataattttgccaatattattcttctgtatatgattttagctcttgatttttagagtttagtatagcataattttgccaacattatattcatgatttcgtacagatgtgcaacacaatagctttggaataacgtggtgtcttaattgaagcttttgaggattgatgaaacgaaacaattattataattcacatgctattattgattgaaacggaatgattatctagagaacaacacaagaaagttataacaaagtttaaggcctcacacaaaataataaaagctatacaaatagtttacaaccattttttcctttcaccaggattagtaaagtacatatatatatatataattgtgaaaaaaaaatattacactgtataattaacttttgtcatttattttctcttgtagagtttatgcgcttgtggtttttgactttgttttgaaggaagcttttgtggtttttgacatgggttagttttgattaacctcattgaaacacttgaaacgtttggttgagagtttaatggattaggacattagcaaatttctttctaagcatttatttcggtactttaaaaagctcatctcatacaccttttatcattcatggctcgtttaataagcggggttgtattgtattaaataataaataatactgtttgaataaaacattgtattgtgttaataattacgattataaattttaatacaatgtgagtcgtattatttaatacataacaaatgactcgtattagtttgtattataatgttgataaaggatatgggatcaacctcggtctcgactctagccccacacctcgaactcggaccccagacccagactctaaaccttggatcacagtcctgactaggttgtggtcgaggttgagtttattgtaaagaatatataattttatacatcatattagtacaatagaacataatatctcacggtgtaccaaacgagccctcaaataattgaagttgctcaacaagagagcagttggggctaaagttgccatcatagaaacaaatagcttgtttggcacagcttttggaaaagctaaaaacgacttttttaaaaaagttgtataaaaaaaaatatttagtaagcagttaaaaaacaacttattgaaaaaattattaagaagttagagctaaagttgatagaacctaactttaagaaaaatttgtttttgattaaaagcctttataataaattattttgcactaaaattatttaaatattcattatatattacaaaaaataaaaatatttttttgaaggaaaataatatttaattttttaattttattttaaaaaatatttta

SEQ ID NO: 380270 - DNA, 1549 bp, Cannabis indica
aaaaaagtactaccaaatacaccttaaattatggctagcttagtagtgagggaaggattggaaaaaggaagaagtcatgggttcgaactcaaaactttaagctattaaactcttaaaatgatacgctacactcaaaaaaacacaccttaaattatttaatataaaatatttaatatttaattattaaaataaatactcaatatatgtcgttcttagaaaacatacgtgcttaattgtccgttaaaaccttaaaatgtaaatatattaagcacgccatatatttattaaaagttatttcttatggtgcaagtcgtgcctaataatatttttaagcacgaacaataggaatgatactttagacacgatatatcattctcaaaaccctataggaacgaaactggggactttaggaatggcatatatcattcgtaaaagctctttttcctttagtgaagcaaatgaaatgcacatattaaaattagttatggggaaggtccttgtgtccctcgtcttgtacaagctcttaaagttgttggtcattatataatttgacttggtttcttgatgaaagaaattaaggaaacagtgattaagaggatatgtcttttcggaaatataagaaaaaattaaatttaattagagttgtatttatttcaaaaaagtaagctgaagacatcccccattttgttcacttctactttgagtttttctgtactcaagaagacgacaagaatgatatttctaacatccttcaggggatctccagccatctctctcaattccaaacttcgttcttggatgccccttttaccacggatgaagttaagcaagcttttgtttaacctatcaggtgataaagcccctgacactgatggtcttaatgcatttttctaccaaaagaattggtagagtattggtgaagacttctatagtgccatcctggatgttcttaataaaaactctgatatatctcttgtcaacgaaactgtcctggacttaattcctaagaagaagaaggcttccacctttcgtgactttcgtcctataagcctttgctctaccttgcataaagtcatttcaaaagttctggctaataggattaaaactgttctccacactatcatatcttgcaatcagagtgcttaataattgggtcggttaatcttcgacaacaccctaattgccaatgagcttattaatgccattcacactagaagaaaggaaaaatgggttgggttgcccttaagcttgatatggaaaaagcttttgataggttggagtggagctttctcaagaccattcttcaacatgttggttttcctcctacatttgtttccttagtgctgagatgcatttcctctgtgagctatcgtatttcaataaatggtaatatctcaaaaaaattctcctttcctaggggaattagacaaggagaccccttgtccctaggtatgtacaaaaattttcgtaaactgtgcaacccgaataacccgcccaaaccaaaccaacaaaaccgataaaaaatacaaaccgacataactcgaaaaaa

SEQ ID NO: 380271 - DNA, 2235 bp, Cannabis indica
aaaaaaaaaaaaaaattatatgcgtttattcaagcaaaatactggaatgttaaattagtatattttatttttcctatgtatatagaatatgcatataaaaagcttcaaatatttgtgaaagtattaactatttcgagagtaatcgaaagtaaacgtttatttttgctgttgaaaatctagatcaacagtagtacttgataggcattaagtaatatgtctattttgaatgtctcttaatgtacagtgaagccatctcaaaagtgctcaaaaaaattcaggtgagtaggacataatatatctcaatacatacaatgtttgcttttcctcaaaagggaagactcttttttccagcatgccaactgaatttggcaacaaaaaaaaaatagtggaaataatggttggaatcctttagtgcaagaaaaaatgacatgatgatgtgacataaatattaaaattatcgatataatatattggctaatcagtatttttgtccctgaactttgacatgtaccaaatcatgcccctgaacttttaagaacattgaaaatgcccctgaactattgagattgttggatttaaggacttttgtctaattttattcaattttactatttcaatgattgtttatgtactaaaccatgtttcccagactttgatatctaccaaattatgcccttcgaactttgacatgtactaaattatgcccctgaactttcatctatgttagactttttactaaaattagaaaaaagtccttaaatccaacaatctcaatagttaggggcattttcaatgaccttaaaagttcagtggatatgatttggtacatgtcaaagttcaaagttcaggggcaaaaattttaattagcctaatatatatagagagattctaatgtatttgaaatcaaataccaacctcaccatcaaacccaaaatgatctaaatctataaaagtgttgttactaaaaatatattatcgaaagtgctgccaattatcaattatgcattgacaaaaaaagaagggtggagtttgacttcttttgcgcgtaattaataattactaaccttaactttgttaatggggtaacaaaaaatacacaaaaactgaaatcaaataaagaaagggaatcaataatttataaatataacaaaataaatggggaagaagaaaatttctgaagaggagagattttagaaagatacattttgattatgcatttgactcttagcattatatttacttattttgttctccattttcatcatttcatgcaaagatgctaccatatatttgattcgaatgagtgaattagaaaaaacgagaaccaaaagtttgtattatatatattattatttgattttcgtataaggtcataacaagtggacaagattacattatttggtaaggaatcgatatatttatacatcaattaaagttttaagtggcccagcttgtgactttcacaattaaagtgatgaggtctgacatatatataaaatatttatatgccaatggcaaattgtacttggatggttcacaagtaaaaatcctttaaaggggaaaaggataaaagaataaaaacacaacagttgaaaacattggagttttgtatgtttattagacacaacagtaaaatgtaaaacaactactgttatgaaatatggaaacacgtacgtcgttgctttaatttgtaatttgtaattgtgagttttattctctctgcatctttctttatcttttaatgttcttttgtttattctattgttctttttaaatcgtaaaatattatcactaaagggatacaaattaacaccggctaaggacaagagtaaatattttgaataatgtcacttcaaaattaacaccataaataaataaaaataccaagtaataaagggatacactatgaaaggccttttgaaacccactttaggctttaatattcttcaatatagggcccaatcttcacagaggcaagcaactgcaagcgtgacccaaatctacagaatcaaggatcactaaggttgccttgggccggagttcattaatggaacaaaataaaagaaattgcaccccatacccaatttcattacctccttttatttttacctttcattatatattattcaatttatatctacttttataagtaaaatcccaattgtacccttaagtatggaagaaactgttaggttttatgtcctaaataaaactctatttcaatgtaatctattt

SEQ ID NO: 380272 - DNA, 2720 bp, Cannabis indica
tttttttttttgatgcaaataaaatttgctttaaagttagaagaccccacacatttaattaaattagtacaattttcaattcgagatcatgttaccaatagcatcacgcaatagttgttgagccccaaataattgtaaaatctcagctcaaacttcttttttgccatttttttgaggtttgacttttgaggcaaacaacattaaaacccatgtcgtggaaatcgctgtgcattcaaattgctaaaatgtattatttgtacttttttttaatggaaaattatcattttattaaccaataacttcagctaccaaagaaggtagcaaattaaccgggacagaactcaaattgaaattacaatcagaatagaataaagaagctctcacaaagttatgagctaccttattactgatcggctaataaatagaaacatttttaagttcttttaataaagccttataattattaaccacttgaccaatcatgaaaatcatttcaattgaactacgcaagacttggataaatactaagcagttggtttcgaggatagcatgacatggttggtttcttttgatccaacttaaagcttcctttacaccaaatgcttccacaaattctggtgtggccgagccattaaaaagcttggtaactccttcaatgaaaagtccttgtgcattacaaatgacaaaaccaattccaaattgagtcgtgttggcaaatatagcaacatcgacattaaccttaatgctatctccatgctgccactgctcagctccgtcacttggaataaaaccaggactcgggaaaatggcattagaactacgagcagttagccattgattaaggtaagatgtagccgaaaacactatactttccacacttgacgttttgttgttccaaaccttatcattccttgcattccatattgaccaacaaagagcaaccaaaagctttttctgatctgcatcacacaccagaaatttcgaagcacaccagtcaaaaaatctctcctgctgcggtgctactgtaccgatcccgactctgttccagcagagtgcagtagttgggcagccaacaagagtatggtagatcgactcttcctggccattgcaaacagggcacaacatagacacatccacacgctttgttcttaattgactcatggttggaagagagccttaacaagctctccacaccaaatttttcattttcggaggtagttttaaagcccaaaacttcttccagaaattttcgacagcagtagcatcttgatcatcttccccattaatttcttgaacaagtttataggcactctttactgtatacaacccagaaatctcaccattccatgtaatgttgtctcgaccgtgaccacgaagcataggaatagcaagtatcaggttttgatcccgctgaacaaacaaatcagcaattatatcttcatcccatcccaacccatcaatggtcattaaattgcaaactttagcacctataagggctggatgtgaagatgtaacaaacagattttgagtgtcaggtaaccaaggctccccaagaaccgagatagaattgccatctccaatagaccaacaaacaccatgagttagaaattgacgagcttcaagaacactacgccaaacatagctggggttattaccaatatcagcagtgaaaaaagtaccacgtgggtaataccttactttaaaaattctcgaaacaagcgtatcaggttttgtaaggagtcgccaaccttgcttacccaaaagcgccaaaataaaacttctcaaattccgaaagcccattccacctttagatttatatttacacaactttttccaagacatctaatgaatacctttaggagagttgttcgaagattgccaccagaacttggacatcaagccttcaatatctcttgtaacctcttgcgggatcaagaacacactcatggcatagcttgggagtgcttgtgcaaccgttttaatcaatatctccttaccagcccttgaaagaaactttgtaccatatcccaagagtctattcttcaccttgtttttcaaaaaggccagagcagcagatttatttcttcccatagagctaggcaaccccaagtataaacttccttcagtagccgtggtcatacccaaaatggtattgattctatctttcatggcatccaacgtgttagtactataaaagatagaagatttagagaagttaactttttaacccgaggcaagttcaaacttggataacacttcctgaatctgacgggcctcaatttcagtagccttgcagtatagataactatcatccgcaaaaagtatatgggacacctttggagcaccattagccactttgcacccatgaagccatcctttttgttcatatttccgcggtaaagctgtgaaaccttcagcccaaagaataaataggtacggcgatagtggatcaccctgtcttatacctcttgtggggatgattggaccaacttcattattgctacgcgtaacacaatatctggcagatttaacacatttcataacaagcagaatccaattctcaacaaagcctagctttcgaagcattgtctcaagaaagtcccattcaattcgatcgtacgctttactcatgtccagttttaatcccattcaattacttagtattctcattggtgttataatgttattgatgcaatttgaatcttatataattttaaaaa

SEQ ID NO: 380273 - DNA, 2618 bp, Cannabis indica
ttaactttaatttacttaaatttaagcttaattttgcatcgacccaagaaaaatatgtactgttactactgtatactaaaaaaatttattaaaaggtgattatttaatttttacctaaaaaaaaaaaggtaaatatttttttgtttgaatttgtgtggcaattttaataaatatatttattcttcttaaacaagtcttctcatttgtctcgttatcatgcaattagtaatatatatatatattttttttaatataatttgattagttaacaagtaaacgtaaagaaagattatattatactacgaaaagggttaaagctttgtttggtgtgattggtttatcatgttcttagacagggaggggttggggaagatattgcgtggtccacccttaattgattaaacaagactgatcagagcttgtccttcaatctatcgacaaaatcatacccaaaaaaaattgattaaagcaagtggggtttgtcttttggtcaatataattatacatatttgtatatacttttgcagatattcctacacattcccatttcttgacaccaaaggaatagttaatttggatgatgagagagtgggtcctctttttgagcataccttccctccctcacttgctccttctctctcctttataggcattcctaaaaaggtacaaccttttccttctctatctgcctctctccttatgaggtttatttccccaaagaactctaatatgttcaaattttgtgacttattaagggctacaactattgtttaaggataggaatattcaattgtataaaaatagaagttgaggacctaaatgtaaaaacaaacaaaaatgaatgttgagttaatttgaatacgtagtatcatttaatagtaattactaattgtagtgtttttatatgtatgcagataattggttttcctttctttgaatctcaagcgaaatggatagcacaactgttgtctggaaaaagaagattgccatcatgggatgatatgatgcaatccatcgaggaattttatcgctcaagggaacttgctggtattccaaagccaaatactcatgatattgcagattttgaggtatatctttatattacatcaccacatcacctcactacctttgttttttgttgagtgtagaatacaactactattatatataattaattaatttttattagtacaattaatgcaccgttgatatctacactttatcacatatgcttgacttcacttcttctagtgatcttattattaattgaccccaaaaaaacgtaggaagcatttgaatgttattttcacaaatctattcgaccttgaaaaaatacttttgttatctagcattttctactttatggtctaaattaatatattatttataatcaaaatgttagacaattatatatattgcaagaaatgaaaacatcatatttattaaaatggaacaagtaaaccccaccaaattaattaacaccatgaacaattttttctttaaatacttaagagtgcagtagaggttgtgtgactcgattaactttgttgtggactaatttgatgattataattgaaatagtaatcacgagtatgaatatatatatatatataaaatatatatactagtttataattaaagtgaattgaatgatatatagcttgcattctaagctggaaaatccttttatttgcagtattgtgacagatatggagactatgttggatttccacacttagaagaatggaaaaaacagctatgcatatcatccttacaaaattatcaatccaacttagagacttacagggattcatatgatcaagatcaagagctgcttaaggaggcttttcaaagtccacatttcactcagtttcttgcagatcaccctcaacttcttgctctctgaagattttatagtgatattttttatttggttaattattatgaatactatttttgcttcaagaaaacattttcctactttttgtacctttctcaaggaagttggattttgggctatgggtttgttagtagactatatattaggaccattggcttaaatagaatattgcagcaaaagctagaaggcaatacatttagcatttgcttattctcttcaagaacgacgaagaaagaaaaagaaaaaaggtccaagtttcctatatctaaaaagggccaaacctctatatgtttgttataagaaattaaaataaatctactgtgatgtgtttgagatttgattaaatgtagtcaatggaatgatttaaattttatgtatgtgagctaatatccaagtaccgaaatattataaattggttatatatattataaattatttattttatccaagtaccctaatctcataaataaacacctataaattcataatgtggtttcaatttacataaaataatgagtcaattggtgacaatatactagtgggtaatgtgatctatcttttactatatgaaaattagcgtatttaagattcagttcttgtccaactgttaatgataacagcaattatattattatatttcatttattaattattaagacaattatgaatagttggtaagatttaacatagtagctggtttgcccgagaggttaagggg

SEQ ID NO: 380274 - DNA, 4987 bp, Cannabis indica
ttttaagtggtcaaacctcaacactaaggcataatactctccaagtgagctgagaagtctagatgtctccaatttatcggtcacttgtctaaaacgtagcttatggccgaatgaaaacgtaaagtgtatacaacggttgtacataaagagggtaattacattaaattttaaacaaagcttatgggatctcatcaaggttgtgaacctctgcctatttgtagtaccgacataagtggtctacattcttggtgtgagcgaccctcgatccgtccatcctcttaaggtgaaaagttccttggcccaccttttcaagtatttcgtaagggccttccaagtttggtccaagtactctcacccccagttcctgcgaagcagggaatattctcctcaagacaagatctctaacgtcaaatgtacgacttttgaccttggaattgatgtgtcgagcaattttgccttggtacatcttgagttggacctgtgacttttccttcagttcttcgattaagtccaacgattcctggagcaaggaatggttccaggaagggtcataagtatcttgtcgatgagaggggactgtggtttcaaccgggatcactgcttcacacccataggccattgtgtatggcatgtgtctagttgaagttctctctatagtccgataggccccagcgaactcagggaggttctttcggccagtgaattttataagcttggagtttcttcttcaacgtagttttcaggactttgttcacagctttcacctacccactggccagcggttgggctacagttgagaagcttttcacgaatttatgttgggcacagaagtcggtgaaatgcttactataaaactgtttctcgttatttgagacaattttatatggatgtccgtactgacacacaatatttttaataacaaaatctagggtctttttagaggtgacagtgttaattggttctgcctcaaaccactcggtgaagttatcaactgcgactattgcatatttgactcctcctttccctgtggggagggatcctactaggtcaattccccaaactgcaaaaggccataggctactcataagcattatctcactgggtagtgctctcggaaccttagagtatctttggcattgctcacacttctttacatatactatgcaatccttcttcattgttggtcaaaagtacccctggcaaaggattttcttagaaagactgggctctgaagtgtgatcttggcaaaaacttccatgaaccttatggattacttattcagtgatggctcttcccattaggtgtctggtgcatatcttccggatcgtcgagaatcaaaggatgaaatcttataagttatctagattaatcctctcagttaatacatcttttctcatgatcatgttacgtgtctttcgtctgaaaaacgtgtggataacaatagtcatttaatattttattaagaatataaaaaaaattattattgtttattcttttattatttatataatagtaatatggtaaataaaaaatgtaaagtttagtaaaagtcaataaaccacaatatctagtggcattataataaatataaaattagtatttattgttggctaaatttaacatagaattattttttgtgcaaagtgccataatttttattatgtgtcaaatttaataaactttttagaatatcattatgaaatattttttttaatgatgtgtacgtcaaaatacctattgattcataacattgcaagcaatatatatagtcatggttttttattgaatttaatgtgcattcctctagtaatgtaaacacccgtatttgtgagtatgattgctgattgtgttagttgtgaccctttgtttacttgatctaatagtaatgacctgcttcacctcattattaaggatgatactgcaattggaaaagtttgaaagtgacatctgtaaattaattaagcacataattgctagttagtacatactgactttttataaaaaaatatataatgataaatacatctggccttcctttaatcataatttaatactgaatttttccccagaaaacaattaattatatataactaatatatgcatgcattagcatatgcatatatgcatattcgtgtagtttattatcacaccgatacctgcataggatctagcatagaatagaataatatcgtaaggtagtaccaacaaacgacaagttaatcaacaaggcataaaaaaaatcagatttgagaatagtgacaagatgttgataggaaatcttctcttttgttataatttaggagaagatatataaagtttcattataaaattaattagttgttagaggagtaattcatttattataaatatgctattttatttttatacattataataatatgagactaactcttatacactctcctcacgtttcgagttagaaagtgtgagtataacgaacgatctttaagagaccacaatcacatttaaaagaatcctacaaggtcaactccaaaaatttgtaggtgtacacgtcaatttttttttagatttttgaaacaagtcaaagactccaccactgaaaactaacacacattggctaaaagatctcaaatgaaggttaaatgcataggagaagcggtagttttttgtttggctcttcttttttgggctgacgataatttaggttcacaatagatcttctcttttatggctagtattttttgatcggcgacacttcaggcttacaatgaattacaaacagctctgatacgatgttagaatttaaaataagatgtgtaagattttatttcaaaattaattgacaatcaaaaaaataacacattcatagttttacaaattaacaatgtgggtgtaactttaatatatttattttaatttttcttatatatattgaaaaaaaaaaaaaaaaataatgagatttgattaacttagagtaatttgatgtaaaaatgcagtgttcaatactattgtcgtttagtgagtaccataggtcaaatctgttgtcgtttagtgaatactattgattagcccctaatatgccccggacacggacctaacgtaaccttagtgataattaagttatgaataataatgcacgattggacattactagttggtacaagattatttatgagctaacaacatctttataattacatgtatatttatataaatttttgtataattaatttgaacttttatgtggtttgtaataattagtaatcacaaagaaaagtaagttttgcctctacggtaaatttttgccgacgagtaaatttgctgccagcaaaagttgctggcaatacttagttgagaaagtcgtttttgcatgccaacgaacaactgtatttcgccggtgaaagtcgcatctaccatcgacaaaattcattggtgaaacattgaggcactgacagagcctcatcgagaaagttttgccaactagaaatgtcgtcaacaaaacattttcgacgtatttcttcatttatgggaaagttttgtcggtacatgtaactttgttggcaagacattttttttaagtagttttaccaacactatataatcctccagtaaatttattttgtacttttttaatataatgaaatatatatgtaatttgaatgtaaattaaaattaaatttaaaatttaaaatttcataaataataattcaaaataatgcactaacataatttcgacagtatattatagttacactaaatttatgtaaacattatagaaaaaattaaaaagtggttgtcatagtttatgaaaaatactaaaatttacactgaaaatactataataataatcacactttcaacgacatcatcgtcatcatcgttgttctgggtgggaggggtgacgtgtgatgaagatccagtgcaatgatgacatattggttgaatcagggacagctcgggcatgttgaagacaggaacgatgctagagaaatacctgtactggtcctagaacttactttgattttgatttagagtctgcatcctttgttgatgataattattacattcttctgctcttctgtccttcgtttcagcgcctcgtaatcttggacgttgactgtagcctacctggatggacttgcatgccctagaagtttcccttttggccaagctctaagtctgagcaaaggtccaatgcctctcaagtgacatgaccgctcactaagaacctatcataaaaagcaggtctatagaaaattgggtgagatctacattgtacttacaagggacatcacttggcataggttgaggtttgtgtctgtcaagcttactaattaattgtttaaattcaattgaaattaaatataaaatgctagaaaaaaatttctagtgttctctctgaagaacaaagtgcctatttttcttctcgtttgattactgataacgattttattaagctagactgtattaatgccatgaaaaagaaatctagtggtacaaggtaatgtgaaattgaacttgatatgtccaaagaatatgatcggatagaatggtattttatggctaagattatggataagttggggtttcaggcttattggatagatatgttgttgactgtatatctgtagtggagtactctaatctttttagtggaagaattggtggttctattcatcctaagaggggcattagacaatgttatccaatgtctccttttttttcttgttatgtgccaaaggtttgactgtattggttaagaaagattatgctaataactatctttgtggcatttcttatgggactatggggccaattatttctcactaactttttgtaaatgatagttttttttctttatagttttggtagtgttgcccctgattttgcccaatatacgtggacccaccggacaaggacacgtggatcaaacagcttaatattcgaattatttgctaagtctttaagtaataaggcagcatccggaacatgcctcccggagaag

SEQ ID NO: 380275 - DNA, 2915 bp, Cannabis indica
ggattatgggagagatcaaaggagaccttggaaggagggcatgatctgtaggtatattgagaaaaagtacaaaatagaatgtccaattaataatttttacaaaacacatggtacaaaataatatttaccatatatatatacaaatatattaaatcaaagattatttacctcttgacaatcaagtatgctcgctgaaaaataatatatttcttaattttttttatgtttgtatctaagaatagtaatgaaactcacatcagatcttccatatcaattaatattactaaacaaaaggatcaatgtgggttgatagaaaatacaatataaagtgttcttggtttttctcatcacacgagcaagagttatttccagagagaaaatgagaaaaatgttaattgttttttttagatttcctaaatatatctttcctttgggtatgaaaatattattacagaaaatagaaaaccagagaaaatgaaaaaacagaaaaaagaagaagaagagaatgaaatagaattccttaattgatgatagaacaagagtgagccttatatagtgctcaagctcaaaggagtacaagagagttagttaacaattgttacaaacaagcaatgcaactaacataactaactacaactaataattcctaactaaaaataactgtcaaaacagaaacatttgataacagcttgtagaaaatgagacaaacttcaatactctccctcaagatggagagaaaatactaattaaacccatcttgtctttgagaccattgaattgagtgggaaaagggactttgtaaatatgtctgcaagctggtctttagaggcaacatgactggtcttaatcactccttcttgcactttttgtctaaccaaatgacaatcaatctctatatattttgtcctttcgtgaaaaacaaggttggcatgtgttgtgcagccttattatcacaaaataaccaagctggacccttgtgatcaacctttaattctttaagaacagacaatagccaaaccatctcacatggggtattagacatagctcaatactcagcctcaactgaagatcgagacaccacatgttgctttttgctcttccaggatatcaaggaatctccaagaaatatacagaagcccgtagttgatcttctggtgtcaatgcaagccaccccaattagcatcggtataggctcttaactgaatttcagaggcagcagggaagaacagtccctgtccagggcaatatttgatgtactgaaggactctttcagcagccttcatatatcgagcctttggattaaccaagaactggctcaattattgacagagaaggagatttttggcatggtaatggtcagatattgcaacttccctatcatccttctatagagcttagggtcagttggcctatccttttcatcttggctcagttttatattagcttccataggagtgctcatgggtttgcaccctaagtgtccaaggtcttccaatagctgtaaggcataatgcctttgagatatgacaattcctttaggagacctagcaacttctaaaccaagaaaatacttgagattactaagatccttcaattaaaacttgctgtttaggtatttcttgagtgtctctatttcagaaagatcattaccagccaaaattacatcatccacatagattagaggaatgatgaaactgtctccattgtgtctcatgaacaaggaatggtctgtggcagagtgatgaaacccaatttcaattaaaacactagaaaacttggcaaaccattgtcttgaggcttattttaatccatagatggatttttgatgcttgcatacaacatttggtggaagcttccccttaagactatacacaggaggtaaagtcatatatacttcttcatgaagatcactatgtaagaaagcattattaacatcaagttgatgtaaatgccatccctttgatgcggcaagagcaagaacaagaacaagtttgacagtgactaatttggtgacaggggaaaaagtatctgtgtaatcaacaccttcttgttgattgtatcccttggccactaatcttgtcttgaatcttttcacagatgcatcagcattaagttttattttgtaaaccaatctacaaccaatagcatggtgtccagcaggtaatgttacaacaatccaagtgtgatttttctcaagggcatctatctcactatccacgttatcccactcaggaatgcctttggcttgattgaaaaatttaggttcataatggcaaaaatagccaaaatggctactcgaaatgcaggagacaacctgctgtaattaataacttgagaaataggataaggagtgacttttgaatcctgcaacatatcaacagaattattttgtgcaagggaacaatgatagtcctgcaagtaagaaggcttgttagtaattctgataggtttgctgctattggaaacctattcagacttattggtattctattgtctcaagatggttatgcaatcatcactttgctggttgttattaggaggcatatcagccactgtatcacaaaaaaaattatgatattcatcagtcaaaaaaggaaaaatggtttcatggaagtgcacatctctagaacaaaaaattgtactggaatttagatttaacaacttgtaggctttcatgccaataggatagcctaagaaaatacaaggagcaacatgtggggagaatttagatctatcaacatacaatgtagaagcataggctaaacatccaaaggctcttaagtgtgtatagtttggtggtttagatttgagcacttgaaaagagaaaatatgttttaaattgggtttatgagtcctattaataagataggtgttggaagttattttaccaggaacttagatctactcacaagtat

SEQ ID NO: 380276 - DNA, 3612 bp, Cannabis indica
gttttcctttttctgctgctatttgcagcccttcccgtgttctgtgctcttgtgttctcgttgtggcctctaacaggcctctaatacaaaaaaaaaaaaaaaaaaaaaaagtcatctcaaaaatgatatttttattataataaaaaaattaaaatcatttttatataaccttaacatacataaattgattttttttattggtcatgtagattattgagtttagtgctagtgagaataagttacttaacatttacgaacatgctgaagaatatgcaacacttattatggaagagctagaccccaacaaaattggcaaaattgaggtacacccacacaacgcatgttacattttgcaatttaaatgcaaaaccgccaaaataaccatgaattaacattgatgaaattatatttcaaacagttgaagaaattggaagatctatttcatcgaagcatggcgccgagctcaaggaaggtcaaagagaagttagtcgagacaactgtagagtccaacaccataaaccgataccacaaacgggtcaaacacctcgtaaacaacatccggagacataattggattttagaggaaaattggagacgtatttgggtgatggggttgtggctggccatttgtgcatgcctttttacgtggaagttcattcagtacagaaatcgagctgtgtttgaagtgatgggctattgtgttaccactgctaagggtgctgccgagactctcaagttcaacatggctctaattctcttacctgtttgtagaaataccataactttgatcaggaccgagacaaagttgggagcactcattcccttcaatgacaatattgagtttcacacggtataacatatattgtgagatttactatactacaatgttgcccatttcttttaaattcatgatatatatatttatgattggtatcttaggtaatcgctggtgggattgcaattggagttggtgtacatgcattggcacatttaacttgtgattttccaaggctgctgcatgcaacagatgaggaataccagccaatggcgcaattctttgggaaagaacgacccaacaactactggtggttcttgaagggcacagaagggtggaccggtttggttatggtggtcttaatggctataactttcaccttagcacaatcctggttccgtaaaaataaatcaaaactacccaaggccctaaggttatggtactctcaccacttgtttgtcattgtttacgtcctctttctcgttcacggttattatctctacttcattgacaagtggtacaaaaagactgtaagttagtctcaaccaactaactattttaatattcttcttcttttataattatctaaaatctcaattcaattttttattaattataatattgttgttgtagacatggatgtatgtgcttgttccaatccttttgtatgtctgtgaacgttcaattcgcgcatttaggtatgggttccaagcagttaaaattctaaaggtgcgtaacttaattacactgatttctttcctccatgggatgtatacatgcatataaggtaatactaataataataaaataatactacttgttttcaatgttcagtttaaagtgtatcctgaaaatgttctagccttgcaaatgttgaaacctagaggatttgaatacagtagtggacaatacatatacttgaattgttcggctatatctccttttgaatggtaactatatatatagctagtgtattttgattaatttaaacctagctatattcttattggtctaattattaaaatctctatatataaatttaataaaattaggcatcctttttcacttacttcggctcctgatgacgattacttgagtgtccatattcgcggattgggtgactggacaaaagagcaattccactttctcaaaagttagtacctatttttctacatgtaactgactttcttaagtcttggttaatatttatattttctgcccaacatatgaatttagaaaaaaaaaatcatacacttcaacttagtgtttgaacactattcacaaaagtttaaatattcctaatcatttgcatatttattacagttacctgatataaacttacctccaatatctagtaatcaaagtatcgttgatgggcaagtcaataaaattccaaggtattactttagctatattttcaaaacattttcatccattcattgactaccaatcaaattattaataatacttctctctttctccaaacaattatgttgggataatataaggctcctaatcgatggggcgtatggtgcgccagcgcaagactataaacagtacaaagttatccttctcataggaggtggaattggagtgactcctcttatgagcattgtaaaagatgtgcttaataacaggaagcaatacaaagaggacgaaaaagacttagagaaaggaattaataattgcaataataaaaagaagaagagaaagccatttgccacgaaacaagtctacttctactggagcactcgggatgaagggtcgttcaagtggttcaaggaggtgatggatgaaatcactcagaacgggaatgatggtgttattgaggtccacaactactgcactagtgtttatgaagaaggagatgctcgctctgcttttatctctatgcttcaaactctttatcacgccaaaaataatggacttgatattgtgtcaaacacagcagttaaaaccaatttcggaagaccaaagtggtataatgctttcaagaacgtagcagcaaaacacgccaaccaacaaattggtaagtatttctctaccaacaatctaatatacaattacacttattatcctctgtttttttttttggtcttttttatattggatattgtggagggattcaaaattaaaatctcctcgcagaaatgtagtatcatttccttttctttgtctttagtttgttgtttgagtgttgttaactgagtttatcacaacattaattgggatgaaggaaaacataaatgaaaagaacgaaaaatgatgagagaatgatacaagaaatggggattattagaatttggtacacatttctacacaatttagtttagaaatttctatacacctgtagaaatatcatctaagaacttaagagaattctagattagattaagtcaagaatatactagttatgttgaactctagaaacatttagatttatttgaatataattccttctagtagaagaaggatctaaaagaaataattctaatcataaagtgtaaagggtgagcaactataaataaccccttcaagggtttcaaattgtaaccaacatccaaactattaataaagcttactacattttcatacaaccctctctgctaagccaaaacaattctcatatactaaatcaacaagtactcatcaacatcactacttcaattaccataacaaccattaaacacttattcctcatatccacctattcaaatctaaaccaatacaaatttattctcaaaacatcagtggtcactacaagaaatgtaacttttaccagcacagttcgctactgcgctggtaaaagtaaagtaacttttaccagcgcatttcgc

SEQ ID NO: 380277 - DNA, 1658 bp, Cannabis indica
atatttaaaatttcgtaaaacttaatttttgtaatttttttactgttattgtgtatttatgaaataatacctattttaaatgtattattttcaaattaatttttttcctgcatattcaatttaaggcaagagcatactatataatattatgaaattaacatttaacaaaaaaaaaatcatacacactaatttatatatataaagtacacagtatcagtatccactatcaatatgaggactagttaagttgaaaattacaagcatatcatattgtaaacttttaattatcttgtcctttcttctaagttttatcttagtatcaacattaatcatgtttattgacctttaatcttttttatgggatttttatttgttataatttaattagtatatgtaatcagtcaaaactcccatatgaatgaaaacataagcaaaaatgcatccacatcaagtcttatttgaacatcaataggttttaactttgggctaggagatattgtatttctttcttagtaggcttttattattttatttatgtctatgcttgtaataaactatatctttattatcattaaatataatttctattcacctttttttcattttctctttaaaatatatatatatttataggtctatatataccaatcatagtcttacctttggaaaatgaccaaatccaaaaccatgtgatatgataatgttattaaccccttttcttttcatatgattttcattgctaattcatatccatgtagtggagacaaaaccttatcatttcacataaagtgatatttacaaattaattagggtccatagatatctccatattaattaatactaattttttttgttttgtttaaataataataataattccttggtcagcaagtaataatgaacatttgaacccacataaaaaaccatccctaaccataaaactaacaacacttatcctaaagcaccttccacttatatatataataatcatcattaattaggtgccctttgtcattatacagtttggataatcatatcccacttttcaattaatataattgaggatttttgtccaagcttttacatataaatatatatatatatggcttattgatatttcatattcatttaggggccacaactttggactctacattaattcttaacatgactgatttctatatttttcttctaaaaagattttttttttttttttttgagaatataaaaaggattataattaatttgattatatgaggtagaaacttgagtaagaagtaaactatatgaaaattaattggtaatttaaaaattctagattttaattctcaaggttacctagctagcccgattcgaaggtttttataataagttcacacactacttttgcgtgttgttggctttatagtttaagtggcttttctctatagcttgcttatttattcaagggttactcttattaaccattaaatactcaagatctaacaactttttttttaaaaaaaaaactttatttattaaaacttatagaaaatttacaaaaatactgaaatttaagctaactattacaaagatattgtcacacgtaaatattttcaaaaatattgtgtttttataaaacaccagtaaaacacaaagcagaacaactcaaaacaata

SEQ ID NO: 380278 - DNA, 3601 bp, Cannabis indica
ttttcattagcctaaggttcatgtaatgctaattcgagcaagtgttcacttaccggtcccttgttgccagttaacctccgaattgatggagcccttgccatagatgaagctgctgcagctgcagccacacggattctgcaagaattgaagggaaaaaatcacattaaaagggccataaatatcgacttagctttactaaagcttttcaactcgacaaaccttttatgcacatcaacaaattcatctgtttcatcaacaatctcttcctgtaaaggtttaaaaaaatcatcagtttgttatatctacaggacaatagccatgaactgaaaggagagacatcactagccttaaattacctgcagaagttcttcgaaaacatcttccaaggtaataattccaataacttcaccatcttctatgtcctcagacaaacgaggcaaaccaatacttgttgtatcattacggaaagaagattccttgtttaaaatgttagtccttggagtcttgtcgatttcaacgacaaaattgtctgatttcttgtcgtgcttgagaagcaaaggagtagtgagtttagagtcaccacttgtaaaattgctgtcatcatctttctccccgtcaattgtaggaagcttgctttttcctttagtcttcaccacagctgccatatgactgctgcccttctgaaactcgttcaatatatcatacagtggcatatcggcaggaactctgagtatacatacaacatacaaaatacgaatcaacactagatactctggatgaatatgtattttctgacaaataaagaattagtaaatgaagaattaagaaaaccgtggtattctccggatagaaacagcactgactggagtctcggtttcaggtcgtacagtaagaagacttttcacctaacaataaacaaaattgaacaagtcaaagagcaaaatagaaaatatgttgcccgctgtcaattcccttgctaagtcaaatttaaagtgcatgtagtatacaaacatctactaaacattcacattctactattctagcacccaccagaagcagtccaattacgttctttggattcccagaatagacaggaactcgactatgccctcgagcaagaatttttcccatagcttccctggtttatagagtaaaaaagggatgaaaaatgagaaatacagcgaatagagtaattttttctactacaaacttctgctaagtgaacagaaaataactgtggtaaggaaacacatcaagttatcaggggattcatacattcctaaaatttcaattgcagtataagacatgtttcagtaaaacacgcgtcattagatatgccagagcactgtacgcaaaaataaaagtacagtatcctaagtaaaactttatgtaaaaaggtgacagatatatagactactgacaagccagcagctaatggagatagtgttctcaagatgataggctatcttttagaagggaacctgtcagacaaccgactgaccaccccagctagaggactagctgagaacgatcctctacagccgtgataatccgaagatgatctagccgtaaatcactcttatcggacggtcacgattcatccaccaggtttggtttcctatctccttagaactcaaggaaacagaggtacaagccgaagatgatggttatcacaactaaattatcctttcttttatagcaatctatcattagactatgacaacgaaactttttattagcccgacattgactttcaagagggggtgattagaagtttaaactttttcaaatattataaacccaaactatctatttatgcaaataatgaaactaaagcaaataaatagatgaacaaatgtaaaatcaaagtagatacttgaagtgaaatgaattaagtggtagcaatatcaaattctcgattttagaaagttcaatgaaactaaagtcatctacgaccttggtcttcaaagttagaacgatcttcgaattccactaatgaattatggacttgaccaatcctttcgtacaatcagtaactttcaccaaggtctaccaaaccttatacaatagttttttcaagaattgtcaacctcacttggattgttgaattgctattttcacctattttgagctgtttgaaataacggcgccaacctcaccttaatacaaagaaagaatttattgaaggtgcgaaaaatacagcaaactctctcttgatttacaaaatacaatgtaagaaccaagtgagaaattcacaaactcgagaaaaatcaattttggctcaagatatgggaaaatagttttcaacaaagttctttgaataaaatggttagagcattttgatagcaatatcagcaattctagaataatcaaggatgtttcaaacatttaagattggtctacttataaagaaaatgactgtttgaagaattaaattgctctctacatgagtcaggtgcagtcggttgaccaactaatatagccgttgcaagcgcacttggtaaagaaagtgtgcccctctttttaacacgcgtcagcctgcacaatttctgggaaaaggctttttaccgttgacgtttatgatttggtaattagcactaagagtggctaggaagtggaaggagcatcatgaggattatcaaaaaccaaagtggaagtggaacaacactaagattaggaacaacacgtatctagagagccccatgagcttacgtgttccttatacgtattgaggaagtggagagtaagctcatgagtcatgatgctccttatacatgttcttaagaatatgtaaggtcaaagtgttcttccttaataagtatacgtatttagtgtaaggccaaaatgttgttcctaatcttcaaggagaatcatggggtttctaggggtttagagtggaagtggaagtgtaaggtcaattttatttttgagatatgtaaggtcagagtgttgttcctaaattctgaatacatcaaatctcaaatgtattaatgtatacactgaaaaccaaaagtgacaaaatcttaatgtatttttggttcaccatttttatgattaagtgtattgaatatatattgtacacagaaaaaaaaaaggaaaactttctcctacatacatatatgtaatcaagaaaacattcttgataacattcagatggaacaatataatgttatatacatatatatatatatatatgtatactcaaatcaacatgcttaagcacatttcagtaattgaatttgagactgtcggtttaccttgtttatatctagagttcaaagtctaatttggttgagaaagttaaattcaaaatctaggcacaatattatatgtaagaaaatgatggatacccttccttagtttcatgaatggtgaggtcctttcaaagtggcttcaacttttttttttttttgaaagaatttgaagtggctttaactgaaaagcttgattgatgcatattccagagcaaacaccttggagtgagaaattccccaaagcttgttcatgaggataaaaaatagcgcccaacatcaaaccatgtgggaatactttcaatgttttggaccccctccataatttttatgtttttgtttttgttttt

SEQ ID NO: 380279 - DNA, 1213 bp, Cannabis indica
aaaaaactaacgaaaaattaaccttacaacaattataaattaattataaataaactataaaattaaccaaaaataatgaaagatactcaaacatagtatttacactgttttatgattttaatatttacacaaatatggtttcctctacacaacttaccatgtttttataattgctacacaaaaaaaatatatagctataagtggtaaaaaaatgtcaaagatacatgtgcataatagttccattttttagatcatgaatagtaaatataagtgtaaaagtaaataaatgtaatataatataatataataatgtattataaatacattatttaaatgttatataaaaaatatagaaaagctgatgtgtagttattgcttacattgcacttttttttcttggtaaatcagatttggcatattaatctcaacaaaacaattttacaagacaaatatattacttacaaagttttaattaaagcttccactcactttttatcttttttactcaaattttttagattcttattgtctaatctattacaaacatcttttaaacttatagaagtaataattacttacacttacttgcttcaactaagtagttaactaataaggattgacagcaaaactatttgaaatatactgtttttatttgtaatacttaaccccacaaattaatttttttagtaataaaaccttcctaacttcccttttgttatgttatttagtatatacactttttctaaaatgccaagatagactgctcaaatgtatacttaacagaatttaagtggtccactcaatattaattattttaatattatataaataaaataaactaaaatttgaaataaataaattaaaaatattttttttcttcttcttccttccatggtagttacaccgccctcacctccaaaaccaccaccattaacaccaccaacgtcacacaaccactatcattattaccaccattactactaccattatcaccaccacactattattatcacccaccaccaatattttccctaaataaataaataaaacagatccaaatttattattttttttattaactgagcgagaatcatgagagagggagaaggagagaggttttggggtagggatgcatattttcccacgggcagggccgaccaaagcattgggcagcctgggccattgcacaaggtccccatttttttaaggccca

SEQ ID NO: 380280 - DNA, 2920 bp, Cannabis indica
ttttaattgggcccgaagcccatacacaaacattaaatcattttgcttcagtgaaaatagtcgcaaactttttaacctctattttacaactgaagctaaaaaaaattgcatcttttttccaccaaagcaaaatgtaaaagacaatttttgattttttttcacttttttcttcagttcctcttttagcatcattgtagtagctaacgctaattgttttcttttagcttcgattatcctctgaagcataaaatctatgcctattttttacctcggtcaaccattttggtgtgacacgttgaccaacgcaatttgtacattttgtagtagtggccactaccacaatgtcctgctgtggtaggggtttcgacctctgcagcatctcttgttgctcattgccagcatttgccagctgcctcttgaacctaactgtggtagtctgcaaacttcgtctagtctacgagcgttttggtaagcctttaacactgccaacaacaaagacaaggggtttgaaacatcagccagagtgaagttggtagttggtgggagagccaggttaggactggtagtcatcgagggaacattcattccgctggttgtggggatgttgagcttctagagctaagagtggaatgttgtctaagggatgcagagcatgagatggaccctcccgagggcacaatcatcaaatcagtaaaagatgaattgtttaagtgggcttatggaggaatggtgacattggggtgagtgaataactcagcattgctttatgggggttcgggcaaaaatataaaggccaatagtgctagattggtcctcctcatggaggaaagaggaatccggttggtagattggtccctaaagggtagaggagctagtgatgttcgcttgattttggtttgggatttgtatgagttgggtagggggagtttgcatgtaagggaaacaggattagttgtaaataggcaatagaccaaagggaccatggttaggacgggcagtcccactcatgacattttcataaggtaggggtggggcatcaaaagcacgcatgtactcaatgcattcattgtaagtatggcccaaaccaccacagaaatagcaatggtcaggtatgtcttcgtattttaactcaagccaggtgggtgatgccattcctaaaaaaagaattggaacacctctgggaaggggtttggtaacatcgagcataatgcgaacttttaaataagaacctcaggtttcaaggagggttggtggatttctaggagggttccaacaattcggccaacaagtcgggctaaggaaatggaacagttggaaaaaggaatgttatatatttgtacctagaagggtatcttacgcatggattctagggtaagggtggagtctggatcaagaatcttcagaaggatagggtttttatcaaatatccaaggttggttgatgatggctcttttcctatcaccctcacagtggaaggctgccaagtacaagttagaataagggatctctccttaacactaatggggaatttatctttccaatactttttcagaaaattcttaagtgaattatgattgaagcttttggtggtgtatagagttgccatcaggtggaaatggggtggagatggtgggagccctttatgagtttcggtatgatcaatgagggagtggatagtgttcttagtgttagtgagatgtagagctacagaaaaagggcgggctaagtcttccataactagtaaaatgctagctaaaaggtaaggtagggcaatatgaacaaaaacgataatgaacaaattctgtgattgagatcttaaatagccaaacacaactaaatcggcaatcgaaggggtacaaatcctaggtacaatcaagtgccatagatgataagggtaataaccataaatggtcggttcaagctggggattatctaaatccatctacaattctggttggtagacacaacaataaaagctagaccctaaactaggatctgaaaggacactagatattaaatataaggagaaaaattgattagatttactcataaacaactcaaacatgagaaattttcattaatgccagtccacacttcctctaagatcctttgtgctcgatattgggctgacctcatcaccttgggtggaggcagttgtgtggcaatcgccataaatgtggtgccaccacaacacacaaaagggttgaaaaaatgcctagaaagattaaaaaagttgtagagggtcatgatgatctttgttgttcgaagaggaagaggaagagacttggatggaaggcatgctctctaagaaagatgaagggtatcgcaaagacaaggacgggcgaccataattttctcttgtaaattagtatctccactaatttagggtccactaatttataaccctaaattccacttaatttaatattattatctttaaataaatactataaagataagtaatgaattttctcaaatataacctacaacatggaatcaccaccaattaattaacacctaaacaaaattaaatcaataatttcatttgaagacactaacaattaaatgagattaaagttgaacttaatgagattaaaattgaacttaatgagtttaaactaaatcaaattgtatataactttgaaattattaaaaacgttaattaaaatattaacttcaaaagttttaatgtacgaataataatattatttcaactcatattgtaacaccctaactagctaaggcgtgttacgtgatttttaaacgtattgtgcagctcgttgctaaataacgaggtttatgaaaatcgtgattaattaaaattttgctttttaattaaaacttataatatttcatacaaaatactcgggatcccgattacaaaatactttacaaaagttaattaattctttacaaaata

SEQ ID NO: 380281 - DNA, 2394 bp, Cannabis indica
acaaaagagcgagatagagatcgcagaagagtcggatagaaatttgaaatggagggtgaaatcgaaagcttcatcaaggtatggatcatagccatattatgcttcagttattgttattacatatcatcaagattaccaaaaggaataaccagacttctttctctcctaccggtcttctacctcctcattattctccccttagatcttcattcttttcaccttggtgctcccacaaccttcttcctggtttggcttgctacatttaaactcctacttttctcctttggcaaaggccctctatcctcctcaccctcgaaaaatattttccatttcattgccatagcttcccttcccattaaaatcaggcaaaacccacctcaaaagtttatcaaaaataccataatcaaagagatcaacacaaacccatttgatccaaatggttcaagagtgcctaagtcaatcttagtggccataaaagtcttgcttttagcattgataatcaagacatacgagtatagaacgtatttacatccctacttgactttactcctctactgtttgcatatgtacattggtattgaaaccgttttagccttggttgctcttccggctcgaaccattttcggattcgagctcgaacctcaattcaacgagccatacctcacaacctcgctccaagacttttggggccggagatggaaccttatggtctccagcgtcctacgtgagactgcctatgacccaatacgacgggcctcgcttgagataattgggccgaaatgggcccaatttctgggtgtgatgtcgtccttcgttgtttcggggctaatgcacgaggctatttactattatctcagtcgggcgcggcccacttgggaagtcacccttttctttcttatacaaggagcgtccactgggattgagatagctgccaagaaagccgccggtgacacgtggcgtccgcacaaagtggtgactcgagtgttgactttgggattcttaacgttaactggtaactggcttttctttcctcagttgcttcgaaacggtgtccatgagaagggtataaaggagtattcgctcataattgattttgtcaaagcgggtttaagatatcacagctaaaagaaaaaaaaaatgtaaaaattattatcaaacaaatttacatattttgtactaatgaagttcataaaaccccttttcagtatcagtttttgtatagaattattcatactcgtggtattaggtgaggaggtgatgggggattaccttatgtctttttttctgcacataggcttaagaaagaggaagatacccaatcttataatggtatcaaacaagctttgaatatttataataaagccctcatattaaaaggccaaacataatcaacacttgcatatccaagttgatagatcaaatcttatttgggtttcacctcaagttagctaacttgaagattaatgtagtaggaaaatttgagaaattttctttatatgataattcatataaaaatataataagatggttgttattataaattaaattgagtcatttataaaaacagagaaaataaaggaaggtatcacctttattcatacataatctctatttgttatctacgtttctagtattagacacgtaaaattcagattagcacccaatacctaataataggtccctcaacgaagataaagtttgtgggggccattttatttgaatcttttaggaacgttcttcagctccgtgatcggataactttccgccattgatagctcgtgttcagaagtatgtccagtattatgaggctggaagggtaagacaatgtgttcttggaagaatagtctagttttcctattatttatgcgcacaaataaagaaatattcgttggtcagatctcgacagaggatcacatcaagctagaagagaaaacatcctaaaacagatatcagacgattaattacccacaattacggtacacatttttgactaaatctaacggaatctcatctgcctagtcaacatatcttctcttttgtgggatggacttgacgaggcagcccaattgtttaattcattgtaaactccccaatagagggaaaagggatattaagtgtaattcccaaaatactataaatacccaacgaatcctatagattaagggtgaaattctcttgcaatacttgctcaggcaaactcgagaacttacattgactgtattccccaaaggcttttcaagcaaaagagttacataataacactaactcgtggactaacgctagtcccaaccacataaaaaatatttgtgtctttcacactttttctctttaaattatttttttctcatttctaatttagttttccaactcaaggaagaccaagtagtagtattc

SEQ ID NO: 380282 - DNA, 2953 bp, Cannabis indica
attatacaagaatatatagatctatatactcttaactaaaaatttagacaatatgaacttttactaaagacaagtattgtttattactacaaaacaaaaaaaaaaaaaaaaaaaaaaaaaaaacaaagtctgttattgtatgatgtttacagttactttgttttagcatcactaggtgcgttgaattacagtgctttttagtgctttattaggcttccacctctgccacactaggtagcaacttagttagaatatctctcaaactaaaaatgcaattataatataaatgagaagctcaagcaaatttatgagccactatattaattgatcgtgtaacaaaataaattgagacatgtttcaaatcattaagaagagttttacaatcatgaataataatgccaaataaagaaatcatagtctcagagttccagcttaaactaccaataaacaatcggtctccaaaattacatgtagctttgcattttgatccaacttaatgcttcccgaaccccattgccttagcaagcatcaattctacacaattagctgacaacatagtacgtccttccaacaataaacgatgatcatttcgtgctaccattcccaacccgtatctttggccctcatcgaataatgaaacattaatattgacattaatctcattaacacttggtagtctccaatgctcaacaccatcccccgccttgaaattaggtcaaaataacttaacttctaagttttgagtattcctccattgactaaagtaccctttagcagatgaaattatgtctgaaaaatcacctatcttattaccccaaaaaatatcgttacatgccctctaaattgcccaacaaatagtagcaactaaacacattttatcatcatccacgtgtttaaaaacctccctgcatcagtcaataaaagatgaatctcgtgccacaaccggacctatcccaactctattccaacatagcttgacgaattgacatgtaactaaactatgtaaattagtttcatcctctctcttacaaagcactcacttcgactctttatgttaacaattaagtcattgttggcacactccatcctagcctgccaaacgaggtcccttaccttcggaggaacttttaacttccaacattatttctagaagtctaaaagatcggacaccactcactgaccttgtaactattgcagaaaatgataagcactcctcactatgtactaaccagaaacttttctagaccaaactaagtgatcactagttttagtaatatgaagagggatttgtcgaattaaactttgatctttttcattaaataaattagcaataatttccctatccctattacaagagttgacaatcaataagctactcattcttgcattcaagagggcagaatgagatgaactcactataggattgttgtaatcaggcaaccatgattcaccaagaatgtttatactagtgtcatgttggaagttattttaccaggatttagatttatcaacaagtatgttgattatattctataatctaacaccctaaacatgaattcctaaaacaatgaaaataaacacatataaagtttagaaaatcttacattggtggcagcgaaataatatggctccttccactcagatctctaaccctggttcatttctgtcacagagtaataacaagatatgagcttagatctccttcaggtgttagattcttaacaatcttccacattatgattgagtacttgacttgttatgagtgagcatggtactctatcactatagggacgaaattttgatgatgaagaagaagagaactcaaaaattagagaggagcctctcttttcaattgtaacgccctattccatagaaatgccatgtgtgtgagtttataaactagtttaatactaatagattaattaattattaaaactatgatgacattaaaaacttaactaaaatgaaatactaaaaagggacatcataacggcattaaaaacgtgttccagggatccctattataaaaagtttacaaaagactatatacgacaacaattcaaaacacaaaatcaaaatacatagcagatatagcccaaaacaactcttgacaactcaacacacatgccggtggggtcaatatgtatattgctggagaagattgtcatcttatggctcctttaactttttcttacccttacctgcactacagaacactcgtgagttacctagactcagtaagaaaagtaataaagaatgatacattaaataaataattatacattattataaaatgattaaaccataacattcaatagaagataatataactagtcatatgcatagaaatagatatgctcatatattgcattgcttaatcaggcaagcacgtgtcataatttaacatcatatataatatcattgtgccacctaatcaggtgagcccgtgccacacctggcaccaatatattgcatcgcctaatcagacgagcccataccatagcctggtactcacatatcactgccgctcgtacctaataaggtacgccgctagtatatcgcatcacctaattggtgagcctgtatatcacatccatggtgtcatcacattgtcatttcctaatcagggaatcgacaattacaaaacatgtcatgccatgtgctacattatactttttttacctcaagttctgattcaggtatgttggtcgacttgcttggagaatgatcaatgatcccgggccctatatcataacaatgataaaccaataagtgtttatctcaaaataatgtttaatagctacaaaggaagacctagtataaacaaataaacaataactaaaagaaaacaataactaaaagatagtataaacaatcacactaaacaaaaattaaaataaaaaaataaaaaaaaaataaagggaatagacttttttttttttctaagaaatca

SEQ ID NO: 380283 - DNA, 1456 bp, Cannabis indica
atacttttaccctttttcttagaaaagaaagggagtttttcttgactagttgagaaactaataaatagaaattactcattaatttgatattaacacttgttgtcttttttagttaaagtgatcctaatcttaggtgtatttatatactcaattcccttgatgggttatatgagaaaattagaatgggatctagtgatatattttcatagtcgactgctttaaaaaccaatacggatatattttgctatgtaattttcttgctttgttctcagcccaaaattttcaataatatgtcttaggttagtccattaatatccaatgaacaatttcaaattttcatatcataattagagatatccatttaaacctttccctgttattccagttcttattatctgtgctacatgataccatttggttgcctacttatcttatgcatggtgcaaaatatttctgcatataagtggtatttataatttgtcgaaaaaaaaaaaatacaaataatacataagtatgtgtataaaattgaaaacttaaaatatttatgcctcatgtacccttttattttataattagtttattattatttttatatttaggtgtatatacatatatatatatatattatatttaagatccatgaaaaaaaaatatattaattaaaaatataatatttataaatagagaatttgatgttgcgaaatttaatagctacatgcaagtgcacatgatttggatcctggttcagggctagagtttgggtccgagtctgggtctagagtcgaagtttgggtttaggttcgggtttaggttaagggctgaagtctagaaccgagactggctcttgggtttagggtccgggtccaagttcgagttcagggtttggggccgaagtctggggctcgagtcgaggttcggggtatgggtcgagtccaaggtccgagtctagggtccaaggtctagggtccgtggtcgaggctggggccggtatccagattcggggtctgagttgggtccggggtctgggtcgggtccgaggttcagttcgaatttgaggttcgtgatctcggttcaaggtctgggtctaggtccacggtctgggtcggggtctaggttcaggtccgggttagggtcgagtttaggatccatgctggagttcgaggttccggtctggggtctgggtcgggggtttggagtctgggtccgggttggggtcgaggtttgggttcatcttagggtttgggatagggtctgggtctagattggggtcatggtccaagttgggattggtgttcgggttcgggttggggtctgggttagagccggggtccaagtccagattttaaggtctaggctgagccgctgaggcataggcggacccacattgtagcgaggaggggcagtcgccccccctgaaaaaaaaaatcgagaaaaaaatgtatatgtattttaatta

SEQ ID NO: 380284 - DNA, 866 bp, Cannabis indica
cgtgagatacttgaaagctatggctgcgttgttcgtgtcatatcacctcggatcaaggatgctgctcttggagcaggtggcactcgggttgaactttggcttccatgcttcgccaccttgtctgatttcgacggtcctactcaaacgctatagcaattagggaactctccgcattattattaccacaccagtacacattacagtacagattttagaaggaaaataatggacaatatttgaaaattttcgcctttcttgcttgctatttataaattgcaaggtgttggttttattcggggtcgtcatactgtatagtttatttttccatacatatgaatttacttgtattgtgatttatgtctgtacaaggaagtgtacaatttgtaatgtaactagtaagaaaaaaatcctttatgaaaggattttcatattttattcattatggtataaaatcaaaatcagagtttgatttttcagctaaaaagaaatgtgaattaagaaatggaagagtgactaattttcaatgccggccatgattactggtcacacttgtcttaacacatcatttttttgtctttggaattctcattggactttaataaaataatagaaacttatctttaaaaatcctaattgtgaatggctaattaattgatagggccaatttctagaacggcctaactccaatctctatcaggaatttttctgcaaaggatggaacatctaactaatctccaccaccatcaacaaatatagacatacagccatcattcgttccaatccgcatttttttggtcaaacaacatccaatccgcactaagtgcgaattttatttttttggatccaatccaatccgcacaatagtt

SEQ ID NO: 380285 - DNA, 1748 bp, Cannabis indica
aacatatatgctcacataccttttgactcttatctctatgaaaataataaagtgtatatgttattattagtgggaaatagctagctagaggagagaaaaagatgaagatagaagaagaagatatatagaggtgagcaaagagggtctgctctagcaaatgggtatttttggtactttaaatagacctttcaaccattctccaactcacacactatcatctttttttatctattttatttatttgcttttcataatcctagtgggctccagattaaaaatacttacatttacaatcttttttttttttgtatatattactatttttgtattgaatattttgaaataagctacatatttataaatatgtgtctacataagttaagggctaataattaaataatatatatatatgtattcatcatgactttatttatatagttagttcatgttattccttccacatttatattttttcatgtatatgagaaattaaaggtagaaggcgattaataaatgagaaatgtgaatgatactttaaggtgtcaagtactatatataagattatttttagtattttaatatcgagtttcacatatattaatttaataaataatataagaaattgctaattaattataaagggtcatatttgtatagtgttggataatgttaaataataacaatactcttaataaatgagttactatataaactagctagtcttttggaaaatgacttgtatttatggctggggcttgaattgaatgacatgcagactaaatgtacaaaatgaaagtaaaaaaaatagtgataatgaagcacttttatttttctaagcttcactcaatttgtgctagttgtaataatgaaacaatagagagagatatacatatatatatatatataatgatgatatcagagtgaagtgataatccatgcatatttatatatatataaatgtaactgtaatgattttgctttcttggaattttatttatagagatagattttgttgctagctgctgatgatttcattagtggggtaaaaagtttttactgaatcccccaatgaccaatgacccaatgaccattcaaacatacagtcttcatatcagtagtacttgtgcattttctattggtagtacggatgaccgaattgagaagatatattcccatatgtcaaatggtaattaaattttattcctaaaatctcttcttttcttatggtgatcatttaggagaacattgttaatttgttataggtgttcctaaaagcatcttcagtcaaccaaccataccatactcactaaacacattcataagttaaaatagataggaaacctctttaaatatagggagcttcctatttttttgttaaattttttaaataatattttaatcaaaagtactattacatttttattattttataaaattaatttatatttaacaaattcaaattataaactattattaaaataatcaaatactaactatagaagagaacatgcttagagcaacaacaataaataactctttattttaaccttttagctttaaaaaatagagagcgccattagaaatgctctaaggtgtctaccacccaaggccgaccttgaaacaaagtgggccacaggcaaaaaacaattttttgggcccttatgttagaaaaaatgtaatatttttcaaaattagtaaaaaaattgtataattttaaaagaggaaaaaaaaattttgggcccctggac

SEQ ID NO: 380286 - DNA, 4535 bp, Cannabis indica
  modified_base (319)..(319): a, c, t, g, unknown or other
acttaaaaaaaattttatttttaattctgtattcgatctgcaggaggtatacctggatctcattctcagttcagttcagccaagttgtagttttaagtcattgataataacattagagccacctcattctcatggttttaagaaaaaaagactgaatagaagaataacattttagacatatgattgagtatttaataagaggatgaatatatgtatttatgtatagaagaataagaacgagggagaaatttctttcacaactaaaaagagtaaagaagaactgtgcacactatggtgagttacggtttttttttttttntttttttttttttttatttttttttatggaatttgtacaaaaaccagcatcttatcgaccaagcatgaatgttactggtacaggctcctcaaaaaagaatgtcctgcatgtaataattttatgtgaagcaaatattagataatttatcattgaggaaaaaatccctgatgaaatcaacatcaaatttgtaatcattaaataaattgtttattgatttttgtacataattttttgaggtcaaaatattgatatcctgatgatgcttcttccatgatgacaaaacaatgcacatgcgtgtaaattttttctttttttgaattaaattttctaaagacaagttatagcgtgttgtgtttgggaaataaattaaattttgttatgacattaaaccatgggagcatcattttaataatattattttttgcgaatgtttttttgatataaaaatgaagtttccgtgggaacatcaaatcttgtacgtactgtcttaagtaaatattttcttaagttcaagttttgaatttgatttttcaatcaccgaaaaataagtgttacaattttattaaagatggattagattgctttcgggaaaaagaaagatgcattagatttgcttcaaatttgtaaggatgcctatgaaacaaaaatgtttagagaaagagaggaatgcataatcatatagggtcaaactacacgaataacttcatctaaaaaacttgtgccaacgtgaaattcaatcaattaaattgatcaagctaaaaaaaaaaccttagtaataaagaataatggtggaactggaaagggaaatttgatgataattgattaataacccataaccatatgaaatgacgtgtttgcatgttgaataaggtataaagaagtacctctctactttgctatgctactttttatattttgtactcttcaagatgcagccacttagtagaagaccacttgtttccattaatcactgggcatccccctgtcaacaaacatggttaaaagaaaaacgattagaaatattgtaaaaaaaacacctctagacaaataaataaataaaatagttctgaaagttagttgctaaccatgcaaacttgaaggatctaaagttgcatcaggtctcatactccaaaatagtaacgcgtcgcccattctcggtttcactgaaagtcctgtttttgcacattcagataagtcattccaatttggttgagaactgaagtttccctgggcagcaggaaatactgtctcgccaccttcttcaacatctgacctgcgtttgtttgcagcagagaaaacattagaaaaacaagacaagtttaaatgctttagcagattcattaaacatgagaaaagattaattagcatcttacagatacatcaaaacagttgcaaccctttggccaccattttttgtgttaaactcatcaaggaaataatcataatgtgcgtcatacttttgcccgacttcatagtggagaacttgaagtccttcgccatgctctgaaaaatcaaatgttagcatacatatgatatgtttatgcttaagagactactgtgcaaaagacagataattacactattaatcaaaaagaatagtgaaaaatcgtaacgaaagacacatagaaaaacgtcgttaagatttatagaaaataaaaatgacaaaacgaatataaagatgcaaggatcatattgaagaaaataaagttactgcttcaaccacactttaaataacacattttctttaggagagggagaaaaaaaaagttaaaccagtatgatgacttaacgtgtatgtaatcacaatgaattgtttttcttcaatctatcctttattttgtgtgatgatgttttctatactttgactgcattgattatgttacacgaaagaattgcctgatatgaaactagattgccttgaacacatatctaccacaacaaggaggatcagaaaaaaatgatggaaaatataaataacagaacaaggaagaaatatgtgacgtgcataagaactccaatactacacagaaaaatcagttagaagatgcgaatttagaattctagtggaactaataatctgcatcacaaacctataacagcgacattatacctcaaaaactgctctagtaccagctaccaacgacattttaccaagtttaagagaccataaaagttttaaaagaagaaaaacaattgaagtagattatgcaaacgtgtgagcacttctatagccacacaaatcgacgatctaccataaactttcacctaattgttaagtaagctaagcataaaaattaaaattaaaaataaaatagaaagaagaactgggattttgtgcatatggacacccataaatgtggaaattaagtggtttttctttttcctacctactggaatgaatgtaaagtcagctattcttttttctatatctctgactatcttatctcgccctctcttgagaaacattcctgaactggtgcggaccctgcatagtgtattaatgcatacagaacaacaactatgtcacctaggtcttcatccatctaattcatatctaagttgaaatataaagatgtaaacacaaacctgctatctttgctccgtccagttttactatcaaccactgtcgactttaccatatgtggcttagcaatactaatcaagtattcgcattcctccttcgactgtttcaaatcatttcaagaactaacattattgagcaaaaaaaatatccgtttaatgcacaaccagtaaaataaaaacacatactagtttaaaactgaggtcaccaaataagacaatgaagggtataaattcacaactaattggaaagagataatttcaacaagatgagataaaacagacataattttggttgatatgagaggttctttattgcctaccatgtcttaatgttttaaaaggatgaataactttccaaattcagttgctgttgacgtgctgttacttgaattctacttatattatagaatagattcgattcactactcttttggctaaaattatttgaattttatatgaaataattaaggaagaagtgtattcactcctaatagcaagggcgatggatcggaacgcaatgagtggaaaatttcatttaagataaaatcaatacagaagagagtagttatgcacaatcgagtagttcaataaaacaaaaatcaatagatcaatgccaattcctttcgataataacaaatcctaatttcagaaaaccacaccagatcagattaagaagacgaggaaatcgccaggattgcattcaaacatgtaactgaaactatattcggtagaagaagagcaagctcctgattcaacgaaataaacaaataaatattgagaaatttaccaaaaaattatgatataagaaagctcttggctcccaagaaagaacttcagtccactgctctcgtctcttccccagaccaccagctctgataaattcaatcaaaatgtcgatcaattacaatctaatctagtccgcattaacaacagaaaaaggtcaactactatactaatcgaacatgaaaatacttatgaacctctcaacaattctgcgcctaaaagagctgagatcgttaggcggagaatcatcggagctgaccggaagcgatactattccaagagccaaaagcatcagaagcagaagcgataacatgaacaaaactgagaagaggagcgtgaacttggaccattttctagcgttgaatcgattataacgccccttggccattgttgaaggagctccaatccaaggcagtaaagctcgattggaaaataagtaagaaacccaattgaaattgtataaatctcagcaccgaattgacagagtcccaactcccgacagatatattttcttgggtcgttgggagggcggaatcaaatatttataagttgggcaaaggagctaattaccaagtttgctcctcaaatcagttcgttaattatgggccttttcgtaaattaaagggctcctggtttagtggtattgtgtgctgcaccatgtttacaaccaaactggaaactcctattgttgactattaatatttcttaaaatacagtcacttattcttacaatcttttagttaagactaattagtaatttttcttcttgaagtttgatatttactaaatcgtgtctcctgaacttttttgaccgttaaaaattcccccgaactattaagattgttaaatt

SEQ ID NO: 380287 - DNA, 3671 bp, Cannabis indica
aaaaagatgatgtttgtgcaaagttccatgctttacctggtgaataatgaggcaaagttctatgctttaggtggtgaagaatggtgcaaaattttatgatgttgatttctcacaaatccttgatgatttagaaaaaaggaaaaaaagaatacatggtttctccaatttgatgtcagttcttagcttgccttttttaaagtccattgtcattagttagactgtcctatagctaatgtaattgattcaacaacttcgtattgtactaccttctgtgtctacgagatagaggatggcaaattagttgctatcctccatatagcaactgttattttcaacaattcgggtggaaactcatgattcataattcatgcatgactttattgtgtgcaagtaaggcaattagttttttggctcctggctgatgagtattcaatcctattagaatagtagtgattttcagctctcacgtattatataaagtacacaatttgatacagtggttttatagtaggcacatttatctagaacaagttttctccacaaaatgtttgttccaccgttgcttataatgaaacctaatgaaacctaatgcctcatgttgtagacaccattgaatttgatgggcaaaataagaaagataggagaaaaaaaacgacttctattattgatttaacaatgctgatctgctagtagtcatgaggttctatcttcatttaattggtgattactaatataactcatgtttttatagatggatcaatattgcacattcttttgatttggatagtcttatgtgcctcaagattgtggcttgttttgctaaccaattttatatcgaatctcagacttttttttttctttacgattgagtatactgattagaataattggacttttatatcatgttaagagttccttcatgttcttataaatagatcaatgcattgtgttagaatcacaggtcaattaagtatgggaatggttgatggtttataattgttagggcaccctcctctcttagactagtttttgggagtgagttttatccaagtggatacaataagtatcaaagtcatgcaccttcaagtgggaccaatgttacgaaaggggcgatatgtggaaaagcccatagtagggcaccacagagtggtatgttgtggatcttggctctaaagtgagtgtattgttaggatcccacatcgatatgggattgattggtggtttatagctactggggcaccctctccttttaggctagtttgtgggattgagttctacccaagtggttgtagcacatatatacctagagatattttagctgctgtagtttgagttgcactgcatttaaaattaatcaatttgtttccatagagtgtggtttgtttagtttcattctaagaaactacttgaatattaaggaaaatctccaagtcttttgtatccacagtgtgattaaatacttaagaaatagtaaataaattaaaatttccaaagggttaagttgtctatctcttttgcagtactactttgatccagtctcaaagcgaagatttcgctcaaagaaagaggtcctttacttcttacaaacaggaactcgaccgaaaaggaaaatcgatgctgatgcagcggtgagtcaaaatgcgaaccttttttagaaatttttttgattcatggcctgctctttcaatttactatgctctgttttttcttacattaagttttctttttcgatcagactgtggacaattctggggaacataagcagaaggctagcacaagtgaaaagggttctgttaagaacttcaatttttcggatgtgcctgagaatgttcaatgggttctctcagattcttctgaagattggaaagcttttattggcaatgaccaagttctggagtctagtaaacgagactggttagccgcattcacattccttgcatctagagatagaggccgataccaatgaaggccatttccattcctcctgacattaaactagtgtcaccaatccagtgcgtgcaaatactagtattactgaccattgttcttcattttgtttctagtccttttggtttctcaattagttgtaatttagtcttatattgtaaaaccaacagccaagcacagatcgtattgtttcttggcatttttgtcatcaactcatattagtcaataggctcctcttttgttcgttctttttatgtgtacgtatcaacttttctgaagctttattaaaactatacaataacatcaatgggcattgttcgataatctcattttatgtacacaactttgcaatatttgcaacttgactaattagttttgaatcagaactcaggatattaacttcagtaacaatttttgagtttggaatcatgatttcacaaatgagaatagctttattttttcttctaaaataaaggtagcataaataaataaaatcaattacatagaatgaaaaaaaaaagaatcaagtatgtatattacaaaaaagtgaagaaaattcttctttacaatttacattttttttcctggaagagttctttttacaatttgttttgcaacatgtggatattatcatgtgtcaaacattgagatagaaaaatgtaaaagtaaaaagagagtagggaagagcaaatgcatttaacatttttccgaaaacaaaataaatgagtttaaagataaatcagagagaaacaaaatgacactaatattgctaataccactgtacattgtcatatattttaatttgatatctattaaggaatataagtaatagtcatcttgtggtagtgcatcactagtggctaatagtaatgttagttgtgttgatatatattctaaactatctgtgctcctgatgtgttatgggctaatcatattctctctaccgagacaatacaagaggagagacatgctccaaacttgtagcctttgagaacatgagtaaagaaagactattctcaagaaggtaccacctagcttagttaggaaaattactacacgctttatacatcatttcttaaatatgtggttataatatgttggatggcataggataagaggagtgacttattatcgccattcaaataatgatagggtggcttcaccgcaagagcatttaggggcagtttgtggttgaaattggcagaaaggttgattgggctgaagacgatgtatctttaatcaacatggaaaccacatccaacatgattggtctgtcaatggaatgatcttgtacacataaaagaccaatgtgtatgcaccttattgcttctgctgcagaatacaactttgccaatgcatcatcaaccaagtctagttctctgctttcgttccacagttgccatgtctacgaaaaacaatcatttcttaccaaataaatgaccagttgaaaaactaactaataaatgtgaaattaggaaatggtagcatgaggttgggaacccacataagcaataaggcttagatcttgctcattggagtggaagctggagttcttcttcccactgattatttctaatagcatgatcccgaagctaaatacatcagatttttctgaaaatatcccacacatggcatattcaggagacatgtagcctctgcattagttgattgaatgttaggacttaggattagtgtggtgttctaacatatattaaataaaaggg

SEQ ID NO: 380288 - DNA, 2716 bp, Cannabis indica
aaagtgaaagaatttgaccttgataatgctaattcaatctcatttctcattgaattttgaaattaataaagaagcttattatctcagaatttttgtgttatttgtgtgattacctgatcacattattatgtctgattcttgctagtgctgctatgtttatctgtctgtgttcctgtttcaggagcttcgatcccagaaaggagtgtaatctccgaaagtattcctaccttcttcctgccgatatcattggaattaaaagtaatttaagcactgatgaaattgattttcatatctcagatttcaatgagatattgaatactttcgaggtaccgtttccttatttttgtcctctctttttttttgtgtgtgtgtgaggaaatttattgaactgatagtttgtttgtgtaaccatgttttgtagggagaacatccttttcataattatacagtgcgagcaaagtataggacgaagtttcctgcaaagaaatcacataagaatggtcatgtgtcaggaagtgtgaaagcatctgataaggcatcagaatttgaatctggtgaaagtgatggagaagaagattttgaatctgatggcttcccttcttcaaaagttgagagaatgagctcaaattctccagcattgagcattcctgatgggaacatggtcgatgctcaagagaagcttaccggcggtgtaaatgatcaaggttctagttcagttgttcttgcaaaatggctgcaccaaccggatgagagagacagaataggtgcctcgcatttcagaaagatttttcgctgctcctgtggaaagctagagagctcgcttggatttaactttgttgagctatctgtgtggggggagtctttcatgttacatcaggtgacctttttctgtagccaatcagataatgtttttactatatctttatgtattgttttatcgtgatttcagacaatgttcatcaataaatccgatgcattagttataacacatgaaattaaatgatcacaaggtatcttgatgttagtatgcacacatgagagagctttagaaaatacaatcttaccattactgcttattatattgttgaatttacataatatagtttgttgttatttagattcgcaaaatgattgggactgctgtggcagtaaagcggaatttacttcccagagatatattgactctgtcattagccaaattctcacgaattgttgtaccgcttgctccatcagaagtcctgatcttaaggggaaacaacttttctttgagaaccagaccaggaaatgtcactagaccagaaatggtggcaatggtcgaatctgaagagattctcaggggagttgatgagttctatacaactgtaatgcttccccaggtttctaaattcttggacccgtcaggctccccttggaaggaatgggttgagaatttggatcgtaacacaaacattccagagacagagttagatgaagttaggactgcttggaaaatttggaaggaaaagtttgagagcaaaaccagtgttacatcagtatcaaatgatggagacaaggtaatttgacttatcgccatttcttattcagtctactgagctttccatgtatctagtcttctttccaagttgtcatggaagagcattaatattgcagcatatgattgctctgccacttcatttctttaccatgaactatgagaaaaaggttataaggccatgattgcggtttttatgtatagacatagcagcctctttttaaactcatctacgtgagttccttatggcgttgtcccatctttgatgtatcaggaacttgccgcaattgcataacctgtctgtactgccgtgcatattttgcacaatctgacataaaaattgcatgcaaagtttttcaagcttggatggactttgatagctgccgaagaaggtgattagctgaagaagtagaagcatataaatatatatatatatatattcatgtattcatatacatatacaagtatgaatatatatatttagtgtagttcaaatccaagagtaagaatgaagtggtcagtagatgttagctctggtaatgctagtagcaggtgcacttattttttatggtttcttcattattgccgctgatcacatgtacaaattattaaaagctgatggtcttttctgacctgacattggcaccaaatggctagtacttgccattttctcattgaaatgtactgttttttttttggtcaactaatatttcttccgtaattgtagagttttgcccctttaatttcttttattattatttttatgaaaaaaataatatttatttcacacttttgcaataatatttgtttatttttttgcaataatatttataggttggagaaaaaatcgttcgataaaattaaacaatagccggaggaatttttttattcatttttttttggaggattaggattcattttttatacgtactggataaagatcgcttcaaacactcgataggaacttgtatatctctgttgtcaacacgagattagggatgttcattagattcaatccgcacttttttggtcaaacaacatctaatccgcaataagtgcggatttcatattttagatccaattctatccgcataagagtttaaatccaatccaatctgcaatagtgcggattggatcggttattttagatcggttatttttttcataataaattatttaatattt

SEQ ID NO: 380289 - DNA, 1578 bp, Cannabis indica
gtcttacatgctagaccacaagtctctttgacatgacaaaagctacctacactaaatgaaaatcaaagacatgtaatgcaatgaaaaatcaaaaggaatggccatgatattgcaaaaggtgaggcagattagaaaacgtcaaggatgtacatttgtacagggtatgggagcatgatccatgtgtctgtatcacttgacactcaaccatcactacctaactccactaccctgcagattgtctcttgccattttgttgtagtaattgtgtcattcggacaaatcacattgttttgtattattcttacaatatattcaatattaatctattcggcagcctaacccaagtgttaattataattagttagtttgtgtttcaaaatattttatctctttcccattataaaagtccacaaaaatgatttagcggcacatcactaagccgcaaaacagaaaataattggccgacattgaccaagcaaactcaacctctagtccatttatctattaaattacactccaaatcttatctcgcatttctcttcttcacattataaaatccatttgaagttgttctcttgttcatattgcacatctaacatatagtacgggttttggttgtatttgtcctatatataaaattaatgattagttgattatattacatcttatataaaacctaataaactaaatatttttcatttatacaattaggagaaaacaaattaagcaaccaccatatataaattaaaaaacaaattagtacaaagttagcaagcaccatagataaatggacctataaacataacaaattaaacttggtactaaaacaaaacgtggcagcttttgaaaattattatctgagcttgttagcaattgtctattattatgcatcttaagatattaaataaaaagctgaaataataattttctaaatgataaaatccaaagcatggtgaatatgcaagtgttggccgattgagtaacgagaaaaccaaattttaagaaattgtttggtatgcagagttttaatttttcatattgttggaaagctgagaaggataatctaatggtttagaatactttatcactgtgtttgattgtgcactggattcttgtcttgatttttaaaaatatcaaatttttgtgtttggttaggcataagaatatattaatttaataaaaaattaactatgtaaaaaattatttttttattatcacattattgactatttataaatatttttaataatgtataatatagcttttaaattattgaataatttattgtattttaatatttcattctaaagaactgttagttataatttttatatatataaaatcaagaaaagtattagttttgtttaatatatgtgaaatataacaagttagtaagttttcaaggagataacactatttttcctatattagagaattatattattaattaaaaaatattatctgaattgtataatggattaattagttatttatacatatatgacaaaaaacaaaggaaagtatatattttatgaatatatctttatatattaaaagtgcctatctaacggcaattct

SEQ ID NO: 380290 - DNA, 2502 bp, Cannabis indica
gtagctatatattgaactaaaaattaaaaaagaaattaattaatatgatactatttcttcttttttactttttctttaataaagcatacgaaatatcatattaataatttcgttttttttttttattggaaacaaatatatataataataaaaaaaaataataggtagcatttatataatgcatgtgatttactagtgtgtatatatatatatatataaatatttattagcatggaaccaaagttatcatgtttatatggcatttaagatgcacaaataatatgatttatacatttttaaatatttgtctaaaaaataaggtaaggtaatgtctcacattaggatctttttatattataacatgacattttgttggaattaaatgttgttttcagaataaattattaacaaactttattgtaattaataattttgtgaaagatgacgagaaaaattaatgggggaaaaatttatgtattcttgtttttagggaaaaattttatgtattcttaacatgtatactttggaataattaatgttgacattgcctaataattgatcctatcattaatgaatggtccttattttaggcaaatgttaaaataataataatacagttgatcgttgagtgtttattgttaaatattaatcctaataataaagttggatcacgtgaaatatacatcagcattaccaattgtgaatcgtttgagtgacacaaaagtataaaccatcaaaataattagatagtgaaaatttaaatagtcaaagaaaaacattatgtacaaaaatacaaaaactaaagtaggcatatttattatttgaatgagaaatgctaacggacacgactgatatttagtactttttaagatgcacacggaattgagaattgatagaaaatactctcttgttccattttcattaaaattttaagtggcgtttggttgaaaggaacaaaaacatagaaatgagaatgagcatgagaataagaataagaattgaatagaataaaatttaaaaaatatgaaaaaaaaattattaaatttatctaatcatgcattggaatagtcctttcttctattttaaaatagaattgtcattctaccaaaatagtagaaagaccatttcattagaataacattccaacactttattatggaaccaaacaaatgaatagaatggagattgtttcttttcctttccattccatttcattacctccaggctccaaccaaacaccacctaatagttctcactcccgttatttctcattaagaatggggcgggaatcccctaatagaagcaagaacaaaacggaaaatccttcaataaaaaataaaatttataataaaaacttaaatatataaaattattaacgacataaaaattaaaatattatacattaattattattcaataagctaattattatctaacacacaacttaaaattcataaaaagaatactaatatactaaaaaaatagaaacatcgatgtcctcgtcgaggcgtagagagtatgatctcagtttgtcccgtttaatattcgggaaaaaaaataatccacatctccaccctattttctatttagacatagcctggaatccccactccattaaaggtaggtccctgcagggcccatccgtatagaggaaatatacattcttactactttctaaaatattatattattataattaggacaaaacatcatttttagataacattagacaccacttatatttaattaaaatattcaatataaatctttaatgtattaaatatttctactagcaatattttccttaaaattattgttgggtagctcagtagctgtatacactgaaatgttggtttaattcaaagttatcgtataaaagagttagttgtgtgttgtccgactaataaatgtgccaatatattattgaaaagaaaataaaaatatacaactagtgcacatgcaacacatacccaattaattactttaacataccatccaacaggttaaaaaaaaatcttaattttgttatgacagccgaccacgtttcttaatgaaaaatataatttatatgggaataaaaataaaattatgtgaagataaaatgaaaaatataaaatttttgaggatataataaaaatataaaatataaaatttataagaatcaaaataaaaaatatatgtttggatataaatgaaaaaatataaatttcatggagtaaaaataaaatatttaagtggttataaacatagtttagtaatttcacatttttttttacaaagagatccttcgaataccccttctaagtaaataaaataaaataaaataaaatattttaaatttatatataaaaaattaaggagaattatcctatattctatttttattttttattttttaaatttacaatttagttagctcaaataatttctatgtaggttgctataagaattttggttaagatttatgttgctataagaatttctgtgtggaattctgtaaaa

SEQ ID NO: 380291 - DNA, 6679 bp, Cannabis indica
aaaaaaactaattaaacgtggattgaacgtaacatcaatttagtattaataaatgtaaacatattaattatataaataatgtacaattaactatacatttaattaaaaaaatatgttagttttaattagtatatattattaccaatttatttgttttaactgtcaaataaattttctgatattaagcccccaaatcaacaaatttaataaggtttgcattaatgcttgaagaaataagtagtagcatgcaatagttacattcaagaattttttttagtagcgattcaatttaaagcacaattccacgtcggccaaagagagagagagagagagagagaaaaccggagattcgcccattgaaaacaaaacctcaaatattgaaataattaataaccatggaataatagtgaagaattaaaactatgtcttatgatcgatagatctcatcagtaagatacgaaaatttcgaactttttattaatagttaactttcttcccctaatattgattccacgcactacagatatataattattaattaatcaataatacgaataatgatactaattattgattaactctatgatgttagagcttaatacaataaattaatgaaggttggggggtaagagatgtcttttaagccacccatataaaaaaaatatttgaagtccaaagtgggacctctaatttatgactatataaagcacacatcttcagtttgtttaaatcatactctctctctctctctctcattcataataatacattctcttatctctaccaatactctctccatacaattaacttctgccatacatataaggtgtgtcataaaaataatataactaaaaaagacatcatgaacactgatctaggccatctcccccaaacacaggggaaaaccctcccagattcttgggactgcaaaggccgcccttccgaacgctccagatccggaggatgggcctccgccgccatgattttaggttggttattagctagcctagctagctacatatattatatatacacgtaactaattaacgtgcaatatatatattaactttattattcttgtgtattattaggagtggaagcatgtgaaaggttgacaacgttaggtatagctgtgaacttggtgacatacttgaccggaactatgcacttaggcaatgctacatccgccaacaccgtcaccaacttcctcggcacctctttcatgctctgcttgctaggcggcttcgtcgccgataccttcctcggccgctacctcaccattgcaatcttcgccaccattcaagcagccgtaagtactctctttataaactaacaaacaaagaagtaagacgtgtttggctaagcttctacttttgctttattaatttacagggagttacaatattaacgatatcgaccataatcccgagcctaagaccaccaaaatgcacgccaggggcggcatcctgcatcccagcaagtgggatgcagttaacagtgctttacatagcactgtatttgacagccctaggtactggtggtctgaaatcaagcaactctggtttcgggtcggaccagttcgacgaaactgatcccgaagagagaagccgaatgacaaacttcttcaactggttcttcttcttcataagctttggctcactggcggctgtcactgttcttgtcttcgttcaagacaacgtcggtagacaatggggttacggtatatgcgctttcgccatagttttcggccttgttgtgttcttgtccggaactaagcgttacaggttcaagaagttagtgggaagccccttgactcagatagccacggtcgtcgtcgcagcttggaataatcggaagttggagatgccttctgacacttctttcctctataacgtggatgacattgctgaagggaaaaagaagcagaagatgaagcttcctcattcaaaccaattctggttagtctgctcgatctttttctctctttctttctttctgtttttttttttcttttctttttttttttaaatgttacttatttattttttactataaaagcaaaccacttgccctacagttaggtacatgtatcggcatactaacgtaaatttagaaaaagaagaaaattattactagctaaacgacacataaacatgtgatgtttaattaatacactcacagtaaaagaagaaaattgtatatggaccacacacatacttagaaaaatattttatgattaagatgatttttcctttttaaattgtcaaataaatagcctggctaatacatatgctatatatatatgtatgcatatcattacgggctaacatttagattttttttttatatatatgtttgtgttgttttttattaagcaagaataaaattattttattaacaccaaataaatatataatatatttatatcattcccataattgaaataattgatcaaacttatctagatatagctagctcttgctaggctagctaacttggattaattgttagttgcgtgtggagatactagtattagataataaaaccatgtgacattattaataaaaggcctctcactaagcagtcaaaaagtggcaaatctttttaaaagaaattatatatttatttaaatgataataaattaggggtagcaagacactttggttaatattaggtctttataacaagtacaagtggtgacaaccagagtaggctttatcttgaaatatcttgaaatatatattgtagtggggtacgtatttttgattgaataaaatcatcatgaccaaatcgatcgactaataatatagccaaacaattaacgaaaagaatgaataattattgaccagtaggacagccaattttgttttggttacctcactcatgtgatgaacatcgctcgctattaattaggcttggtactagcgatacatatattttataaataaatattcatgtattaattaatcatatgtctcaatatatacatgtaatattcagtggagaaatgaaaacagagaaaaataagtctaaggaccacatatatttaaaacactaaaagaagaaaacaagagatcccgggccttaattgatttccatagagatatggggctagcttgattcaatctcgtatatatttttatatatatacatatattgctataacttgtgtatctatacatcctttttattcatatatctatatgtgtacagctagctatattcaataacgccaattggctgtcttgagatagacaacgccacgtgtgggtcttcaattatgacactaatgactaactcatcaattgtaacacagaacaacatgcatgaacatacatattgttatgtataatagttagtatcatataaaataaatgaataaagaatgaaggaaaaaaaacaaaatacaagtcagtagaatcaagtaaatataactatatatatagtagttgtgttgaaagtcatttaagatttaagaagaaattggttagttgtagtaatatatagcttatatatatatatatatatgtatatatatatagtcgtgcagaatccaaaagattcacgaggggaatcaattgtgggcaaataggccgaaccctcataaaattggtcctcacgctatttagattcttgtcttgaagctgattaattaagcaccatacataaatatataaatatatgtatgtatacatgtactatatgcacacaaacatatagatattaattatggtatatatacagtactatacttttcatccccagatagcagctaatatctccgagtcacggacgcattaggcgctgccttctctacactcatgttcctgttcccttctattccatcacattatttacaccctgttactatattattatatttacaaaaactactatacaataatattatttatttatttattatttatttatttttaattttggaagggatatttaaatattatattcctatctgaaacctttctctcctcctgtccacttgtagtctttctcctcatttttattattttgaagaaacaaaacaaaaatcatgtgaccccatgtatatatagtataccctacgtactagtaatatatatcattattacttcattgccaaagtaatcggcctagaaactaacacatcacacatgcatgtctatatatattaatacatggttctcaatattcggacttttacattcacataagacaatcaaacatgtatataacagggaccaaacttacttaaaaaagtttggaatgttacgattattaatgtatttttttcacaaataatattgtatattaactaataataaaattcattttgtgtttgcagttgcttggacaaaggagcaatcataaggccagaacttgccccaaacaagataaacaagtggaatctagtaactctaaccgatgtggaagaagtgaaaatgttgattagaatgctgccaatttgggccacaactataatgttttggtgtgtacacgcccaaatggcaactttctcagtatcccaatcagaaaccatggatcgccatatcggcaagtctttccaaatccccccagctgcaatgacaggcttcttcgttggcagcactctagtcactgttctaatctatgaccgagcgatagccccaatcgcaagaaagtttctcaaaaaccctcaaggcctcaccccattacaacgcgtaggggtcggccttgtcctctcagtccttggcatggtagctgcagccttgtgcgagatcaagcgtctcaacgtggcaaggctgcatggcctcaccaacaatccaagggctgagattcccataaaagtgttctggttgatgccacaatttataattgtgggagctggtgaggctttcacttatattggtcaacttgactttttccttagagagtgtcctaaagggatgaagactatgagcactggattgtttctgagtacactggcaatagggtttttctttagctctcttttggtgtctattgttcatacggtgactggggagaagaatccatggttggctgataatcttaaccaaggaaagctctatgatttttactggttgttggctattttgagtgctttgaatatggtgatttttttggtgtgtgctaaatggtacgtgtacaaggaaaagaggcttgccgatcaaggtatcgaattggaagaatctcatgatgtcgtttgtcattaattagttttagtggtaattacaacaaaaatgaagatcaaaattactcataatcactttcttggtgattattacatgatgatgatgatgatgatgatatcatattcatcggtgttacaaagttgttttttttttttccttttgaaatatcaagtttgtaatataggtgaagccttgttaattatatatgtataaaaaaattgcaaagttaataaaagtttcaaatttttggcttgtatagttgctttgtccacttccttcaacttgcatatggagacattaatttctcatacgtacgtattgtattgagacaaaaaataataatagttatataataataataataataatatgtggagagatagaaaaagaaaactctttttttttttttgaaatctgtttatttattagaaaatgactacacaagtttaggcaagtccactattaaagaagcagacgcacaaaagggataacaaccctcccacaacttattacaatctgaggccaaagcttctttggccaatgagttagcagaccggttgcaatctctgctgatatgctgcacggcaaggcagtgaacaaactccggggtctctcttatatcatctagtaatgcactccaatccatttttgcttgggaaatactattcaggtagttcacaacacgaaggcaatcggtttggataatgtaaggataggcaaccattttgatagctaaatggatgcccatccttaaagctagcacctctgccacttccaccgaataagtcccttgttggtgttggatttcggcagccaccacttcacccaggtggtttcgaattagtgcaaccagcccaccattaactccattctttggcacgctagcatcactgttgaggcagtaaacacctggtttaggcgactcccatctcttttctggttttggattcacctctaaggttgtttccttcgaatggtgttggttcaataactcctcagcttccatttggcccatttgtcccataactcattgggcaatagtttgagattgaggtgttttttgttcctcctattccacatcaaccaagtaataaacatgatgaaaagtataaagttggagtaagttacctgttgatatatttagagaagcatatctaatggtgttcctttgcaatgtttaagcacttccatacttggaattctttccaaaaccattttattgaagggtagaaccagaggctatgctcaattgtttcgtcttcagccccacaccaacaacattttgaatctattttcattccccgatattttagcactgtcttcactggtattgtaaagcccgcttagttaatttggaaattatcagttaattgtgattaattatgaaattatttatagctatttaaataatttattatactgttatttatgttattcagtagcatgcatattttgcatttccggtgtccggtattttggaactcggcgtt

SEQ ID NO: 380292 - DNA, 1819 bp, Cannabis indica
taataataataataatgataaatttaattataaaaggattactttgattatttttagccactaagaaatctctaaccctagggtatttggtcaatcccgagtaccctaaaatactctgataattctaaactaactagtctcaataatcccattaaaatttctaaataaacttgttgtgatatttttggcctctgatcgggtctccaaggtcactaaacttgaaaatatttttattccataaacaacttacattatacccacatattctaaataaatcttcataattaataaattatacttatatatacacttatgaaaaaattcataatttacgctgaattagattaacaagatcataaccctactcattactctctaattaatcctataatatataataaactttaattattcacaattagattttccaggatattacaaaaactctactcctatgagagggaccaataggcttaagttcatataggtaaaattcttgcatcatctttgcttctcttagagatgcttgtttattataaactaaattttattagaagtttttggttaaccctcaagtccgtggcaaccaacactaaccattcttagatgggaccaattaagtgttgactatccacttatcaatgacttgttcttacccattgaatttcttacaaaaatggggtaaaaattgggtttccattattggtgaatctattaagcgagtagttttagttccatccctttagatgtctctcttgcgtgtgcgcctcaacttttcttctcaaagatttataaatagatccattatattttcacataagagtttgtatgattccatcatgaattaattatctcacatagttggtcttagattcaattctataccttttattatatatgccatcatagacactagtataagagatttcaaactatatcacgctcaatgatatatttctaaaaatatgtgttaaggatatccaagatatcacgtggcctcttttcctttcactagctctataattgtatttattactcaaaagaaactacttgtctttgagtaacacactcaattggtggtggagattttatgtcacacttgatatctaactctttttagaatatcattcaagttctttagaagaccttgaatattgaggacatgatttcttggtccttttaaggtgtttacccaaaactttggcttgattaattagacactatttttgacacgtggcatgatggaaacaacattgggggcccaacatcccaggataaggcagtgttacctgcacgcttggggcacccatgtaagcaccaaagatccagtgaaatcatttcttagtgttatccttcaacaaataggtctcaatgaccctaaaatgatgaaagaggatgtcacatggacatctcagggctcaacgtaggtcctatacaagtactaggcacctaggttgacatcctatgtgttgtctcacattagttttggttttcaacaactttatttgggcgatctacttagccatttccctaggatacttgagagacatgtttgtatttatggtccatatcagagttagaaaagcaaaagcagatttgattaaaatataatttaatccaatatgaatcataatcccaaggatcttaacataatatatatagattaaatttaaactacatgaaaagaaaacaatacctcttgtagcctatcagaggatcctcactatcttttggtattattatcgaacaaccaatccaagaacttgttgaagagttcacactacaatcttccaagccagcctcaacactcaggaataga

SEQ ID NO: 380293 - DNA, 3865 bp, Cannabis indica
agagagagagagagtctttatagaagccatccaccataaccaccattaattggattgaattgccaaccgactagcgcagttgagcatggaggagggaagagggcagatctaaagttgaacttctagagagagacaggggctttaaagaaaaagaatctttatgcacctggtatcaggtctagtcgagggaggcgtcgttgttttgaggagggagaaactttgtctatgtgatttgtggtggctagtaggagacgatttgcagtgagttattgtatgtgtttgagagaggttatagatataggagagagaaccaatatgtgagagagcgagacacgggaggaagggagaagatgagagggagagatgtctgttatagatttagggttttcattttaaactttatagtattagaaggttagatctaagagcatattgtgtgtaataaaatatatatattattgacctcgcttctagccaatgacagtgagtcaaaataaaacaattagacaaaagaaataatagaaagaaaaaatagtaaacaaagagaatactagaatttctagaggttcgaccgtgtgagaatggtaatattctactccccttttagttgtattgacataagagacaaagaataaagtactctctctatatagctcttacaatggatctttaagtaattctctcttaaatcactctttatcccttgagtgttctttctgaatcaatttcgtgtccctaaatagtgagattaaaccactatttatagggacttattacatgaagaatttatcttaatctataataattaaataggttgctaatttaattccataattacaatacaaataatgagaaaccttggctcattgcctttattctctacattgatcccacgaatgtagggattatcttcgtgtcataaaagcaacaatgtccatttctgaaattacaaaatcacataacatgttcggtgcacgcgagttgatcacataatcgagccttggtcagatgtctcctagtgattctactcggacatcttgctatgtacggatgacatggatctttctactaatctttgggggctgataggagtgcaaccttctgcccaagtaggagaatatgagacacatgtcatccagctaactgccacttcatagtacaaaatataggataatatttacccccaagtctatgagggaccttcttgatcacacgtgacttcatttggtcaagaatcttgtccggatgggtgacccgtgtcttgaggttgagattgatccgtcatgactttaattgaaagtctctttgatatttgagcattaaatacctcttaaaagttgtaccttgaatcacgcattaatagttgagtgacacttcatgtgtgatggttgtacttcttgtaatgagtactaacgttcacttttgggggggaaacccaaatatttgaattttaaatgatttatattccctttttggatgcctataaaaaaggattaaagattttgacaattttattagccatttttactctcagagaaccagagcgaaaaatttcatcctagttttcttctaaaccttcgaaggaacttgctaagaaattcattgacgttatgttttgagaagataaagaaggctttgaccagtgattaagtcacgtatctctcttcttttagatgattgcaaatgaatatatgcattattttcttgatttcttgccatgaactttctctgttcttgaatttttcttgactgattgtagaatagatagttctagggttttgttatttaaccaacgtttaactataacttctaattctctgactgcgtattgattttgacttaaaatcattcattcccactcgttcatgatattctaagaatttccagttaccatctgagttttgaacttctgggattaggatttcagactttgagtaaaaccctttctttttattcttaatttgatatggtcggcatataaaatcaatttttcatctcttcctccgaccaacgcttattttcttgtctcccaccttttgtcgatgaaccctggtgatttgtggggaggcaagcaccacattgatcaagacttgctccaacttctatacgaagaccaaccctaactccgtgcaagctcatcttcgtctagtgataacctcttaaattctagctttgaagattggaaagtgagtagtgagcatacactgtgcccagagcccgaggtgcagcaccactagtatgccaaccaagtacctggtaagggatataggcgtttcatctaggaattgaataaaggctaaaggcgctacttgcatactaactggacatacagagtccaatctagtctcattaatactctgcctgaaggtcgtccagccctaactactatgggaacacctgaatctgagtttgatataactattgctcggcatacaactgaattgaagtcattgcccatacataaagaatggcgtgaacaaaaaaaacgatgagaaaaactttagagagcgaccctcattgcgccagactattcattgcaattggaatggaacaagcacgacctacgctcaaggaagaaaatgttgttgaagaggacgttgaggtccaagaagttgagaactagggcaaggtccatcctgctactccctccgaggctgaaggagaagaaggagaggaggaagagggggtagttcgagtgctaccttttgttggctttaatgaagagggagaacctatccctaaaataggagaagtcccagaagctggctgagattacgtagatgaggagtacaccaaggcttgccatataaataggagggttccgaggggagcccagttggtttctccaccatccctcctaacattcaagagattgaccaatctcttcgagaaaggccctccttcagtaggttgagtgtttccttccttctcttgggtagctcgcaacagatcctaaagagggctactgtgtgtggtcggtttctcatgccaagcagggtgcaatggtgccattacatctgtacttcaaggagattgccaattattaccatatcagtctaacccagctcactgccaagggacttaaatacctatcttccttgttcgtgatgtacgcttctaaagggtggggcaagccgtctacccacgacacaaattggttgtttgacttgaagtccagccccaagtagaacaggtctaggtacttctagttctcccagattaaagaaaagtggttgagtggcaccatgggtaccgacgtatccaaaattgattattttatggaagactactattttgtcaaatgcatggacaccaatcacacaagtttttaacccattccttcatactaccggcctcccatgacactagaacttaggaagagggctcaagaaatactcagacttcccttggatgcttgaaatatttctgtcttggctactaaggccaattttattaagtataaactctatttgactggcaatggtcaatgggcaagcaggtagcaggagatgttgtgtctagccaagaagaggaagttgtacccgataaggaagctccaaagaagaagaaacaaaagaaggctccccaatgcaaccaagtacttattgagcagcttatcaggatcagggatggtcccaaggaagctactcatccttccctccaagtggaaagaaagggaaaaaccattgtggtcgagcaagaggaagaagactcttctgatgaggatacatgttccttaatttttcgagagggtgcccttatacacgtgtagggtagactatttctcttttttttgacatctctttttcacttgtgtgcagttatgtcttagaggatgttgggttttttatgccctaaataaaac

SEQ ID NO: 380294 - DNA, 1964 bp, Cannabis indica
aaaaaaaaaaaatcgtacttaatatttaaaacaaaattttttttagtaattatataatataattacacataattctagagtatacaaatttgagagtgtagtttgaacctctcaattatctccaattacacaaatacaatctaattacgtaatcagacaaatttataaaactgtataattacttttaattacactcaattctaattctcttttagctttccaaacaggccttcatacgaactcaaaacatttattcctcatttataaatcttttttctccagtttatgattattatgggaaaagctgtaataagagattcatctattcatattattttctgtttttcttttcatggccattcatctcagaaaaactaaaccaacaccaatgacaagaaattaattgttactacaaaaatacaacaacacaagaattattaggtccaactacacttaactttcacaacacctatgccaaaatattgttgcaacttcaagcaatcataatccaacactagaaataagcttttcattaaaaaagaaaatggtggcatcaatttatctttgttttcttagacttgactggcagcttctcaagcgcatcatcattttccgatgaactcccgtcaagcggttcgtcagggacatcattgggaacattatgtttggtgatgtattctttcagtatgctcatgcttgcctctttcaatgaaaccagttgctcagaaagggttccattatttgcattggcagaataaatttctgagccaagtgagaatgaaaccttaaccagaggtgtaggtgttagaactgtatctttgacttgaacctccattatatgctgcacaataatcaatccaataatcccacttcaattacctccattatcattaaaatattttatgtacattataaattcatttcactccatgaggcattttatcaaatacctaatgtccaatgttcatgacaagactcaagccaagaacaattcaatatacaaaagcacaaccttgcaaaacaaaaggctgattaaattttttgccctctaaactttgacatgtactaaattatgttttttaaacttttctagccgttaaaaattctccaatttaaggacttttgtctaatttcattcaattttactaattcggtgattgtttatgtaataaatcatgctgcccaaattttaaaattttcttatcaaaattagacaaaattctttaaatccaacaatgtcaatagtttaagggaaatttttaacagccttaaaaattcaggaggtataatttagtacatgttaagatccggccaaaaattctaattaacaaagcaacataattgaaaatatgcaaatgaatctcaagtcctttaagagaaacagagtacaaatactttaatgtgttgtgataaacatgatataattaattttttttaacttgatcttaaggcataaataaaaacaaaaaacctggcataagaaagaacatgatatctatttatgcataattaactcattgaggtgttttatcaaacatatggtagccattcttaaatagaacaaaaacattgaataattttgatatttttagttcataatactagaaatctaacattaaagaggcttagttacacatacagagtcggaaaccaccctatgctttaaatttagctcttagaataaagtttcattgataataccttaaggttgatggaaagaagacaagatgagaggtgagtaggtcagcagttacagtgtcgagattagagcatccacaacggcagcggcggcgaggacagggaagagacgaaggagttgatcttgtgaggtgagaagggttaccgtagtggcggagacgatgggatatggagaataaagaaattataattttatttttgtaaatttaggaaaattctacaatgcaccccttaaaatagatatattgatgcaccatatttgtttt

SEQ ID NO: 380295 - DNA, 2334 bp, Cannabis indica
ttttttttgctaaacaatttagtcctagaagttgaatgatgaaaatcacgaccacatacagagctcgatttattaaaattctacatgtatcaagatctcatccttacaacttacaagtccaaatatataaatcaatccagaaaagaatactaaaatgaaagttaaaccgttagtggcattgatttttgagcataaatttgagggtgacataaccgaaagagggcgataaaatttgatttcactttcagtcactaaaaaaatcataaagaaaagaaatcagttatggaataagatattgtagaagaaattgacaacaaacctacacaattcaaccggacatcgtcaacttgagtcttaactaaggcctctaatgacaagtgcaacagcttaggacagaaggtagacaaaatatcatctccatcaccatcctggagaagtaataatctgtacaaaacaaaaaagatctctccacgaatctcatcgctgtgttgtggtagaaagaaaaaagcattattagacataccctatgatttggtaatggccaaagagaaaaagaaagttttgatgttttgcttcgttcattaccttggcaattgaagacctccaaccagattggaaacaaggtggcatttatctctaatgtgagcataaagatcatctttctcaaattttaagagaatgcctagacagtgaagctgcaatttaagaaatattaagattatgtaacaatattatactctagcatataaaaaaacaaaatacagtccaaatttgagacaacctttgctgacaaccctaaatcttccacttctttttccattttaaattttaacaatttaagcatcacttacaatccaactggaaattacaaaatttaccctcgatttctgttagaaaataagtgttttaacactattttaagtaaccctttaaaaaaaattaaaaaaaaaaaacaaacactattttaagtggcattttgaggctttttcctgaaatccttgcttttccatgcatagatttcctcaatttctccagtgacgagtgatgaactaagtataaagtctaaaccattgcacttcacaattttctgtaagaagattagctcaaattacaaaatttgatcagaattagagaagtcactacgaaaacttaattctgcttgaagaaatttgattaagactggcaattaaaatgagctcgagctttgaaaataattgaaattttcacttggaaccaaaaatttgctagtaacaagcaaatttttctaacctactgcactaattcttaacaacaaacaaaatttataggtacgaattaataaacaaatttagcaatggacaaatggaattacagattgcagagctcaattttaaacaccacgcaagtccatgcaatcgaagtctcgtgattcgcaaaagctacaagaaaacaaaatccaaagccacattaccatataaacctgacgccgactccagcacaaggcaccggaagataagcgatcagagaccctagctacgaagcttccatgaacagaggagtgttcggaatcggcagaagcgcacagagcagcgacgagatcgacaatctggcgagcgaggggagcgtcatcgaaggaggagagagcagacacgagaggggagacgagaagaagagggtggaaagagaggagtgagcggaggaaaggaggttgggaaatggcaatggagagctgagagagagcgtaggagacatggagagtcggagagtgaggttcggagatgaggttggagaagcatatgagacaaattgagccgccctcattggtttggaggatcatactggatctgtgaccttgcgagcacgatgatgatggtgatgatgtcgttaatggcggtggttggcttgaaacgcagtgtcgcagatgatcttggtggtggttgtcgtaatggctatcttcgaagtaatgggagtagtcttgaggctcctcctccgccgtgtcgttgaagtacatcttttcttctccggaagagtgaaagaaagcgcgcgcaaaacacagagaataaaagggacaatataaattcgaatttgaatttagaagagattttttttataagaatttggaagataaattttaaaataaatattaaggccatgtttggttggaaggagaaatagtaggatggtggagactttaggagtagaagcagagggaggatagttgtgaaagtaaataatataggaaatctaaatacacctctttaaaatagatgtattgatctactcttatctatttcggtatctaaaaaactacttagtccaatttttttctatgatcgtatatattatagttattta

SEQ ID NO: 380296 - DNA, 2473 bp, Cannabis indica
ttgtattaattacaaacaaagaaatgccattctttaggatattaggataaggtatgtctcatactgctgattgaaatgtgttacatatagcatcggtgatatttttgttttgttgttgaactttattggtcattaaatctagtagtatgattatttaaaaacttttctgttgccatcgattgtgtttcattatatatttcttctcttatttaatttttaaatggtacggatatctaatgttatcaaaaggtattctttccatttctttctcttttgtaaggcaatgattgcaattccaaatattccttggtattcaataattgtctagtttcctcaattttgttgctattaatctcttgtaatatgaattgtggggtaggaaataattataaattctccgtttgtatcttaaaagtattttatttatgtgaaatggtttgatcaattttgacctgttgtggtggactgtaccatttgtgatgatcaggtgctctggccagagtctggttggcagccagtttctttgactgatatgattactgctgcatcagtgaagaaagtatataggaaagccactttgtgtattcacccagataaggtgcaacaaaaaggtgccactcttcagcagaaatatgttgctgaaaaagtttttgacctcctcaaggtatgcaaccaattacaacggaatattatgaattaataacacatgctactaaaatgctgttttcttttatcatgtttatctttaatcctgtcaatgttcacacttcacaatacttttccaagagatgctatgaagaacttgctcttttttttctcattatttgtaattgttattctaatttttgttttgtttttgtattggtatcaatatctggtctatgtatcttcacttattcgttgtataacataagaaatttcatatgacttgctaagtttgacacaatgcaataaaatgttcggattatgtaacctatgttttttcaattgtttgggacacaaaagactctttgatggaaatatatttactgcagccttgctttttactaaatgtgaaatattttgatgtggctacaggaagcctggaacaagttcaattcagaggagcttttttgaatgctttatgatggaacttttctgcttcgagattcttcatttgacccctgcaaaatattttttgttacgagggacaagggaaaatgcctatgctcataggaactgtaacccctgtggaaagtttcggctgaagttgaagtgcatcagtgaaactcgttccattaattaaccaagagtcgttgatggtattttcctggatctcctccctctatagatatctatatatatgtgttgtaattgtttgcaacaggaaatttgatctggaatcgtagggattctgaagatttgtgggtgaaattggaatatcctaagttgatgtatagacaaccaaattgtggtatcacggttgaccatattcagtgattcgcgtgggtgaggaggacaggttgtttgggttatctttttgtcttattttttattttttatttgtatttttgggtttgtgatatatatagtacattcaatataaatcctcattattttgtattgatataagaacactaatatatgctgtgtatgaaaatgagctgtgaattttacgaaaaaagtataatgagtgttgcaaattaattcacttatgtgctgctggtggaagccctccatattaaaaccggacaagaaaccaccttaatataattagggacacgttcaatgtgcacttttttatttaattttttttagtctattaatgcgtgtaaataaattgtcatatataatatattagatgaatgagttattcttattactaattagttttgaggtagaattctttgcatcttattttaatacggtattagagttgtttgtgatccgttgtaagtttaaaatgttgtcagtctaaaaagacgagctataaaaaatttctttgtgatatgttttgactctgtaatctcttaaaaggttgttatatttacacgtttcagcctcaaatgtgagaaatatgtattaaagttagtttcacattattaatgtgtaaaaataaattatcatctataataaattatcacattgaattcatatatgttatctctgatcatcagattaaataaaatgaaatggccaaaataaaatccaatttccatcgatttctttgcctctgtttataattgttgtctgtatcagtctttgtcggtaagagataagatgaatgttaaagctttgctgagtattaaataaaattatgaaattattaaacctatgatgcaaggcagctatatgtcatgagtagggatgcacattttccccacagggatggggccccgcggggacgtgcccctaatggggcggggattccccgtctaaatggggaacggggcggggacggggatcactttttgtccccgaatgttaaacgggg

SEQ ID NO: 380297 - DNA, 6320 bp, Cannabis indica
attcctttgtttggttgtatttttataccattttcgtggaatgattattctattttgaaatagaagaaaagatcgtttcgggaaaagatttactaattcttttttcattcctctcaaccaaacatacttttttgttaaagctcattacttactatcttttatattgaaaaaaatcatacaaattcatgaggggttgttgttgttgttgtgctcatttcattaaacattctcattttgggaaactgcccctcatatctgttcttcttgattgtttttaggaaaatggttttgagaatcaaaacaactgaggggacaaagaggtcagcaagattgagtggtatgaaccaagagagaaaggtggtaaagtcagtacagaagtcaaaaccaaagaataagaagattagtaacaaaattgatgccaagaaacccaagaagccaccaacagcgttcttcttcttcttgtaagttctttcttttattcccttctgttcttcagtatttactgggcaaactttgtcattttggacattagatgtggttatgtacttatggcctgcattgcatagattgtgtgtgttcactggtgatatttagagagaatagggctgttcattttcctcaagtgttcgccgttctgattagcaatgtcatcatactaatgggaatgtttacatgttgaaagtaatatgttagtgtgtgtgtgtgtttttatagttttcttggtgtattgtagttttatttttctttcttttttgtaataattgagactgaaattgtatttgacttgacattttcgatcgaataatgagataaaatgtaagttataggtggttaaatatgttggttatcttcattctttgccagtagtgagctgaaatggctgagaagaatacttgatatacggtggcatctatcgttcaatcttcctttgatgagttaatatttttcgaaattcttttgaatacaaaaaggagcaatgacttttaacaaagtctccatgtagaaactctgcctcccctaatagagctttaaacttttctagtaaagtaactagattgatgtgttaatcatacaatccatgacagacgagaatacgggtctaatcaagtcaagtttgcaggtttcatggtccttgaagctgcatacttgattgcatttgtttcttctgaaatttataagtaacaaacttacaccccattacattttgttcttttatatcttatggtcattcacatcgaaaatgttgtacttttgtacccgatcgattgaaagtcttagtgttggagctcttttctgttcctatttggtttcatttcctgagattatgcagactagtttgttacataatttctttattgaccatttgtattcttgttctttcaagggaggactttcggaaggtgtttcaagagcaaaacccagatgtcaaatcaatgcgagatgtacgataaccagtgtcatattactttattgattttttactaggtagtttgatattactgattttggattcttatttggtttattaatggattcactcattaattttcttctcagattgggaaagcatgtggagtgaagtggaaaacaatgacatatgaggtttgttctacatctgtatatgaatttgatttctcttggcctttaagtactaaacaaagctagattaccgaataagagagttcgacgatttgtgactgaaaaactacaagggattgttgctgtgtctgttccaggaaaaggttcaatattacgacatagccacagagaaacgagcagcgtttgatagtgccatggcggaatatatcagtaaaaaggtaaagattgccatatatcagtatcgaaacacattttttatcgtttcgtttttcttcatgctctaatttaaatcataaattcttgcaggaaagtggtgaagaatccgaagatgaagaaactgaggatgattcagagttgggaataagctgaaaatttggaaaagcaataatgttcatgtagaggttgtagttaacaagttgtatattgatcaatatgggacactggttaatttctcttctcaaaactattgtataatttttttttgttcatgttttttattttctttttttccattgtaaagaaagaactacttttatccagtggtatggaagattgtaattgtaggtttcatcatttagtgataatttgttcttttcaacttcatttactccctataccataatccacctttaagcaattgattatctaagatattattctccaattctattcataaaaatttgtgtatttggttgaaatgtatttagctaaatgtagaggatgattgaaatagctaattactcaaaaacttaggaaagtgacataaaattcatgaagtacctcaacaatggccttttttagtttatgttcttactcgaaaagagctgtcaaaactaagaacattgcctcggtaggatcaaacccaagtaattcgaaaacccatctttcgaaacaagaaaatcaaagcaaaagtaagttggggttctcgcccccatctcctttatgctaccattctgggagcacctgacctcaactctgtcggttaaatttgatgacgatatatttataaagaaaatcgatttagtgttaaaattttgatacatacttttcaagtctaaggattgattggcagttcaatccaattaatcaccatccaagtgtaccctccaaaattaatatctgcattgttagatattacaaagtgggatacaagttttgatccatgaaactattctataagtattcttctttgtttcttgttctgttttttcagtatgaatatcaaaaccccacaccatctacactttacacttatcaccattttcattaacaaaaaaaggaaaaggaaacctctttccaaatgagattatatttgaaagttgaattttggcaacaatttcaacaaatcaatatcttttggtatggaaaaaaaaaatttaattcaacaaaaattttacatgccaatttggtacttcttgtaacctcatacataaacttgtgagtcattctaagttctgtctaataacacaacaagaaagtggcatggagttacagtttcagagtttgttcttcatttgcagtacgaaaaccagatgatgataatgaattcgaaatgctccttacttctgctatcattgcaactacatcattgagtttgttaatggctgatcccacaccctgcattccatgattacatgtgttatgtcagtttaaaatactagattgaagaccgttgagagctgtgataacgaaggttgtattatgcaaaacttaccacaccagcagctccagcagtgatggccattggtgctgtcaccgcgcttagaccagatgaacacatgacaggaatcttgacagcccgcgagatggaatatgcagctgctaatgtcggtgttgcctaaaagatgatcaagtttcggttagttaagcaaacacaaacaacgaaatccctcaaagaaagtacttttttgataaaagtggcgaggaattcagctagaggctatactctccaaaatacaacctttcgagagggttgttctctcctaggaccgagtctattttatttcctattttacacttaacagctaccaagtcttaatcccatgaaagggatttggtaattccctgccctaaagctattcactcggtctcctagagtaaacaaagtgtattggagcttatcagaagatacacaaagtaacaaaagatacaaaaccaatgtcaatagttataccttctcaatcaaaccaagaatgccagactttgtagggttcgagcacttccctccttcggtttgaatgatgtcaacaccttcttgctccagcatttccgcaagcttgacctgttttcattccaaattcatgtttgtaaatcgaatgcacaatgcaaaggagtgaatctccctacgaaaccaagctgctttctgacctgatcgggaagacttagcgtgtgaggcacagtgactgataaggttatggatggaagactcctcttagtctcctttgttagattcagtatctgaaataagtactcacacaataagaaaataatgatcattttcactagctttgagttatttcttgatcaatttacatcgaaattatacctgttcgggagtgaatatcacacccttctcatagaatgaatcatagtttccaatctcaacctgcatatgccataaacttagcttcttaagaagaaaatcaaagaagttaaacctcaaattcctcttaaattacagcaaaggtaacgagttttgttgccaaaccattgttgctcctgcctcgaccgcagccaggaatgcagctggatctacagaagaaacacaaacctgacaagacactaaattagtaatgaagtccatgagacaatgcaggaattcaaagattgtaaaaatttgttaaattagacaaagatatgttatttgggtttgtgttggaaacctctcctaccttcaaaaggccattattaaaccaaatttcacaagaaaaacagaaaaaactagaaaccacacacaaatgcagacaatgttgtagttggttcgagttttcagaatgaaacctcgacatccacggcgggttatcgagtttctcttagtacaagcttcaaaatcaaagctttctcataagaaaaaacacattgtcacaactaaaattgtattcagaatcatgtcaatgaaatggataattccttttgttaagaaaaatagttaaattctcacaaatgaacataataaaagaaaaaaggaaatgattactaaaagtgtatgaacttacaggaagagatgttaatgtaatggcaagcttaaccaactcaggatcacaagctatatccacatgagttgctcctccctataatagcaaaaacaaacattttcacttgaaaaaaaggcaaaaaaatatttatatacagaaaaaattcaacagtagggaaccatttcatttacagtttcgagttcaaacattcagttgcacgagtgaaattcaccattttgaatatatttctctaaatatatttcaattcaattggttatgagaccaaccttatctgcagcagaaacaactgaagcaacattttccttatcaaaattctgcaaacctgagataatctgtaaacaaaagcaacacaattcaaagctaatttaattaccataaaattcaccattaaaaagcaaataagatagaaaaacaattaaaggttttaccttgagagctttgcagttatgaaattctttcaaaacaagttctttagaagttgaaagaagtgctttggtagtaaaagaagaagacccttttcttcttagagccaaaaattgtgttgaggaagaagaagaagcatgacccagaagaggattgtgaatgggttttagagatatggagtttgaagaagttgtcatgcacattgaaacctccatttttgtctcttctctttctctttagctcaagttgtagttggaaaggaagagataagaagagtagtgttattattggtgtatttatcatactaacatcaaaaatgttaaatatgttaaatgaaccaaaaagaaataaatatgagaattattccttgtttttttaacttacttttttttttttttttaatttatggttttagtttctaaagtgattacaatgttagttgcaataagggtttttatacgattttttgttgcaatttagattgcagcgctagttgtaataggaatttctatgtagaatttcgtaaaaatgtaaaaaaaactgttttaaaatgtaaaaataaaaaaatttcaaaaaataactatattgaatatatgtacagtgtaaatttatagtcgttttatcaatgtaataattttttacaattgtaataagcgtatttgaaaattatttaattattgaatcgtaaaattattaaaataataattatactatgttttaatatataaacatatttgaatataaaatagtaattataaatgaaattccaatatcttatttagtaaaatgattcccctaattatatagaatttattaagtactatttaaaatgattttttttttaataattagactcaatttttatagatgacaataaaaattggaaaatataattaaaaatctattaattaccttaaattatacaattttagtatagttagagtacgcacattagatcttttacaattttactatacaaattgaaaaatttgaaataatttacaatatagaaaataatgtttaatcagtctattttacacacttataaaataaaataatcacacgtgcaacacactatttgaa

SEQ ID NO: 380298 - DNA, 3021 bp, Cannabis indica
aaaaaaattaggtaaggaaaaaatttgtcgacaaatgtcatacgagatattcaccaaacactatttctaaaactatcgatgtcgcaacatgtcgtgaaccatgtcgaaaactttattgcaacaaattgctactagttgctaaatttcattctctacttcaccaaacactatttgtaaaactgtcgacacatattgcaaacaatatcgatagacgtcgcaaaatcgtaagtagataacaaatatttcttattgcattaaatttcgtggctacatgtcattaaaagtcatccttaatctccaacatactctcatgttgccagatattaataatggcatcgctaaatatcgttaaaactcaaaaactaaaaaaatagaaaatgcagaatgtaagtagttcaagttttaggaactaaacaaccaaatcaaaagaaggatatgtccagatctattcatatcaacctaaattcaactcaatgtaactaaatctaacaataattactaaataaattacatacccattattttttttcaaaaattatgttggtgagagtttgagttgctcctacacacttggttgtcaagctaagttgatggaatcggagaaagggtgattcggcaaagggtgctctggcaaagggtatgtgtgtttgattttctagaaagagagagacgataatgagagagggaatagaggggaaggggtttagttatattatttgaggggtatatttggtactaataaaaaaggtagtatatgttagggtatcaacccaagtctcacattggaataatagagaagagttgtcttagatataagtcttccacctactccattactatgaggccttcgggaaggtgcccaaaaacgaaatcgtgagggcttaggcccaaagcgtataatattatactaatgtgggagtcaaggtgaggtgacagcccgacaaagtggaagaacgagacctaacaagtggtattagagccaatggtttgggatagtgggctgcattagcgatgtgtgagagaagcccttattgtgatgacctagcgattgaagatctatatggtgtcttgtatcgaaactctatctgatattgtggtggtcaggcgacgtatcctgttgatattacggcaatataagatggagatctatgttaatacctttattgaaagtcttcctaacaaagatgatggtcaggcggcggattttgttggtgatagtggcggcaaaaagtggtttccctggagcggaggccacgagtatgtggtacttactacttggtttgaggggtggatcgctagggtatcaaccccagtgccacattagaataataggcaagagttgtcttggatgagtcttctacctactccattagtatgacaccttttggaaaggagctcaaaaataaaattatgagggcttaggtccaacgaacaatatatattatactaatatggaagtcaacctgagatgtggatcaaagaaggaaacttaatagtatattttgtttgatgtttaataaggtatatatttgaggagtataattttcggttgttattagaccatggaacacatttaattaaccatggattttcaaattaccttcatataattctaaagtaagaatcctatatacagtgtaggttaacaaataaagaaagaaaaacacaacttgagtacggaaaagtatttaaaagggcctttaatttattactctggtttaatcaacatcaattcaggaatggattgattgatacagaatcgtgagtagctgagtagattttatcaggcaaacagacacaaataaagtgatcagtatttatttgtgtgcatcatgttaattaatcgtgttcaataaacactagctaattaataattaatatatttgttagcttaattaatttttaatatactagtgctactgattcagtactaatagtttgttctggagtttaataaaatattgttattattcagatatttaataaggatcaaatcaatgtcttatcgtcgtataagatctaggtaatttgtttatatcccgagtctattggaaagccccatttgaaacataatataaatgaatcaataatttgtgcagatttatatatatatataatatatgtaaacgaagtgataacaaccgaagattatatatatatatatatatatatatatattttatggaatggtataatatatattttatggaatggtatagcaccacatatatggatctatgatttagttggaaacattggacactttcatgaaaatgaaattactcaatatttcgtttttacttaaattgtacataattaaatttattatttccatacaactatattgattaatatatatttatttataaatgagcataattttcattatctaatatatatatatatatatattataattaatatgtataaataaataaataattatgacggttgcataacgcaactcatgaaatatttctcatctactcaattttgtgtgatatttcaattgctcatggcttccagaggaatatattcattcgttggggacattgaaaaggactaaagtatagtttgttgctctaatgataattaataatgtgattaattcagaaaaatacagtgaacaaaatcccgcttaatccgttttgactacatttcgttctttgcttaaataatacgaaattagttgctctttaattatgtatgtgtatgaatataattaacctctgtacgtatcaaaatataccagtcgtaactccatcatttgcttcatacatacatcaaataataaaatcctatgatatcactaaatcccacatatgtaggaaaatggacttttaggaaaacatccacaatttactttatgtaagaattattttacaaaattgtaatatatgatacgaatttacatatcattgttttcatttcccaagttagcatgaaatattctttagtgctctttggaatgggtttgaaaaattgtattttggcaaatgtcagttgtatataaaaaaatat

SEQ ID NO: 380299 - DNA, 926 bp, Cannabis indica
tagttttcatagagtgcgagctttatatcagggtttttccttttaattagattttgatgaggctaaattttacccaaaaaatatacgtccatacaatttttgcacatatgttgtatcaatgttaattttatacaatatcagcattaattcggatttaaataataataaaaggaaataatagacattcataattaaaatataataaatatctgattagggtttcttatttgatggttaattattgtctttcaaattgtcaaatatatatcatttcaaaaaaaaaattgtcaaatatatatatgtctaaattcattgtatatatatggtgaaaatcattaattccatgtaatatattttgtgacacaaaaaaaaataccagaattattatccttaattaccaaaaataattacacaattattaattagctaaatttttttattatacaatttaattaagagttgcttttttattaattagtaaatatttgttccaataagtacactgagtccttttaaatattgtttaaattttagcaaaattaatatagtatatagacaagaagctctaatattttttaattacaaaacaatgagctatatatatatatatatatgtattaaatataattcttattcaaaatataaaaaaaaatttagatagtcaaaagtactcggaagtaagagacatattaatttagatagttaatcaacgtatataacccacattatggtacgtacctagtatacaattatattaaccaacagattcaataaattaattaatgaaataatttattcaaaagtcaagatacatgatattctattctctacctaaacttctagctagctcaactactagaacctctatccaagaatacacttgagaccaagtaaattatattataattgagaggttataactaaat

SEQ ID NO: 380300 - DNA, 1106 bp, Cannabis indica
attactcacaggtgggaaggaaaactaatgcgaagaacagatgcaacatctagatctgatggttggataacaatcccttcatctaaaacacgacacgcctcgtttaccacaggaaacagtaacatttccacaatctcttggtctgttacacttatgggctgccacaccaaacacatttttaacatagaaaactactacactatcaaatattgatattacaaaggagacaaggttaattttgagtaataattaacaaattttaccttactgcctggcataatattcacaagtcgtctagactcctccacagttggtagtattgtaagatctggttttggttgtcttcccttctcataaatgtaatatcaaccttccatttttcttacctaataaatgaacacaagtaatgattagctataacatgacacacataaacttctgtgcatgtatagtacgtaccatttcttccacttttgataaagttccaccaatggggacacaaatgttcgatcagggtatgccttagcaagttcatttccactagctattgatactttatatcctattaaatcttgaagcctgcagatgattaaggttttcatattaaaatcctcaattgagacttggatttgcaaccatacataggaattattagtggttcaagaaaagaacataatggaatgggcccacaaggaagccaaacttggtgatgaccctatctattctgaaaaggtccacacctaactaagtgaaccaaaagatgagaaccttgtgctgtagtgtagggaaagaacgttcgattaactgcaaagcctgggcagtttctcaccacaactgcaactttgtttatggtttttgcaacactcaaaaggtcaactatcacttgtggtgaagttttctctgttcgcacaatttccaggaaaggcatcacatgagcagagcagggctgtcaataaagagtagtcacataagagaaaagcatatcagaatatattataaggtttgaccaatttatttgacattgttgggatgttttgtagtactgtttttatagtgtttgtaaagtccttttttggcaagttagttgacaaaataatttttccatt

SEQ ID NO: 380301 - DNA, 4364 bp, Cannabis indica
gtttttgtgttttttttttttttttttaattggggagtaggttgagttggaaatggtaatttgatatttttaggtgttaatttgtgttccgtcagtaggaaactaagagaaagtagaggaaaattgtaaagtttgagactttttaactagtttaatttggaatatcgaatttagcaaactcaattgggtaatgcgtcggtggtgagatcggttgaactctctaatttgttagaggaatatagaaaagaagctttgaaaactagaaattcaattgtattcctatatctttctcttccataatttaatggtcatatatttcttttacgtttctcttcaatgaacaaaattaatatctcacattttggtgttgcgaaattgtatattatgtattatttcctttagaaagtgaagtttttttttatgtctttttattattgaggtataactttttctgcttttggaagattgcttcattcaataggtttctttgaattgtggaataaacatttcttctttgaagtatccaagagtgagttttagtgttttactttaaagggtatcatggaaatcgaaaactttcgctgctctgaacctatctaatgtaatctcaaattagctaattacagtttcaaaaggtttcatttttcattttgtattttccatatatagcacagattattctaatcaatcactgtgttggcttttcttctttagattgtttgatggagttgacgcttacataaaacattacatttctgtttcagttatggaaatgtgtatgtatgcatgtttgtgtgtgtagcattttgtaccccatgtagtttatttatctttacagctgacttggcgctatacgttcctatacaattctaattaactctcacaagttcctgtggcttttgtaggttgcagtttctctagtcaactgctcgttgaagaaacagtgcaactttggtgcaaactttgtggtagttgatcatgccttgctaaattaaacatatgaagacgacttttagatagaaaggatataaaaaagaaggttgtgtagggattattttttatcttttcatttgatcatggagtctttatggaagcttttgtatttgctggagcccgctccaattacactaattgtgactgcagtagctgtgactttcggagctgcatttcgcgctcttaactatggaaaagaaatggagcgtaatcgtgatttttcagaagcatcaattacattagatcggtctcaagcactcatgatcccagtaatgagctctattagtttgttattgatgttttacctgttctcttcagtctcacaaatcctcactgcattcacagccattgcctctatttcatccctgtttttctggttctctccttatgtagcctttttaaagtcaaagtttggtttggccgacccttatgtgtcacggtgctgctcgaagtcatttacaaggacccaagggctgctattgttgctgtgttgtggtacagttgcatcttggcttgtctccggatattggatactaaacaatttgttgggcatatctatatgcattgcctttgtgagccacgttcgtctcccaaacatcaaaatttgtgctatgctccttgtttgtttgtttgtatacgacatattctgggtattcttctctgagagatttttcggagcgaatgttatggtatctgttgcaacacaacaagcatcaaaccctgtgcacactgttgctaatagcctaagtctccctgggctacaaatgattaccaagaagctggagctgcctgtgaagattgtctttccaagaaacttgttgggtggagtaattcctggaggaaatgccacagacttcatgatgctgggtcttggtgatatggtatgacaattcttttctcactattactatatgatgaacatcaactatgtttatagtgatacaatcaattgttactgatgaactattatgtacattatatatgtacatatattgttcaatcaatcattataataaaaagatgatcctgatgtctgttcgtgttcaaatatgacttactgtttagttgctttcctaatctggggccaaaacttttgtagtttctgtatatccatctttctaagaatcgtgaaatatatctttgcactttaccaatttacaatatgctttgtgaacttattcatcagtcatagttattacaagtatcaatccatggtgtatataaaatataacattttgatcatttttttttgttttgtgacaatgatatcttttggaatgcttgagttcaagttatcttcaagaggagaaaaaaaatgctctctcttttccccatttctcggtctctgtaatctaaaagaaacgtcttcaagatgagaacttatacaattctggttttttactatgaatatcattctggcttaatgatactaactgtcaaatggttcataatttatttctaatgttgttttgctccaggcgattcctgcaatgcttcttgcactggtcctctggtttgatcatcgaagaagcagagatacggtaactctcttagatctacattcttcgaaaggacacaagtacatatggtatgcccttcctggatatgccattggactcatttcagctttggcagctggtgttctgactcattcccctcaacctgcccttctttacttggtaattttccagtgctacaataagtccattttcagtctttccgagctgtcttgcttggtttgtacttgttgatttttccttccattaactttgtaaattttcttaatgaacataggtgccttctaccctgggaccagttgttgtcatatcttggataaggaaggagctggtggagttatgggatggccccatgtcaaatctcactgataaagttcaccaggttgatgtttaagcttgtttatctttgtatccaatagccacatggtgcttgtggaagagccatttgaaagttgtaaattcactttggaaatcctgatagaaaattagcaatcaatggttattttgttataatctgattttgggctttacacaatgcccttccagtactcaagtttcactaatgaaagaagcagagcatatatatgtgaattgaatctcatcctctcctcccttcttatacatgaataagttcttgccataagaaatttcatacattttaaaaatgaaaaggaaatttaaaatattggtttttgagaatatttagatatattttgtgtagattcggttattgatttcagaataaggagaaaaattagaggtgcatatctttatatttgaaatgtgaaactatttaaggtccactacaataatggtaaaacttatatttagtgttgttttaacattaaaattaacactaaatttttatctatttcaatcataatactaagaagtacattttagcaaatcttaataattgaactattatttaaaacttaaacaaaaatctttatgatgtttataatgccttctaaatttagtgggacactataaatatactcatatttagattaatgtttacagctagttggattgcatttagtattaaactacactatacttgacattttgccatatggttggagttggcctaaaggaactattaaagcttccttgcttctttcttgcttactccaaaggaagaagaaaaagaactcgtctgattggagtgccactctccaaatctaagtaggtgtaattagaccatctttaaaaaattgtgctatattatatttacattaatttttaatattgtattttaatgcagaattgtaagatttaatataaaatttaatacttatatatatatataaataactttatcattgattttattattatttaattatataaaacaataaaaatagagaaatataaaaggtttataattaggctttttttaggtataaacaaaaagacaattatattaccaaaatacagtaggttagccctttaaacatttatacagcctacaaaaaaatattacaataatacatcctcttctaaagcttcagccgcacgaaacaaaaaaaaaaataccaactcaaactttgatcgatcaacccagcaagacaaccgaaatgaaacccaagcaagcgaaaaatcactattaattccggggacttaacctgagaagaagataggaataaatccaaacaaatattatttcgtattgatggaagaaagagcaaaaaatctagttcgaaactaaaattcaaccctaaattccagtttaattcacataaactaatcctcataatatcaattttcagattcataaaatgtaaatatctaacaaataggtgtggagctcctaatcaatttaaattaggtataatccaaaaaaaaaaaaca

SEQ ID NO: 380302 - DNA, 1738 bp, Cannabis indica
tccaaatccactgggccaatggataagactatcaatatggttgagtgaattgggcaaatctagtcaatattgaaatagaataggtgattggagatcaatttgaaataaatttaagtttttgagttttgatggaacaaagcaatgtgattattgggattgtttgtggaggtagcagcagcagtaccactctttaattctccaagtagttttcatacaaagaatgtggacactcaccatgtcacatgcaattcatgacccacctatataagacccatttatacaactaggtcctctcaatttgggggcattaaattataaaaccacccttttacaatacaatccatactatgtacatatatacatgaaactttttaaacatccttatcatattcatacctacatatagtttcattttcatgattgccaaaattattattattattttgaaaccaattattatttttcaataaacatcaacataatgttatttatttggtttgttatacattgaaaatgctatacacagataaaccactcaataatacatagtttttttattattattttcaaagaagaagtaactagtacaattatacttacatcatattgacattaaaatgaatggagggaaattaattagtcaaactacatttttccttttttaattgttttttaaataacataattttgttgcaaatttattatgacatgtattcaatttcctaaattgttttatccaatcattatctctatataccacagttgttctcactaattgtaggactctcacatttaaactcatcaacttgtgttaaaatcaaattaaatattaaattctatgtatgtataaattcagtcaaaacactcatcatttcattcattccaaacccatcattcaaaaagtttttcactaacaaaaaaaaatcacgttattcgcgaggccgaacaacaatgatacaaaacctaaacctaattgataccaaagtaaaattgatggtttttctaggctatcttcctatcacacttttaatttattagtttcattttaacattaaatatatatatacattatatttgttattagatattactgtttttaactccaccatgaggaggcagtgagatattctaacgatattacatagtaattattaaataaaattatgttaaattgaatacttaattctattaataacatataaattctctaagacatatttattgaaagccaaaaaatataagagagacactaatttcgctcctatataataggaaggcatgatgagaaattataacaactttatatgtattacgatgtaattaattaagctaattgtagtattatacaacatgccttttattaaggattttttttatggtcttgaaaataaatttcaaacattttattaattttaattttatttttggtattataaattattttgagattattaaaaagtagtgggatgtttattatattaattataatatataatatgatactttttattttcttttttataattttttcaaatatttgttaaataaaaaaggataattttttcaattatcaaaaataggacaaaaagagattgagcacttggggtagtagatatctgtcttttgcgagcagagctcaattaattcactcagttttacttggtcttcgtaattactggataagcatttttgttcttcctcacagtgtcacaaaggaagttaaaaaactttgtagagg

SEQ ID NO: 380303 - DNA, 7037 bp, Cannabis indica
cttttattaaactaataaataattgttttttttaatattattctatatacttttgtatttattccaagcctaataaaaataaattgcataattaattagtttaataatataaaatgaaggtgtctttaggtgttccttcaataataatacctacctattgtctcttgtttttttgtgctatttatttctttcaccttttttcttattcactccaattattttcactttattatattaatcttttacatttttattattccaaatattaaaaataacactttcattacattatgcttatatttacggtccaaagccctaaaaaaaaaatcaaaattgtctaggaaaattacaaaagaaaaatatttttttaaaatatttgttataaataaaaattatattttacaaatactacctttccttatatttgaatgggaaattacaaagaaaagacatattggaaactaatttctcaaattacatttttctattctaagttacctaaaacaaataaaaataataagtaatcatacattcacatagtaatttattgataaaatttaaactaatttacggtataaatatttaaatttaactctcaattgtagataaataattaagtttaatttttgacagtaataatacttaagttatatttctaaaacttaatagttaggtacctactgaagtttcaaaaatataatttaaatagtattaccgttaaaaattaaatttaaatatttatctacaactgaaagttaaatttaagtattttcgctataaattattttaaatttaaataaacaaataaatgtaatttttattgaaggataaagattgtattttcacaaattacctttttttttatttaaatcaaaaattacaaagaaaaggcttataaaaactattttcaacaaattaccttttttgactttaagttacctaaaacaaataagaacaatagtaatcatacattcacatggtattttttttattgataaattttaaataaacaaataaataaaaatgaaaaaaaaggaaagtaagaaaaagaagtggaccccacacagagaaaaataacaacataaaaagactgagaaagagaagaaagagagagagagagagaggtttcgtactgttagagagagaaagagaaagagagatttctctgcaactttcttctctctcttcagagaaagaaagaagaaagaagaagaaaaccccatttacagaagaagaaacccatttcatcatcaatggcgaaagaaagagagaacaggaaagtgttagtgaaagtagtatggagttacgcagctgagcttaaactcattctcacagctttacttatcctctgctccatagctacacttctccagttccttccttctcgtttcaccatctccacctccgatctccgtgtctgtatttccagagtcgcttcttcaacttcacaaactcaaaacgatctcgtttcaaacacttcttcttcttttaattacgttcctcaaaacgacatcgtttctaattcttcttctaataattatgttatactaaacgacgtcgtaactaattcttcttctaaattaaacgacatcgtttctaattcttcttcttcttcttctccgatttcaccacctccgcctccgccgtctccgccgccggcgccggcaacagagcaagatcagcttctccctaatggggttttgaaaagggcattcaatccttacggttcagctgcttacaacttcatcaccatgggaacttacagaggaggacttaacaccttcgccattgttgcaatagcttcgaaaccccttcacgtttacggaagcccaacttacgagtgtcaatggctgcagaattcttctccctcctccgttatctcaactgttgggtacaagatccttccagattggggttacggaagagtctacacagtcgtggtggtcaactgtactttctcagagaatatcaatgttgataattccggtggaaaattagtcctctacgcttcaacttccggcgcaggtgaccggaaattcaacgtaaccgacagaattgaagccttaactgaagctccaggaagtttggacactgcccttttcagttcaaaaacctaaatatgattatttctattgtgggtcttcactgtacggaagcttgagtccacagagagttagagaaatggttagcttatcatgtgagattatttgggccaagatctcattttgttatacatgatgctggtggggttcatgaagaggttatggaggttttgaagccatggattgagcttggttatgtgactttacaagatataagagatcaggagagatttgatggttattatcataatcaatttatggttgtgaatgattgtttgcatcggtataagtttatggctaagtggatgttcttctttgatgttgatgagtatttgtttattccacctaagaacaccattaaaactgttcttgaatctttatcagattacaatcaattcactattgaacagatgcctatgagtagtaagctctgtctctctgccgatgctggaaaaacttacaggtattgattttttattatgagttaataatgattcaatttttattaactttagattgtggaattacacttattgttgttgtttttgtgtttaaaccaagttgggtatttttgtcacattgttatagtatattcttgttcatgtgattggaaatttttgctaggtggaaaatgtgtttagatagacacaagtggtttggtggaattgaagattcaatttttattaactttagattgttagtttaattacacttattgttgttgtttttgggtttaaaccacactgttataatatattcttgttcatgtgattggaaaacttttgataggttgaaaatgtgtttagatagacacaagtggtttggtggtatgtgtgtgagtgtgtttggaggtattattagtaggacagacacatgcatatgcttaaatgattttagatgatatattagattcttctttctttgattttctaacaaatggcagctggaaatggggtgtgtttcatttcaattttttttccttttaaaagtgacaatttccttattcatgtgattaggacttttggtattgattaacttcttctttgttgatctatagtatttaacctttaccttattcaatcattaatgtgtgtaaacaatgttgagttgtttttggtttagataaattagatccacaatgataccatatttgaaaatatgtcaaaagaaaatgatgtaaatctagacataatgaagaatatctaggattagattgttactaacggtaactagtcattttttaaacctttaattaatttattttgaccaaaacaacaatgagaaaatagaatgagaaagtgacttataatatcattgtgttgatgttgccttctcgtgattcagtgttgactattaggtttgataataagacacatatcttgattagcaagattatatgcttaagtaataataataactaaaataccccatttgacttatttggccatatcatcatgtgaaagtgtttttgattagttgtaaatgtgaacaaaaaaaccattgcaggaaatggggttttgagaagcttgtgtataaagatgtaagaaaaggaataaggagggaccgaaaatacgcggtgcagcctcgcaacctctatgcaacaggggttcacatgtcacaaaacctggctggaaagaccacacacaaaaccgagggacggatcatgtactaccattaccacggcaccatagctaaccgaagagagccctgcaggaaccttggtaattggagtagtatcaatttcgaaaacaacccttataaacttgacacaacaatgagagacattgctggtgttgtcaagaaatttgagctgagaatgattggaacaagattacagaaaactcgtcaataataaataagaatgatcacatgatattgataccctttattttattaatttgttgttaattagattgaatgatgtacaagggaaaaagagagattctttggtgggtgggggttgggattgggatgggaaggttcttacttgtaatatagcattttcctttttttcttatttttgagtatagatacagtgtggtacattatatcacatgagaccctcttttgcattaattctttttgtttaaaaacaacagcaaatttattaagtattatatatatatatatatatatatatatatatgaattggattgattgaagtgtcggtaaagagggacccctcaagtttgatggaaaatgtgctgcttttgtctatagattactttgttgtgtgctttagctcatggccagctttgctttgctatctttgtaattatgcaaatgtataaatatggatttttgtttatgtgaaagtgggtatattggaataattcaataaaagtgtattttgctttcccttattgctatatatatactatatatatatagatatatattgggtattaatagtgtctaacactttttataagtggtgtcttaaaattaattagtgatattatttaaaagttattttcttaaattatacggatttaatatttaattacaccaataacactatgacaccgaaaaaagtattggacaatagtaccatttagcaattctttatgtatatttaagtcaaagagcatgtggtgtggtgacatgtctcatccttaaccataaagcacaaatgataaaagagagaaagaaagaattggccaaaggtaaaggttaaaagaagaacccaccaaccaatcattatttacttactaatatgtcctatattataaataaataaataagaaaaaagtctatttttatatttaccataattattcccttgtatttcaaggaacctttgtcttttattagctaggctttaaattattcatgccacttttctcttaataattgttagttataattagagatatgtggatgatgatgcccttgtttatagatgccaattttcaactattatgaataaaattacattaattaagctaagttattaaatcctatatgccacaaaattagatctttatactttatagagtgtttttggcttcaaatttattatagagactacttttgctttgggtttgagagagaggaccactttgaagaaaaagaatagtgttccaaagtatataacaaaatattattggtttttactatacattcacttatcacttgatagtgacttaactatttctactaggtcttttttgttcttcaacttaaaacaaaaataaacattcatagaaatcaaattctaaactcataaataatagaaaaatgggacatacattagctaggtactagtggttttaagcactagtaataccacgagatagcaggtacaaagttagaaataaaatttaagtgggacttatttatttttacagtgaaataatgtaaaaggatattcatagtgcttagtacttttttataaagtgttataaattattgatataatttaatatcgaattccaattatttttcttttaataatgattatagaaaattaataaatatatttatacgacgctacttcacaatggtactaaacaccacggtgcttaatagtaaagtttttttttatatattatatggatttcaacatttaataaaaaaaatgtagaattaaaaataaaaaaataaaataatacacaaatacattaaaataaattttaatttaatcacattttacattaattgtaaggttcaaattctaacaattatacaaaaatagactatatggagttttgaacatgtaatctccttaaattttagactcaactacaacaaataatataatttaataataatttaccagatatataattagtataaaccttaaataatttataattgagttaaattttaagtgggatttttattttatgtagcttcgcccatgtaaagtatatgatatttaaaattattgttaatttttttagaaaaaaattaaagttacacggatagtattatgacaactcatagtaatattggatattgatctattagtaaaattttacttcaatatatagtaatctattatagtgaatagtgaaaagaataaggtgactaattttaccatttcccaataagaattgggaccaaaccaaagaactataatttagatacatggaccaaatgttattattatgtctcttaatttgttacaagaatgtaaagtttttgttattcttatctttaatttcttttttactggttagtagtagaaatagtgggtgggacaataattgttttgctttttacacatgacaaagttgagcaaattcattaattttgtaattatgcctatagctataattaatttatagatcttattgcttttgtatctatttatatatacatatgcctgcttttgtatctgtgtatatacatatgcttattattataacttcatataatatatgtgaaaaaaatttagaacatgtattttttgaaggtagaaaaattataattcaaatatttatataacaatgtattatgtaattattttaagatttttttataaatttttctagaattctaaataatttatagtgttaataaaaataaatttttttttcgcgtatgtataatttttatttttttggcccatataaatatataatatttgaaaagaatttagaacactagctatatagtaagtaaatattgagagtctcctataattttttgtaaaattctaaatataattaatttatcaaacgaaaaatacaaaataaattatttttttagtatatttgatatgtttacgtgtgaaataaattgttttaaagttatttctaagcaattataatttattataccgctatatgtaaaaaaaattgaaaatataactgatttaagtgtcaaaacaaaaatgctcctcctgatagcaatggggcaagcatatataaatgccctaaatatatatatatatatatatatatatttatggaagaggtttcaatggt

SEQ ID NO: 380304 - DNA, 1581 bp, Cannabis indica
tgtcttccaggatgagaggtctcacaggtgggccttcagaggagcctaccggtcgagtgagggccaaggtggcctggacctctagcagtgtagatgctagtggaccatcactgcctccacctccactagggcctgcacctgccgggcagcctaccgaccaaggtaccaggaggccccgtagaggagtgggatcagctactggtaaaaaggttgctgagtcagccactcaacgtatagagagagatatccctatcttggatgaggcattgcaggagttgggtgagattgtgcttgacaggttgtacgcagacttagggacctttctctggtgagttatacttccagctttgttcatctctttggcgctgtataagctggacggtaatggtgttgtttacatgtggctatcggctttgggcatccatacagggttctggctatccatggtagtccaaataagggactgggcaaccagaattgactgtttgataatgacattattttgctttgatgaagcagagttcggcccgcgaccactatcgagggtcttcagacgctttccaagagcgtgtgaaggtcttggaggaatctgttgccgcaaagaatcaagccaatgctgagctggaggtccttctagcagagaagtagagaatggtctctagattggagactatgctgagtgccagaaacactgagaacaccaactaaaccgctctcatctctgggttatagactaatcttgaaaaacacaagaaaatgttacaggaggctcttgatggccagcaagccattaaggaatattaccttaattttcctccgaacttacttacgagttttgtctacacaaccctaaagttgagttgtcatacatgggcagtctcgcctttgtggagagaacactgacccatgggagggcattgttcgagagctagatggagatggacaagaccactacttatcaacaggggtcatcatcaggtacccgtgatgaggtgttggccgacttaccagtggaggaggtggccggctaggatgttgcccaccaggccagccaacatggtgatgatggggctggcctggactctgcagatctcgacttggcggctccaagttcaactcctgctgtccctacacaaatgtagatagaattttttattagcattcagcattacattttgtattatatagactctattttcatgttctgcatagcctgtggcctttttagggcctgtggcatcttagcttcggaacactactcattttgcgttccatgtggcctatgtcctatgcggcctggagcctttttagaacaatattttcatgtcctatgtggcctggagtctttttagaacattattgtcaagtcctatgtggcctgagtcttgtcgaagaaggcttatcgaggtgcataatcctagatcgacgaagatgagtcttgttaataagtgttttgacctctcttgaatatccagtgtttcagacggtgttgaagaatcaacaattaagactaggggtagtgtttcttggttctctcgctcgtgaatgcgaagaagaagatgaatgcactaatcaatatgg

SEQ ID NO: 380305 - DNA, 2437 bp, Cannabis indica
gaactattaagattattaaatataaagatatttgtattattttattcaattttctactaaatcatgttccccagattttgatatctaacaaatcatgtctctggaactttgatattgttaaattatgctcgtgaactttcatctatattagatttttcttattaaaatttgacaaaagtctttaaatcaaacaatctcaataattcaaaaacaattttaattcttctttaaaactcaagggacatcatttagcctaacaacttttagtggaagattttgacacaaaatatttccgtatccaacaagtacgactttttgttcctaaaaaaaatgacacatgcacttttcattctatttctaagaattttcttaatactaagtgctttaattaataattaaaaaaaaaaaaaaactttaaccaaaggacatgaagaggaagagcgagaggaagaagaacatcttagaagcgatatcaaacttgccactaatggagcaccaagctaagcttgccacgcttggagctccaatgaacaagaaaaagaccggtctcagcatcgccggtaaggcattgtccccggataatctttgataaagagtaacaaaaacaaccagataatgcgctatacccaacgagaacatgcacaccgcagtctccttccaccccaattccgccgccgcccgagcagccactaagttcccgatcaccgacagctgactcgttggattagccaccgtcgccaaaaacctcttccccttggtcagccactggccgtagatcttaacgtcgagaaccacaatggggacgacaaaaacccaccagaacacttggtagtaaagcgtgttgggagtaacgaagggtgaggattgaagcaaaagaagccaggagatccacggtgcgaataggtagttgactcccacttggtgaagaaactcggtcttaaccatttggaagtgtagcaaacatctgaggatgtagagaagggactgtaagaccaacgtgaacagagctaaggaccataagaagttgaaggccgttgatggaaccaggcgaaacacttgtcgtaatgagtgaacgtcgtcgtttggttccactaggattttccatagcaatgcttggctgcagagtgacatgcttattcggaagtaaccagcgtgaaacttggttaatatagatgataatatgggttgctttgtactactactcttcgtcttcacattattattattattatgaagatttaatgctgtgtcgttgttgatgatgagtttgggtgattcaaccacaacctggatctgggtttgtgtgtgtgattcatccatttgtttactttctttttttctgtgaagagtatatatctatttggaatggatttgaatggtgcggtgtggtgtgggtatatatatatatatagataaatatgtgtggttgattagtgacgagacgtacggtgtggtggggagttgaaaagggataataaatgataatgacgaaggcggcttagttggaagaagattgttagaacaaatggctaactcttttagactaaaatgtgtgcgtgtattatggtaggtatagagggtagagtactcagtggactaggactaggactaggaatgttcatgactggtttcgaattctttacagctaatattgatcaagactctggctagtgcgccgaggtggggccatacttcttcaattttcacattaatgggtaatggctctttttcttatgtgccactagtactgctacataggcaaggttcaattaaaatatcgacatcatatcaaaatattatcaatttttgttagccaaaaaataatatccaatttttttttctttgatccggagagagagatttgagtaatatgattataatacttatcaaacagagttagtaatgattatgacataatatatgtagcttttttaaagagcattgctattgggcaccagtggtgcctagcaccttttagatgtgtcgacttacaattagttagcgatactccataaaaattattatattaaactatatgggacccgatacttaattgcaccaatagcgatattgacacgtaggagggtggtaggcaccaatagtgccctttagcatttctcttttttaaaactaaatgatattttacatacatattaatttaaattaacgtagtctttacttgaagttatatatgccttaaattaaatatatatgtataaaagttatgtataactaaattacgggtttacattacctttatataaataaccagagattttgtaatcacggtttagttttattttgagaattaaaagataattaaggtttatattcgaaatatactcttaattattattttttgtaattacggagatatatttaaattctaaatgtattaaatatgatatatgtgtaattttatgattttcatatttta

SEQ ID NO: 380306 - DNA, 2495 bp, Cannabis indica
tttttttttttgagtgtagcgcagtgaacttattagggcttctctaacagttgatgctaatatgggtggtgtcagtaaaattgggcctatttattcttaaattattgacttttcaaagtaaaatactaatattgttgctcagcaagagcaccattcctatcattattttttattatttttttctctttcttcattctaattggctaattgaaatttttttaatatataaaataaaaaggtgagtactcatagttgcttgcattaaacttgcccttattgtattaattcatgacatcatagatgtccttagtgcccaaaaattgatgggtgcaccaaaataataacgaaagagattatctgttgggattatatgctttaaataaaacctattttaatataatcttatttattaattgtatatgtattttttaccaaaatatgtggcatgtaaatcaagcgccacatggtggagagtccaccatcacatgggagtattaagtattgctttatagattcctgaaccattttcttgagataggagacgtatctgtgaaggcttaaataaatttaaaagaataactaataacaccgttaaaataggccttcgggaggtagtatcctccttgatcatatgtcattcgggagccatccacacgaataacatgggttctaaagcaaactattgtagatgactagttcggtgcatgattaccctcattagaagtcatactgttctgacagtccatttatcctatggagatgaagtgacaactaatcttgtgttgtcccatcagtcgtatagaagacaaatattgtctcaccaaactcctactatggaagctagatagcacctagagaaaaaagggagatgtaccccttttcctacaagactcattttcctctataaatactcatagattgtaagtgtaaacgggacttttagattcacgaacacagtgaactcaatatattgtaaacagaatatactcttaactagagaacaatctcaccccaaataaaagtgactcgtggactatagttaattaacactggaaccacataaaaatatcttcacatacttacaattaatttttctaatactttattaagaaattgttaaaaaatttagtcaatattttggtacttttattgagagttgtagaaggctttcgtcaaaagaaaaacttgtattgaaatggtgttaacgagaaataaccaacgacctcctcaaccgcctgatggcccagcgcaccttgaggaagaagtagcctcttaagtagagggttaagaaggcgatactaatgatcctatatactcaggagatgaaaatgaatacaaagatcgtgagaagacgaatatgttgagctcttgtcattgaggtgacaagctactaagcacgatacagagttagcataaaagaaagaaattaataggagaatacaagaggccttggccgccatgaagaaaactatggcaaaggcaggtctcgatgtagatcgcgctctattccacccgcattcaataatgttggagaaggcccatcacaaccccaagaaaaccaaaaatggaaagataaagtacatagttctattagatacccctatgaagatactctgaaggataacccaaccttatgtcacagacatcattttgaaccaaaccttgaaaaacagaagaaatagaagactgaccagcaacaacaatagtagaggaagactccatctaaaaaaataacttatgtcaaaaataataaaacaataaataaaagataaaaatgaaaaaacaaaacagaaagaactttaaaaacaatggacaaaaaaataccttctcaacagtttgaacacaagccatagaagcaccaacatcaataaaatcatcattatcattagaaaatgaatcctaattaataataataaaaaatcacaataaataaaataaaaaaaaaaaaaatcgaagcaggacaagaaaaacaggaaaacaataagaaaataacccaaaataaatctctttcaaatcaacaaaaattcttgaagcatcaaccaatttatcatcaatttttgtgcactctagtgcagtagatgcatctactacatcttcattaagctttgtaccaccatcaacaacaacatgcacctcatcactttttaccttttcaacaacggacacacactgtccaccatcatctccacccccaccaccatcatcagcatttgggccaccaccaccagtgctgtcattgaaattatcaccaacatcaccatcacctttaacataatcatctccgagctcattgtcttcctcaaaattaatttcttcatcatcctctctttcaccatcaccaacaacatcaccatcattttctgaggagcgaagcacatcctctatttggcttgaccagaggctataagtagaacgcgaagactagaaaaaaaaaaggaaatttgaataaaaaaaaataatacaaaaataacaaaacaactacattaaaaaggaaa

SEQ ID NO: 380307 - DNA, 769 bp, Cannabis indica
ttttctttatattttatcttttatagttttacactaaatttatatttttataattcatttttacggtaatctctttcttcacatcttatgttgttattttttcttcctcagacgctccctaccatgggaaatgaagcttaaattaaaattgaactcgcagtacatattacaatcctaaatcatgatcaaaccatacattgcaatctagcccctttcttcttcctcctcagagttattctctattctctgttctttgagaccatcacatgaagcttccattgattttcaaaacgaaactgaagttgcaatcaatatcgcaacccaaacacaaaactaccacgagaagcatccattgatttcctaaacaaaactaaatagtcgcaactgatatattgtaacccaaatcgcaactctaaatcaccattaaaccatatcgcaatcttggtcatgcaaagtcgtaacctaaattgcaacttaaatcgcaactctgaatcaccatcaaattatatcacaatcttaactatgacctcgttacaactcaaatcgtaatttttcttcttttttctctcagataccctttgattgataaccgtaattttgtaaaaagaaattgtattatgcaaaaacttttaagtacaacagtattaataaaaaaaaatacattttcgatattacaatagaaaaattatataaaaacacatacgatattttattactataataaaaatggaaaaaatataaattatttataaaaatataaataaataaa

SEQ ID NO: 380308 - DNA, 2356 bp, Cannabis indica
atgatacgaagtttacctaataacgtgtgtcgaagcactataattacacaataaagtcatgtcgtgataaattttattatgtggagttaatagtttattttataattagcatgaatttgacaatcaatagttcctttgtactaaattgagttctccatgactgtctgacctttttcaaaaattttgaagggttccgtcagttaggtagattttaaatcgagcaagaaataaactatttgtctaattccaagaacattattgaagatcaaacgatatagttaattaccagttttatttctttctctattgtatcacaacgataagcatattgttgtggctttacacataacatactatcaacaccagttgaataacactgtcaatttgcttcattgttatgacaatcaggaagcctccacaagaatgagctttctaccaactgaggttgaatatgaaatgatgaaacaaaaatctagaacacaataaaacatgaaagcctttaaatatttatagctcaagaaagataaaaaatttatatcaagcaacataactgagataattgtttcaaaatcatcaatcaaaatggaaataaaataacacatatcaagtggcatgttttgccttcagttaattaagtttttcattttttttaacattcatttttgatacaagaatttgacaagagataaagtgttgaaacaaagtacaactacaatgatggactcaatcacttggccatcagtagttgcttggtatggaattgctgatagattttccactactaacattccatggcatgttgtagagaaggtataagcctttcatccaataattcctagtcaaatatctcacttgtctacacagaaattcaatttaaacaattataatgaagaaaataaagatatcacaattcacacaactcaaccaattatgagcaaagtatatacaaattaacataactgtatactcagaaacacatttgcttgtgaagatatatcttaccaattttaagttcatcaaagcgtttgttgaatcttttccataccattaagcctcatactcttctcattatctttaccattggaaggaaagactcacaagtttgttaccttctccttttgcattgaggctccaaaacccattgccctggcaaccatcaatgacaacaaaccaattccagcactacacaataccataatcaaaatcacataataaaaatattcaaatcacaaaatgaaaaataaattaagtggcaagtaattacccaacatcaaggtaatggcaatgtgctgttataatcttgttaatgacctcagtgtaagcttgatttctaatattaaagcaactacaaaaaagttcttttccaatcaataatttccacttttagcatcaaatgacaactagattcattgattataaatattatttcagtcatacttgataacattgatcattgatgacatgatgaaatactttctatgaacacacaaatttattaaagaagcactgagacacttgataattgtatatgtaaagaaaaacacatattagacatgaatactctagtttctctaagtaaacaagaagcactgagacatttgataattgtatatttaaagaaaaaaatatttaaggttttcaattgaacaacacaaaagatacataaagagagaaatattttaagcacacaaaataaagtaaacaagaaagaataaaaaatgagaataaacaaaaagtaaaaggatatataattttgagagtatcacaataccaatatgatttttgagtaagacttttaattgattttaacatgaatgagttcatggcacttagtataggcatatcaatttcctacagtcgtaactattatatgaaaagaaatataaatcaaattcacgcattaagagaaacatacatgtgtgtttatctttgccatattcaatcaccatgcttatccattaccacattctccaaatatggcaaagtccttgggcaccttatcaaccatacatggcggattggattgagtcgccgttcgactaagggacgagtgtgggaagagttgttgttcacctaagatatgcgcccacagaagacggtaggctggttcgaaatcgttgatcgtccacaagaggaacgaaggtggcggaggtggccgaaatcatcgaccgtcatcccacagaaaatgtcagtagttgttatctggaggagtcattgaattaatttttttcattaccctaagggcccgtttggtacgcaggattggactggattggactgaaaaggattggactagactggacaagattggattatgctgaaagtaatctttggtttaagaatggactggactatt

SEQ ID NO: 380309 - DNA, 1148 bp, Cannabis indica
cttgcttctgtattcgaaaagttgtctagctaactctcatttagtaaataccttgtcaaacttcgagtgaattctgcttccctcctcatgtttattagaccaagtaaagaacaaacccaaagttttgagctcttcaacatgaccctgggccaaaaaatcttagctatcttagatctcagtgtccttaatcttcctaccacagcacctatccttataagcgaacatggcattgaagtcacctagaattatccaaggttccttcaactgaccaatacctgctaatttacactagagctcttttcgttcatttaacgagttactaccatacacaaccgtgaggtagaacttttctttgaacccaaccattttaagcttgcaatggacatattgcttatcctccaagagtacttccaccttaactagattttcgatccaaatcaacaagattctatacgatatcaccagattgaatagattttctagttcggattattcaaaaccaaactagaagccttatcatggttaattttagtctcaaaacgaatccccaaaccaactttattgatcttacagctttcaaaaaactcaagctgcttctcttttttattcagtcctctaacattcgatgccatataattaatgttatccattaatttgagttttcaaacttgtaaccaacaccccctcagtcttattcaaagcatcataaccattactaattttcactttctattgagttctaataatattctcgaagcctttcctccttggagtaatctaactcctagcctcattatcattgtttgggggaaaaatatgaacaaaaaataaaagcccaataaaataaaataaaagcgttaaaaagcccaactagagtgaatacccaaaaacccgagatccaaatacattaaaaagaaaggcccaacactgtgcggcccaacaaaaaacctagagcgtagctataaacaaaagcactaatgacaaggaagaaaaataaacgccgacggaaactaggaaaaagagagatggaaggtcggaaccaaagcttacagacagaggaagggctagggtgtaacaccctaatctataggtacaccacgtgtgtgattttataaactagcttaatactagtagaataattaattatt

SEQ ID NO: 380310 - DNA, 1497 bp, Cannabis indica
agtttattctcttttggccttttctcagatgtggtgttttattgtgttcgagtggggttgggggagtgtgtttgtggtgttcttcacatgtggtagtggcttttattcacgtgtgtttggcctgtcatcctaggtcggtgactgggagttattatgggggatattaatgagcagcatgttggtaagaggggaaatgtatcccttttattgaggcttctatttctctaatcccaagtgcttctacgactctggtcctttcaaagtttgtcttattggtaagattatctcttctaaattagcttttatggaaatgggggtggaaagttattgtgcttctctttggaagactagggtgaaggttgatttaccattcttggtcaaagcttattcgaatatcttctgttttggatttgaaaaagcttcggatagaaagtgggtgctcgaccacggtccttggtgcattaaaggagatttactagtgatgatgtcatggtcttcgagttttagcattaaagagctatcgtttaacactagacgtttgtggatccaaatccataaccttccacatgatttattctttaggacgaatgccaacttgttgggagctcaggcgggtagagatgtctctatcgagttagatgaatctaaactagtttcatggaacaattggattagagtccaagtggaaatagaggtgaataattcactggatttttttaaattagtgaatggagaagacagatggatccaaatcaagtatgaaaaacttgggaatttttgctacttgtgcgagtggctgggacactagaggagtgcttgctctctagtttcgctggtgaccattttgaatcctcagggtattcctttccctctttgtggccaatggcttaatatattgtctccttatccgagttgcttctcgggcaaattgaaggtgcccaatggttgggtcaagagtggtaagggggccacggtggtgcacgatatgtcaaagggcatatggtcgtctttttaggtgccggtcgacgatgtgcagaggatggtcgtggctggtggcttgattcctcgtgttctcggccgagctttgggcctcatttgaaggcaacgcttcggtcaggtttcagagctagtattgacagtaagaactcgtcaacaaacgaacaaggacttaaaatagtatttggaggtcttgatagaaaaatgcttgaaaagaaaaatctcacaacctttgatctctagaaatattatttttttattcaccaacccaaaagtccatttacatgaattcatgggccctatatataatgagcctttggccttttacaacttcatcagatccccaatttatagaatttaaagtcactttcacacctgataacgttgtatcctaggtggtttgatgtacctaactgttaggttttatgccctaaataaaactcatttcatataatcacatttacttattaataaagatcagaaataatattttatgttgca

SEQ ID NO: 380311 - DNA, 3061 bp, Cannabis indica
aaacccaacagtctgatggtttgtctaattttcaagtttttgtgttagtccgataagaccaatctacggtctgatatattgtctgattgtctatcaaattatcatgttttgtgtttaggcctgataggaccgacgtaaggcctgatattaggtctgctagaggccaattttatatttcgtaagttaggcctaatatattgtctgattgtggtctgatgcctttgcacaaaatttcgaacttccacttgtgtgtgtgttttttttttcatttttgcagttttcaaaaactccacgtcttttacttccagtgtcagaccattataccgggtgtgtcacatggcgaaacagtagttggtattactcgaagataaagtcaaaatttgagaaattcgaattgttggaaagggtgaaggaatcccctttcaagcaattatttgagagagcatcattacagttttgttttgtgtaatgccctgatctataaggacatcacgtgtgtacttttggaagatagtttagtaatagtagattaattatttaataaaatctgtgataatattaaaaactttactaaagtaaaaaaccctagctacgaataagattacatcactaaaatttgttttgggccccttgttacaaaaattttacaaaaaggttatatacaacagtgtatcaaaatacacatcagatgcaactcaaaataacttctagcaactcgactatacaagctagataagtcaatatgtatattttctagagaagaccattgtctcttaactgcccttatttctccttgcccttacctacaccctagagcacctatgagtcacaaagactcagccagaaaagtaacagtgaaagcacatataataatttaatatctagatcaggatcgtaatatcattgaactacaatattcaaatagttattgttaaccccaaaaattagcgttgctaactatcgagattagtcgactaataatctgactaacaagagcacattcgacaagcttactcactcggagcgcatttctcaaagtcaccctcggctcaaagagccttctcaaccatatcagcacaggttgttgtatcatttgtagtaatcatcagatcatgcctaatcttggcattcaaactcgtgaagtatttttccttcttgttgaagtctgtaggcattataccgaaggcaacttggctagtcgatcaaacttgattgtatattccattactgacatattctcaccttgaaccgaatcggtgaactctcttcttttggcactacgaactacttcattatagtacgtggaattaaataaatcctaaaactcttcacaagtcattgtagtgtcgtcctgagtgaggaacaccatttcccaccgcacaagggcgtcctcttggaattgaaacatggtagtcattcccaataacacccataaagttcaaaactcttcgcagatccttccagttccaaaaagaactgcacaataaccttttccaccaatatttagtgaatctggacaaggtcaatgagaaacacatacatttcccattttcagtgacttgtgacacatgtaccaacctattgtatttggacaagtggccttggggtctatttttccttcgtacaactccatttgcggtattccaaatttttttggcagctatgccttaatgattctctttacacatggcttttaatcctcttcttctaagttgaatacggtgccactttgtttccaggccaaacagtctgtgagttttgttaatgcgactatctgttcctctagccacctagtatgatcatccaagagctcacatccacagattctgtcatcgatattttttctcaaattgtctatgtgaggccttacttttttacccttcgctctttcccttcttactttcaggtggtccctaaggtctgccatgacatgctatcttctaattctagatcttccacatgtatgctctggttaatagaatcggtagggcagtttttacatccctggacgttgggccattgtacttgagtacttgatccatcgttccacacgactctgacctatatattgattggttggcttaaccctggggcttgagcgtctttttctttccactgggattggtcggttgtgtttctattgttctgtggagcgtcattcataggactttgcggaggggtgcccattacacccttctctttgtcattttttggggtggagggcccaactctatgatggttatttttttaacaaaagggttttcatcaaggaggttggctagagcttgtagccatgcaagagcttcttgcatctgacgctagacttcttcatgatccactaatcgcctttgggtgtctgcaagctcttgttggagttgtactacttcagggtcttgctcgtagtagtccttttcataacccttgttaggatttttgcagtggtcatcttgagggtcatctttgtgaccttctttctcatccttgtcgatgggatcatcatcgacctgctctttgtgatgctggttttctaggtgcagacagttgcccacctctaatgcttccctgtcccccgcaacacccacctgatcatttctcggggtgagctaattttcactgttgttggcggcattatccttaccatctcgagtaggtggtttgaccattgcctttcaagttgcaaccattgttgtagatgataactatggttaatctttcctcaactctcaacgaaagtaccaaaatatttatcgagatttttggaaaccaattataaaataattaagctaaagaaagaaattatttaaagaagaaaatcaagattttacgtggttggggtattaataagcgttagtccacgagtcaatattattgagctagaaaaatttcaaagtatctttacacaagcgtttttaccctagttgaagaaccctaattctcagttcttgttttcatatagtgatttttcaagctttgcatgaagagatcatattctatttataggctagatttgggcatgggtaaatctagacccagtagggtctagaggtgttaactaggccca

SEQ ID NO: 380312 - DNA, 2625 bp, Cannabis indica
gtttaaaaaaaaatagtatttttgaaaaaaaaaaccatatggtagtatttttgtaaaaattaacataaattttaatatttttgtaagttcccttaagaaaaagggtcaatgagtatttgaattatctttagactaacccattttgttttggaatgtgactttaaatactattttttttttaattattattatttgtttattgtttttttggttttttagttttttttaaataataataatacaaaataataaaaggttcttctttaaaaaataaataaataaataaatctttctaaaacaaatcaaaaaacaaaaattacaactatataattataagaagaagtactgaattttttagaaaaaatcactgagaaattcttaaaataagtgtttcatcagacctcttatctatttagccattcataagaaacttttaagcatgtatgttatagttatttatgatcactagtaaatttttaaaaaattttaaattatttatatcgtcgaaagtaaaagttcaaacttcaaaaaattatttatcatgcatataaaaagaatagtcatgatttcaattaaatatttaaactttatttttggcattgtaaactattcaaagtttttttaaaatttattggtgggtctagataactacaacgcacacaatcattaaaaaaaaattaaaaaactctcttgaatatcaaaataaatagaggaccaaccaaaatatatgtgtactataaatatccaattatttttttattgtaagaaaaaatcttcatacttggcctctccttgaagtggagcctcattctgccactggctatgataatcttaattgacccataaaaacacccaagatgacacaaaaacctctgatacggtacaactagccaacgcatgtacacttttgaaataaaataactatatatacatacattatatatttgtatatgcaaacgcaatagcatcacaataatgagataattaataaacgcattagtaagctattgaggttagcttagtggtgaagaagggatgagaaaaagggagagggcataggttcaaacccaagacccctaaaatattacgatacaccctgacctgacctccacttcagccccaatccaactagccaccaaaaacccaccactgtctctttcgatctgtccctctcactcttagtgtctcaccatcttgatctatcttcttccaccccttgatttgtaacactctaactattatcgtgatttttaacgtactgagcagctcgttgctaatcaacaagattattggaaatcgtgaataattaaaattttgcttaattatttaaaacataatatattacatttataaaattctgggatcccgtttacaaaatacagttacaaaagtttactatttttttataaaatatttgtcgcctagcgactaaacaacaaaaggtcctgatgtctcgaggatcgtacgctccaggcctaaccgccccgacatgtacaatcttcatctgctcgctctcacgactcctcaactttagtcttgcccttacctacacatagcaatagcactgtgagtcaacagactcagtaagaaaagcataacataaaaacatattaatatcacgggttataatcaggcgcccatacatccaaccataaccctaactgagtcatgaacgttctcgacaaagtatgactaactgcgaatccagcctatactcagtactctagtcgtactgatgtggtagcagataactcatactatttgatagcctagcatatatttgttggcatctcagtgcaactctatgtacacttcactatggccctgatatgctaatctgatggctatagatttgcctaacatatatttgttggtatctcgatgcaactctatgcacacctcaccgataccctgatatgttattctaacggcaactgacatgtacgctagacatgtctaaacatatgcataacattatactaatcttaccttgatttcgaattcaggtgtgccggccaacctgagtggaacaactactcggcgaattacaggctcctaaatcacatcaatcataacatagataaatgacacgctaaatcactttccgggaacttaaatttaaaactaaaagtttccctatcgatgaatagcatggcaataccctaaacatcgcaaaaatagaaaaactagttccccaaaggttcagtgcaggaaagattcaaaaaatcatatctcacttaaaacaaccccaaatcataccaaacttttcagacctgttccatatatcccaatgaacatattcaaggcaataaaacacaactacatgcactgaaacaaaacttgccattaaagagccaagcttgagttctaaaactcaaagcttgctcaaacctaataacaacccacaattcaagcttaattcaacataatctagcataatcaaacctctgaaaataatactaaataactacagcaaccacagcagcaaaaacactaactcatgcaaaacttcaatcttaaaactcaaagaactaaagaggaagttgcaaagaggtttaccttggcttggattaaacttggagctgctagaaacttgcaagatttgaagaataaaatcaaacccta

SEQ ID NO: 380313 - DNA, 713 bp, Cannabis indica
tataataatgtacataaattaatgtgtatcatacttgttctactgtaactattttagctctttttttctgtatctaagtctcaaaactcatattccttcaattacaattaggaaaccttttataatttcttttaggaaagtgtgagatgtgctaaattttcatcttttggccatgttgtctatcgtgcatatcacatttgagtctcttttcagtgttttttttgttgtgattctttattaatttctttttttttaaaaaatttgcataggacatgaatttatcatggagaacatgatgtaagagccatatgcattaattttatgcggtatttgtggacatgtgtttattgatgagaatggtatttgcttgtccattttcattcagcatgttggcaatgcatagtttttgaagtgattaaggttttttgttccttatatgcatgcattttaaactattgttgagtctttaaatataatttatgaaatctcatttaatattggcatgtttactcaacttcgactcaattaatgatagagatgccaaggagcataggtgttttcataatgcttatttggctttgcttttggttcagcttagaaaaattcagcttttatcaaatctgcattcacttctgtttaaagaggcaagattgaaggtatactcatttttatagatcaattttttttaaaaatttaggggtgcaacacgagga

SEQ ID NO: 380314 - DNA, 5048 bp, Cannabis indica
atatttaaatgatatatttagtgtgattttatcaaaaactaatattaatttaattagtattaaatcccactaaatagtttctagcacacccaaatataattacaaattttgagacaatcataatatttgttttaaaattttaattaactaaattaaacttctcctaggaaaccgaaaacatttcctttttacataaaacaaagttataatatatctttgaaaagagaactaataacattgcaacacaattcacaatatctctattaagatgttcttggtaaaaatcatttgacaagtaagcaatttataatattttttcaaaaaaagaaaaaaaataaacattatttcttattgtgaaaaaaaaaatagttacaaaatagttacactacaatgaattgagtgtttgacattttaacttgggttgttcaacccattgagaactaaataatttattgattttttcttttgaaaaaagtataaatttgtcactaagtttggtagcaagtttcccccatgttcatggtgaagttactaaaataataatagaattaaaacttttattatattagaaaattaatttgaaattaataattatagataattaataatgcttatacaatagtccaacattaaaataatatttttgtcacacctaaatatagatcatggagacacttttatcaaaatagattttgattttaaaattagtgtcattttcacctaaaaaaaccaataaaaacattatatttgattgaattaaaaaaaaaaacagttgaagaaaaacaattaatatttgagacaaaggtttgatcaaccattttggcacaaatcttgtctaagaaatttaaaatagtatttaataaatgcatgtttatccaaatactacttattaaataattaataataataaatattttttaaaattaaattaaaaattaaaaaagtattaagaaaattataaaaagacatttttgagaatttcttgatctcttcttctcactttttttcttcttcttcttctcaacttttctccatttcctatcagccaccgtgattctctttccggtcaccgcctctctcgccggtttgctgaagttattcaggttctgcccttttgatttttcagagaattatatatatttatatatattattgggattgattattttttgttagtgggtatgttttagttttgtttgattttggaaaatttgtttctattttgggtttgattcatctaagtttgattttcattttctgtaaagttttgttcttttgtgttttatgagtgtttttcagctttggtctgaaattaagtcattgcagatttgatgatgaatcagtgttgctaaattaggcattatacaaaatatgtgtatagcaatgatatagattatacatatatatgtatatatagatatagttatacatgcaaacataaagggtcaattattagcttagaaagattaaagctttattaagcatatctgacatttaaatttgatttcaaataattgatgaagttgatgactttgaataacaaaaccttaaagcttacattttcaccataccctgaaatctccataacttagtttgtggtcaaagtttgaattttaaaattggtttcccataaagcagtaaactttaaagcttgtgataataaaagttacaagcttgaagttttgaggtattcccattatccaaatttggttctttgtgtgtttatttgatagttcaatgcaatcaatgttttaaaggctatcattgttgaaagagttcaatttgttttaattgatctagattttagaggatgaatgcggttgggaggctagggagttacatctctcgaggtgtatacacagtctctgggccctttcatccattcggtggtgctgttgatattattgtagttgaacaacaagatgggagctataaatcgtccccttggtatgttcggtttgggaagtttcaaggggtgttgaaaacgagagagaagattgttaagatatgggttaatggaatcgaaactagttttcacatgtatttggatcacaaaggggaagcttactttcttcgggaggtagatgatgatgtggaagaaggcgaatctgtgttgaatcgctcttcctcttctggtgatgatacagaagggaaatcctcagataatcagacaccgttgaagtctgaaaccggaagttttgatggttctaaggaagttgatcaaatcgaaaagagcaatgggaaggttacaataaggactaattcgcgtagatcaaagctccttggctttttcgggaggacttcaatgaaaatgaatgatgatggagaagtgaatgatatacaaagggctgattcattgcagcgtgcagagtttgcagctaatcttttagaagtgaaatggtccaccaatcttgctaccgaaatacctgtgaacgatgatccttttccaagtttggctaccgatgttttggatgagcaggctcatcaagaggtggatgataatagtaaagaacgagatgtgagctcgtctatacatgatagccaagaacatagtctagaagaagagacttgtcccgacaatgagaaagtgatccttgattctctgtctagttttgatagtgttcaggaaactacagcgaatgaaagttctgttgtcagtaatggtgaggtagtagcatcaaatggagttctttctgggattagtgatgctgatttgctagttgcacaagagcttgagttttattccggcaaacaattcaatgaggaagaggttgttactagaagagatgttgtatcaccaagttatcaattttctcgggatggtgaatcgtcagagagcttaatagccaagtgggatgcttcaagcaaacaaactcatgaggctgctgacattgatagtggtaaaagtggggaatttcaagttcatgctggaaccgaatcatcgtctcaggtaagcttctatcaatatcttgtacttttgttccaattcagttcttaaatgaattagtgaataggtatttaattgatatcaatgaaggaattacaaagttctaaacttttcgagacagtttgatatctcccctgaaagcattttactttatttacacataaagtattctaactaactaacttattatacaatgaaaattcggtaagaacgttttcacttattgttcaatctatatgttatcaggatacggcttctcatcagctcgtggaggattttgaatcacaagctgagagacctaacgaccaatcagaactaacaaaaccctctcattcatccacaccgaacaacaatgtggcctttgatgagccattcataccgccattagaggaagactcattgttttttggtgatatcgatgaattcaaaaccttcgaggatcaagaaattgaggatttttcttgttcacaaggcgttgaagagctaaatgactcaattagcaaagataatcaatcacatttattggaagttaaaattaataaacgaaatcaaccatctccttttgaaaattcaataggaaatccgagggtgtcatcgagtcccataggtattattagaactcctaaggtgattgaagaagttgggtggctaactgaatcattgccaacaattcgttctcatattgacagtttcgacgatcacgatattcaatgtttaagccattcactggattcgaagtccaaattgctgaattggacactgcacagtgaagatgacttgagccttatgaaatcagatggagacaaagaggagaaccaattagaaccagaagtggcggatatcgaagatccgtcggaaacaggggaggttaataatgactcttccaatacagttggtaagaatttctataatttttttcgatgtcttcttcgtaaaagttgttatttttgtgttttattttcgtcatatagtgaaaaatcgtcgatagtttcatccatataggataaatatcttacctttttctttagatttgttctcattttctactttaaatgccttttttgttcaaaatagtaagcaaattaggatttcttttatggatttgaagttttttttttttaacaaaaatacgaacttttgttgtttctattatactatattgtgttttcatgttgtttctatggagctcggtaataatataatgaaaaaaactcgtaaaaaagtaaatcatagtccgtacaaatgtaaaaaaattccttctccttaagcagaacacttcaaaagtcacactaaattgtgttctatgcagagatttttcttcataaaacttgttcttttatggtgctgcttctcaaacatttgatatcgaaaaactagatcttgagaaacttcacttctctaaaaccctgtgactctgcaagatgataggcttgttatcaaaattatcggtagttattttcatgggctatggctactcctgttattttagggacggtttcacttgggacgagttcacaaatatttgaaccagaaggcgcaatagctgttgacacggttgaaaaaactattacaggaggagatcgagatccatctataccaaatcttcctcctagcgggagttggagactctggcctttctccttcagaagatcaagatcttggaagggtgtgaagacacctttagacgacgttagaatttctgaggctgaaaatgcttccgagatccaaagtagtagcgttgttgaagaaaaaagtatgcttgaacccaagatggggaagaaaatggttagaacactttgtccaacatccgagcaactcgcatccttaaatctaaatgatgggacgaatacaataacattcacgtttatgactccaatgctcgggaggcaacaggtaaaaatgaaaaattcttactaatatcggtcttgaccaagttttctcacttatattttgattctttattgtttttgtttaactagtaatgacatcataggttgatgctagaatttataaatggaaatggaacacttcgaatttgtaaatcgtcccgaatgtaggataggggactattacaaggtaattcgaatactatttgaataca

SEQ ID NO: 380315 - DNA, 4101 bp, Cannabis indica
ttctgtttccctttctctgcgcctcactgtcactctctctcccgtccaccactctcctctctcctctccttcactcatctctccctctcttcactccgctgtccgcaccgcccagctccggatcactctccaacaggtattcaaaatcaaatttctggttgccattctttacgttaggctcaatatctcttctatttttaagcttgaatgcttgagtaagtagagttaattatttttctttagttttgtgttcattactgtaatttgttgaggaagtataatgctctgcatttataaattttgagaaaacattttagatatatatatatatatatgtggtagtaaagtagtaatagcgaataacaactatcatttagtgtttagtttagaatagatagatagatagagatgtgcattttaggctttagctagttttgaaatttttaccagtagcatattacagctccacagttgcacggacgggctctctttctttgttaccatctctcccctctatcattcttttttctttgaactggtaagcttagttttgctttgattattttgcgtttttgatgttgatgatgatgagaatagaagaatttgagcttcagtcttttatgggttttttttttggccactttcgattttgagttggaataatcatatgaaaatttatgtttatgatgatgatgttgagctagatttcctaatagatagtaggcacagccgcacaggaaaacctttgtatgctcggaaaatttaaaatcgaattgacatgctgaactttggtggtttaatttatgtgcaactctcctcctagtttctttcattattatataataatataaacacaaacatatgcaaacacatggctatatgatgagataggaattgttagaagagtaactaggaaaacagagcaggtttttgctgactcgggaatccgccaatccagaaagaaaataaaaggtttatgaaatgactctttcaatgttaatttaattttacttttattattttattaatttatacagattgaacacatgtaaacttgtttctaatgctattgtactgttttatgagaatgaattgataatgtttgataaaatgaggatttgtatgtattttttataatttcttctaattcaaactcgcttcaacccaaccactcaccattactagtttatctctttctgccttttcttctacattaatacagtttattttatataatgtttgtcagtcacaaatgactattctaccattttaaaattttgtattcttgaaaagtcactttttttttttgtgacaggtctgatttgggcccaacaaattttgacaaatttggcctagattaagcttggcgggttcagtattccagttacggtttgctcgtcatcttaggtctaaggaggctgtccatttgcagggaaaatccactgtcgatatggatacagagttcgcaggttttgatttttgaatagtaaatttgtgatttttttctttttatatatgtaagcagtttctgcgttttctggattggtgtcagaatgtgttttgttattgtaatatgattttcatgttatttcaatttgattgtgaacctaaggttgggtattcttgcttaatttatgttatcagatgataaagatgggaaaacatcgaagtcccggggtcaagcaacagagcataaggagcagctggaaaggctcaggcaaaaggttagaaaaatcttcttcttcttcagttggttgagttgtggtgattggtgtgttattactaattaacttcattgtgcaggacccagatttttatgaattcttgaaagagcacgacaaagaacttctacagtttgaagatgaagatattgaggtcagtaagcaaaaatgcaaaaatgtgtgtttattgcactcaacttgaaacttcctctgatgggttgttttaagaaatgattaaatctgttgccattttattgcaggaggagattgatagtgatttggaggaggaagaaaccgaagtagatgatgttgatgaagagctaaaagatgatgatgatgatgatgaaaatagtgaccttgaagttgcagagaaagaagaaaagccatccaaacgtgttataacagctaccatggttgatgaatggtgtaactcagttcaaaaggatggaaagatctctgctattcgtactcttatgaaagcttttcacacagcatgccattatggtgatgacggtggagatgatccatcaactaaattcagtatcatgtctagcagcgtttttaataaagtaatgttgttcgtactaagtgaaatggatggaatacttcgaaaaatgttgcagcttccttcatctggtgggaaaaaagagatcatactagaattaaggagcactaaacaatggacgaactacaaccatattgtgaagtcatatcttggaaattccctacatgttctgaaccaaatgacagacacacaaatgatagcattcactctacggcgtctcaaatattcttctgtatttctggctgctttcccaagtctcttaaggaagtacattaaggtatgacatagttcgttggcattttgtgcgttttaaaattgatacgcaacatgcatatatgatatgttgctgacttttcaaatgattggtgtgagggacttgtatattcttatgtatacttgttttattgtcacttccttagtaatggaataaacatttctttgacgttttatttcagattgcacttcatttttggggtactggtggaggtgcccttcctgttgtctcctttctatttttaagagatctatgtattcgacttggctctgattgcttagatgaatgctttaaagggatatataaagcatacgttttgaattgccagtttgtaaatgctgccaaattgcaacatatccagtttcttcagaactgtattattgaactttttggggtagatctcccaacagcatatcaacatgccttcattttcattcggcaactagcaatggtattgcgagaggcattgaatacaagaaccaaggtaatggcaatttctggatctttagataacattcagccttttgacttgttagttcttttttgaatcatttatgcatatcatatgccaggtaaggtgtcggctaccatcattgaatttaattatgtttctcaattcattttttttaaactggttaattaatcaatagaaagttttcttgccatgaataaatgaaacggatgctgcaggctgcttttatgtttttattccaccagacaattggtggaaagttagctagatgcttttacaatttttattattaaattcttttgttttacttgtgctatgttgttggttattcattcaggaagcattccgtaaggtttatgagtggaagttcatgagttgccttgagctctggactggatgtatttgcacctatggcaaagaatctgacttgaagcctctcgcatacccactatcgcaaatcattgccggggtagcacgtctagttccaactgctagatatttccctcttagattgagatgtgtgagaatgctcaatcaaatagcttctgcaactgatacttttatacctgtatccatgcttttactggacatgctagaaatgaaagaactgaataggcccccaactggaggcattggcaaagccgttgacttacgtacaatactcaaggtataaatgagcatgggcatccttcatgcaattgcaccacttaattgtgttttttatttcacatgattgcataacttttgtgccaggttagcaagcccattgtgaagacccgagcgtttcaggaggcatgtgtcttttctgttatcgatgagctttccgaacacctagctcaatggagctattctgtttctttctttgagctgtcttttattccagctgtgcggttacgtaactttaccaagtccaccaaggttgataggtttcggaaggcaatgcgacagctgatccgccaggtaattactttatgtggtgatcagatgtgttacgtgatttgcttttagacatttaggtggcgtttggttggaagtaatgaaatggaatggaatggaaaggaaacaattt

SEQ ID NO: 380316 - DNA, 2420 bp, Cannabis indica
tcataatcatggaaaattaacaaaggatacaacaacaaagggagatctaatccaaaagggtcacaagacacaaaaggatgtttcaactgtgggaagcctagacatttcaagaaagattgctatttctgaaacaagaacggaaagaacaagttcaatggacaaagagacaactacaactcagaatcatgcaaatttgagtgactgttatgaagatgtagaagtttatgtttctggatcatcttttaaagatgattggatattatattttggttgtacctttcatatgactaataacaggtctattttgactgattttagggactctacaaaaggtaaagtgatactaggaaatgaccaaagttgtgatatcaagggagcaggaacagtagcattcaagatgcatgatggggtcactagatcactaactagggtaagatatgttcttgatttgtccgaaaacctaatttcactaagtgtgcttgatgatttgaaaatagaaagcaagatcaaggatggacaaatgaagattcgcaaggggtcaatgacaatcatcaaaaaaatcaagaaggaaggcatgtactatctggtgggagaacctatagctagaagtaacaacatagttggacaaaacaacatattgtaaagtccagaatatgcaaaggaaatattatggcacaacagacttagacacatagcagagaagggataaaaaattattagtgagcaacagttactaggcaaagatagagtaagcaaggtagaattctatgaacactgcatacttagaaaatatcacagactgaaattcaaaacaggtacacataaatctaaaggtatactagactatatacactcaaacctatggcgtcctaaaaaaatacctactcatggaggtaacacctattttatgtcaattattgatgatttttctagaaaagtatgggtgtttctacttaagaataaaaatgatgcttttcaaatatttaaacactagaaaacacttgttgaaaactcttactaacagaaaaattaaaaccctaagggcaaataatggtttggaattttgcaacaatgaatttgacgtgttttacagagaaataggaatgcaaaggcacaggactgttagactaacaccacagcaagagggtatagttgaaagaatgaatcgaaccattctgaacaaggccaagtgtatgtcaatacaatttggttatcacatggtttttggggagaagatgttatgacatcttcttatcttataaatagacatctctttagtgatattgaatttaaaatacctgaggaaaggtggtctggtaaaccacctgacttgtctaatctaagagtgtttggctatagtgcttatatgcaccagagtattggcaaattagaacctaaagccataaaggagtttttctagggtatcatgagggggtgaaagggtatagaattgggttaagggaaaaaggtaggtttaagactattattagtagagatgttatattcaaggaaaatgaatttcaatgtttacttaaaactaatcctacaggcacatcagatactaaccttgcagaataatacagtttgatcctattctatggagactagaggatcaagaagaacctgatgtcaatcaggtggaaccagctggaggggaaccctaaccagattagattcaggtggaacacatagataatacaagcagggatgggactcaataaggtttttcaaacttattttagaaactacaattatcaataaatagaaatcaatcataggtttaatataaattcatacacatatttagaaatttgtaaacatttagcaagtaatgaagatatgagaaaatacaaaacaaacatatctcaaatattttctaaagttttcaagtaggtgatatacagtagtgtcccgtttaggcgggagagtcaaagacatcatcagttgaatagagttatcggctcatctaaaatggacactattttagcagcattttattcgatcaaaataagaatctgatgttgttcagtttaggcgaaagtcaaagtcattcttattttatgagcttttatcaatgtttaaatatttgtaaaccatattctgaacagtcactatttgggtggtcattactaagaatataaaaatttacaaaaaaaaaaaaaacgtatttatctttcgaaattctatagtgttagatcatttaatggttacatctattggggatgtatccattaaaaacaaatcaatcatgtagaatcaacaatggagatcaaatatcttaaaaataaagctcattatttaaaaaaaaatgtattttcattttaatatctattttaatctatttattttaatatttatatatttttttaattaaaactactaatttacatgaactaaatataaattttaatttaatattt

SEQ ID NO: 380317 - DNA, 2059 bp, Cannabis indica
aacaagctgcaagacaaacgacagagagcacaggcaacaacaacaaaggaattagagtaattcctcttaggcttcttccctcaacctaatggcttcctttgtcagacaatgggcgtctgcgttgaactgacgaggcaaatacttcaaggaggcttcagggaagttggagaagagcaaccttatccgagacacaaggccagaaagagcagagaggtcttgccaatcattgttgactttggtgactaagtttaaacaatctgagaagatgaattttgtctacaactgagaatcaatacaccacgatataccctgcagcaaagcctgaccctcagcaaatataggagtggaagcacctgtcatgagacgattttgagaagctacaatccggtggtgaccaatcttaaaggtgaagccaatccctgttaaaccgtgtttatgatcaagagatgcattaacaaaaagagatggagagtcctcctgagagtcttcaactggcaacaacggggaaggatgagtgatctgagttgagactgaacccgattgaccagcaagattgttttgttgggcttcattgtaatcctgtaaataattataaacacactcttctacattgttaggaacaccagatcttttaaataaaattgagtttcttgtattccatatataccaaatgaatgtaataaagagagggaaatcctgctttgaaatgatttgcaatgcttggagataaaattcctgtatatctgttctgcgatgctcacaataaaattttttgaatcttgaaagcttccaaatggtctttgctctggggcaatccacaagggcgtgcgtgacagattctatattattaccacaaattgagcaagctggttgaggtataatgttcttttgagacaaatttaaggcacaaggtaaaatatgattgaaagcttttcaagtgaaatgcttaattttaggggggataggaagtgaccagagaacttttcaccactgctgtaaagggtttgggttggaggaagaaggtaaggcattagaggctgaagaagaagctagatgataagccgatttgactgtaatgagaccagaaggatgaaagccccagatgagagaatcaatcaaagtcgggtccaggggaatttgaagaataagatcaacctgataagaaggaaaatagtgtttgaggtttggcacattccaagtagtatcatggttgataaagaaggacataaaagcctgagaggggtcgatggggtgcaagatggtgggatgaaaaataccagggatccagttgggtgcagacaaagggatattagtacctgcaccaatcttccaaaccagaccttttttgagcagttgacgcccccaaagaagacttctctaggtgaaagaagaattatatccagaaggagcattcaaaaaatcagagtttttaaaataccgagctttaagaatagaatggaggagggagcagcccaaactatccaagcctgcttggcaagaagggcttggttatgataagagagagttcggaagcccaaaccatcaaaaaacttggagatcgagattgcagaccaacttttccaatggattttcttagcacctgaggaaccccaccaaaatctagctaatagcactctgaattttaaggcatatagttttagggatcttaaaacaagacattgagaaggagggaaaggcttggacaacagccttaataagagtttccttaccagttctggaaaaaatcttatcattccatatattcacacgggaagaaacgctttggaggagataatggaaaaccgaattggtaaccctgcccacacaatgagggacacccagatatttgctaataaaaccttccccagtaagatgcaaagactcgcaaaattcatgctgagactctgtagagatattaggggagaaaagtatggaagacttgtctctattaaccagctggccagtggcttgattatagagcaggagaatagcatttagagcttcacttgatcgcgaagtaacaggagagaacaacatgctattgttggaaattatttta

SEQ ID NO: 380318 - DNA, 1316 bp, Cannabis indica
aaagtgagcgcttgtatacatactgtggaagaatcgaaatgaaattttgtggaattctatatgttttaattactgtaaatataattataaagaaagtgaaatacatgttattaagaatagaattagtttctttttaatttatcaaagaaaataagtcacgaaagataagaaatgaattgaaaatttgttaatagtacttaaggcttgttaatctcagccttagctaattctatatatcacacaattaataatcttctaaaatagccaataggtatataattaaacacatttaattaataataaaataatactgacattctaatattttagaatattaataaatttcctaatttttaatttgatattgaatttccctaagtatatatctatttatggaatattttttaatggttgtcaattgaatgattatttgagcttgacaattaaacaaaaaatgctaaaagacactagtgatgcttagtaatatcttcacttcatatgttagaaatatatatatagagagagaatatagagaagaacaaacaataatgacaattttttgaaaaacacaatatgtgaaatacaagaaattatataaataaacctgaaggaaagtcgaggaacgtgaaacacactttacttcaacagaggatcgtcgagcaaccacttctgaggatacaacgactatcgagcagtcaaaagtacagtaccaccttcactactccagtgaactcaaaatcacacctttctatcaccgacaagagactaaagacttaaaagagaaactagagagtgagactatatgtgttgtgtcttggtatcaaagcctatatttaatagcttttgaactataaagtttctattcctaatcaatgtgagactaaaaacacaaagctattatatatatcctttggaatagaaaagattctatttttagtcaatatgggactaaacacaaaatatattttattcacattttttccaacaatcttccacatgaataataaagactcgactcaacgcaacttggtggtagagttctgcagtctatacctgcataggataggtgagtgttataaccttcgaacctttcctcataaaaatatatttactttaaatttactaccagaccagtggacgtagtgtctttgaactatctactgttttgtgttaatgatgatatatagttcacacatatatttttctggcctggtttcactactactaatattagaattcgcgacggtcttcaaaacgatttttttcggggaccgtcgcaaaaaaaattaagtaactatttaaaactgtcgggaaaa

SEQ ID NO: 380319 - DNA, 2574 bp, Cannabis indica
tatatatatatatatctgtcaccactcgcctataaatataatatcataaaccatattatatatgtttatatatcatagcccatgtcaggttattgcttgtacaatttacttgaacattaaacattatgaacgaaacagagtccacctagcttgttcattgtactaaccccaacaaatcgattaattgtttgacagaatccgattcctgcaaaaaaaaataatggcagctttggaaccctggaaacaaaaacaacagccccactttgtgttaatcccattaatggctcaaggccatatgattcccatgatagacatggccagactctttgccgagcgtggagtatacgttagcctagtaaccaccccccataatgcctccagattcgagtcaatcattactcgggcatcccattccggactcccaatcaagctcgtccaattcccattcccgagccaagaagtaggcctcccaatcgggtacgagaatctcgacagtttgccatctagaaacctcttgggacaattctacaaagctctcaacatgcttcagaaaccactggaatcatacctagaaaggaatccgattccgatcacttgcatagtctctgacaagtgtttgttttggacttctgaaacagccaataagtttaatattccaagaatcgtttttcacggcatgtgctgcttttctctcttggcttctcataacatcaagctccacaacgctcataattcagtcaattccgattccgagccattcccgattccggaactactgcctcatcgtcaaagaattgaaatcacgagagcccagttgccaggagcgttcgttactcagccagacttggatgatttccgagacagaatgaaggaggccgaaacgacggcgtttggggtcgtggtcaacagttttgatgagctggagaaagggtgttccgtgaaatacggtaaagccttaaacaacaaagtgtggtgtattggaccggtttgtctttccaataagaacgaattggataaattggagagagggaaccggaccttgataaacgacagggagtgtttacaatggcttgacacaatggaaccaaactcagtcgtttatgcatgtcttggtagtcagtgtcgtttagttccttcacagcttatagagctggggttggggttggaagcctctggtcaaccctttatatgggtggtcaaaccaggagaaaagttttatgagtttgagaattggctaaaggaggaaagatttgaggaaaggattaagggaaaaggtatgttgataatgggttgggccccacagattctgatattagcccataaatcaattggtgggtttctgactcactgtggctggaattcgactattgaagctgtttgttttggtttgccaatgataacttggcctctttttgctgagcaatttttgaatgagaaattggttgtggaggttttgaggattggtgttagggttggtgttgaagtcccagttaggtggggtgatgaagaaaaaattggggtgttggttaagagagatgaagtgaggagagccgttgagattttgatgatggaaagtggagatgatgatgatgaagtgaaaaatagaagagaaagagctagaatacttggagatatggctaaaagagctaccgatcaagaaggtagtgggtcttcttacttgaacatatcatctttgatcaaagatgtagctaattattattcttaagttaagtaattaaactaacattatatcatctctattttgtaagtattatttggagtcatgtaataagtaatatttttgaatatattttttttcgagaaatttattgtgcacccttttaaagaaatattttggtgcatcctcatgagtttcgagctttttaaatgaattttttttcataataatatacgtgttaattattgtaaatagttattactaatataaaaaagacatttactcatataataaaatattttaatattatttttcttattataacttattcaaaattttctaaaaaaaatttctttcaaaaaaaaaaaaaaacaaaaatactaaaaatttaatactaacctaatgcaacatacataatcatttaaaaaaaaatcttctccttaatatcaaaataattaagtggagtttagttgagaggaataaaaatataaaaataaaaaaagaataaaaataagaatagaataaaatttaaaatagataaaaaattaataaaaagttattattttttttttattttttttaaattaaaataatcattctactcaaatagtagaaacaacattcatgtcattccaatactagtgcaaccaaataaaagtatgaaattaaaattattttcttttgattacatctgagtgtattgccaataaatttgttaggaagtttccttcaaagagaatattttgtcttcatgcgaattaattggggttggaacatatccatggtttcaatttgatgagtgtgcacgatatatacaaagtataaaagtcatatattttttattattgaatataatgtatacatattcctaatattattatagcatattatattat

SEQ ID NO: 380320 - DNA, 1676 bp, Cannabis indica
caaagacaaaccagacaaatatatatatatatatatattatagaaagtttcactataatgggaaaaaaacaaggcaaagcaaaacaaaacagctcaaacatttgtattttatacgggcttcattcatatcctttgctttcaatatggcagaaactttgagtgaataaagtagaagtcgaattttagtttttaccacctttatgatagatacatttagcttaaggttacgtttgaaaagtgagtttggattaaaagatataacataggataatgaaataagtttcttatcgaaaacaaattgggtgcaaagttgttaattttttgtcatattattgattatctcaagattttcaaaacaattaagttatatcctatgataagaaaaataatttagactgttagaatattcaattcaacactctctccaatctcataaaaatatcaaatccattctaatgcaatcccattttccaatttctaaacatgaccccttatgattttcctggtgatcaattaataatctcagtggatgcttaatgaaaaagaaaatcatcaggaacacaaagaatgtcactaagaatatgtttgataagtaccagatttcatctcatctcatctcatctcatgtatatccctataagtaagtacagactaaacatgtaaataataaaatcaatcacataaacagaaccagaaccaacaaaatgtttaaagctgctttattctgcaataaaacaaataaaagaagagtctgtatattcaatttacaatgtaactttgaataatttcacatcaaaattggacgtgggaatcagacacagatcctatatcctaatttacaagcgatatgagtatggaacaatcatacacaattgaaaagtaacaagtataaagaattaaaacattggttgctgctaaagttaataatttgaagccaaaagcaaaataaatctgtacctcaagtaagtagaaaactttgaatgaatcataacatgttggtatgaatatgaagaactctattatgagtgttcttgttcagagcttctgatgagattcaatgagcaatgcatttaacatgatttgaagtgcagcttcataaacaggcaaatcataatgcataccatcgatcgtacacctaactccacaactccaactcaatgatgccatatcaatcatcaaaaggggtcctccagattgtctcaaaatcttacttttccataactcagtatcataaccccttctcatttcatcagtcattttaaccctcttctcctccgtattcaacatcgagttaatcaatgtcggcattccaatccagaaaaggtgcggcgatctaaccgaaacggacccactcacgggtccttcggttacgagctccggtgaaaatggcagtaacgaaaccactgagtctctcaacacctgtaacgaaaccccgtaatccgattcgttcgtaaccctaagcatatgccatagccctgaacccatgatcaaaacatcgggagagtttctatttcgcttgaatgccgtaaccaaatcggtcaaattggattcgtacggagcccatacgaaatccaatctcatcccaatctcatcaaccacagttcgataatcgctatgcctcttaaagagatcacttttcacggactcaacagcttggggtttcattaccaaaccca

SEQ ID NO: 380321 - DNA, 1394 bp, Cannabis indica
cattgttcatttttaattattagaaaaggtattagacaactcatttagtagaatgtcaacagcagcaacagtaattgtttattacttgtactactaaacttattattttaatttacttttagagtatggttaattacatcagataataacaagaccaaaaaacaaaggttatgtattgatataaatataataataaatacatcatacatggctaagcttaagcaaagacaaaaccaccaaattcccagatgggattaattagaaatttagaaagtttagagcttcttttcgttttgatcttgccaagaagattgccactgtttatcatacaaagtagcttcctcagctagtttcttaaagtaatcaaaatctttggttcttctaaatataattacaccaatgagtgtggtaaagagccccactttacatatgaaattgcccgtttgtccaaccatatcgagccctgttaaaccatctacaatatatgacatgaagaacccaatcatggcagctcgacctgtaaaagtttggatttatgtaatgagagacagaaatgacaagtcttttaaagtagtttcaattcaaatcttaatagtaataataataataccattgagaagctctgcttcagggagataggatctcttgagccatgcccaccaaggtatgattgaggtcataaatagaactggctcttcatttgtagatgcttctgggaatagttcaagaaacttcctccgttttgcttctgtaataataataacaataacaccaaatcaagagttctcaaaaaacaagtaacaaaagcaaatttaacaaataacatgtaaaccatgacaagattttgagttcatttatcacctgctacaatgaggccatcccagtccatctttccattaagaacaaacttgtttagatcccatgttccattcttccaccgcacatcgctgaatttatgagcatcgaaatttgaatccaaaccagctttagtttcattttcatgagcattctctggtttactattatgttgaactttttcagagacccccaaagtttttgggccttccacattgagtgttgtcacaactttaggcttaatgttcgttgttcccaaagactttgcagctgtggattgttgatgatgatgatgaggctgttgtttcttagtgacatggtttgagctgcatgatctttgtaaggaagcagatatagaaatggaagccataattctttccaaagatagcttcaatctggttctttggtttttctattatcacttgcaaattgcaatgaatgaacttatggatagaaagtaggtaagcccatactttgaagttttaaaagacttatcttccatttcatgtgaattgtcagtaaagatatgggcaagttct

SEQ ID NO: 380322 - DNA, 1223 bp, Cannabis indica
aacctctttacttattcatagtattagtcacaaaggtctatttttcctgatgccttgcaattcagtcctataatttcgctctttctgagctgtgggcagccaatttcacaaaggacaaaagttgggattgggaggatgtggaaactaaatagtaaatattgtaaattggtttttgaaatttaacctcatacacacatacactttactatatactcacttactccccaccaaatttccacctcgtgtgcatccctagcaggaacattaactttgcagctcacaacttagtgaaatggattgcgtagaggaaggaatgggagcattgatccttcaaagatcaattccatgatgctttacaactttgtgaaggctctgttgattgtttttttctcttttcacaattacattaactttttggttgctttctcttctacttttattgttgtctttctttgctggttgcgggtttgtttgtgttagatcttgtgggatggaaaaaaagctcttgtcagcaacatcatactccaagtggggagtgtgtcttgggtgttgaagaatgctctaaggaccaaacccacagtgatgaagcccctcaaaaattaagtcactctcatgccaaataaccttctactatcccaagtatgaattaaaaatagggaattttttttgcattagttgtactagttgtctcaaccttatttttttcattatttaaagtttggataattaagatttttgctctttagattttgtcatgtactaaaaatttctcataaactattgagattgttaaatttaaggatttttgtctaatttcatttgattttgctaatgtggcgatgcgattgtccatatattaaattatgcatatcgagttttaatatctagaaaatcatggccaatgaattttaacatgtatcaaattgtgtcccctaaattattaccaatattaaacaaaaatttttaaatctagcaatgttaatagattgaaaagaatgttgaataacctgaaaagttgaagagtttaatttaacatgttaaaattgaagagataaaaatctaaattaacttaagttttaattccttttgtttgagggataaaaaatataacaaaaaaaaaaacattggccgaagacagagtgggcatttcttttgtttcagctacaacatcttaaaccttaggaggcatttggttgggaggaatgaaaatataggaatgggaa

SEQ ID NO: 380323 - DNA, 637 bp, Cannabis indica
agggcataaaacctaacagttggtacaactgaaaatcaaaagctaggaggaacaaaatcaattaattagcatcctttgacatgaaggttaagtgctaggtaaaacaaattttgtctattattgcagcatatttgattctttagaatgtgaatttctctttggatgttagaaaatcaaagaacattgttaaaatattcctgttgatagtgctattccaattgtgtgaaagactttcaaattatgttgcttcgagttcaaaagtgctgcctgagttcttgcaagtagaagcttttttccaatttgagcaatgcaactgggaaagtaaaaccttattgtagcatttaagtttggtgtggtttcattttagcaaaatttattttgtctcctttcaccaataactacttacatgtaatattaacaaatatttttctttggcaattttgattagggatcatgtgataaaaaactttctggcgaagggaagaatgaagataataaggcaacaagacggatcattacattttgaagtgctcccacttgagaaatatacaatgatattgtcaatatattatgggacatttggtatgagatttagacttgatggcaatgaaaatgtaaaatttaaattaaatttgaa

SEQ ID NO: 380324 - DNA, 1610 bp, Cannabis indica
ttttttttttttttgaatttaacaacaatttaaattctaaaactattgatccttctcataaattttgctcattttctctatttcttacaaaataaaataaaattgaggtttaacttttggttgtacaagatgattttgatgtaattatcttaaaataacttgtagccataataataaaacatgaatgtgatatttataccatactatttttaacaaaatcctattataatttttttactttgctttactctcaatattttcatttacgtatatacgttacatcactttagaggaaatatttatgattggttccttaatcataaagtatttattttatgtatgaaatgttttttcacacattttctcataagtttctttcttctaataaattcaaaaagacagctgtgcttagaaaaataggcgttattgttattattattagccaaaaaaaaagtagaaaaagaaaggcatattaatttcacaaaataacaaaccatgaatgtcttcttctatatatatattattatagggtgtttttagaatgtatccaaataaaataagtgttctgatgtaatatctaactgttttagtatttaaaagaattttttattttatatttttatagtcgtgtatgttataatcatttaagatatcttgtaaaattttgagaaatttgatagtttacaatatagaatttaatgttcaaattgtctatttcacacgcatataaaataaaaggattacgcgtgcaacagactctttaaatcttattttcgactgttaaattttttaaaattttaaaggatgtattttttaaaggatgtattaaatgattataacatatacaatcataacaaagtttcgaactataatttttttagataccaaaactgataaaagtgcatttatatacccggcctttaatcaaaggctgcttcactataaaattttccaatattatatgtactttaatacttaattgcctcaaagtctatgatttctttttctcactaaaacttgatgtggacaacataaaccatgcatgtctccaaccacacctttgttttttctaatgtttttattttgagtccccctatattaaaagtttattgaaataattttcatgtaatcataaatagtaatttacacgtaaatacaatgttttatttaagaacattaccactaataagtatgtactaatagttattcaaatatatataaaaaatgatacacattatgttaccttaaaacttgaaaaaaaatgatgatcatcttttcgtcactaatttgtaaattccaaataattaaaaataatataaactttaatcacataaaaaaacttataaccaccgaataatcctttaaagcgatgaatataattgtctaatatttatgattatatatagtgattttcgataatatttaattaaattattattaattaaagaataatttatggcataaatatttaaattttaatttctaattataaataaatacatatttttattttttggcaagttataattttagatatctgattgttaaatgttaagtaaattaccacgtgacaatcactgattggtcaaagttattattatttttttttt

SEQ ID NO: 380325 - DNA, 3470 bp, Cannabis indica
gtcttacggtggtacaagcaaaatatagtcacgtggaaatgatttctttgtttagtatttttagccgtggttttaagtgtttacttaatgatttgagaaatgtctcgttccgttttgttaaacgactagttaatatggtagctcatagtctagctagagtttccatggttacacctctccgtattcaattattagggattcccaaattattattaaccccatgttctccagttcaattcctctttagaatttattaaggtggcgtttggatgggaggaatgaaaacataggaatgagaatgagaatagcaatggaatggaataaaatttaaaatacataaaaaaaattgataaaaaaattattaaaatttttctcatcatgcattggaatggtctttcattctatttcaaattgggaattatcattccaccaaaatggtagaaaggtcattctattggaatgacattccaacactttaatatgcaaccaaacaaaggaatgtaatggagattgtttcctttcctttctattctatttcattacctccaaccaaacgccacctaatatattatgtttgtcatttttgattcatttaggttgaaaatttagcattcttcctatttttttttatgcttcatcgttggtgttttagtggacttttagtagaaagtgttgttagtatttttaaacggcttggattgtttatgtatgtttgattcggctcacttagcaatatctgcatataataaattatctctattaattgaaaaatctatggccatatgtaaaatttggattcacaaatataattacacatttaatacatatacctcctttcttcttaaacataaaaaaaaagtcacattttcctttcaaacatttttctataaaagaaacaagacatttattgtggttgtatgttattcacacaagccacgtgtgtttgcaagttatgacataaaacgtatgtccaccaaccccatatatgacaaaaaagtcaacaaaattttgcatgggatatagaaaagaaaaccacatatatagaggagataaaataaaaccgtagaagaaacaaaaaacaccaaaaccagatactgtttttgatgagtggtttctttgaaattcaaaatgggattatcaaactctaatattacactttcaaaagaacttgatggagattatgttattattgattcaattatagcattgagagaagattacattgatatttatgcataaacatattataactattcatcatgaaagaacttgaacttgatagagattatattattgattcaatcatatatagcattgagaaaagattacaacttgatagagattataatatattgattcaattgtagaattgagaaaagataacattgatatttatgcttaaacatattacaattaacttcaagtactattcatgacttgctagccacattattattactgaaattgaaagaaagcgataaaaacaaagctagagatgtagagatagatccaaattagtgctaagttcttcatcatcaacctcataagaagattttatgtccaacccagaaaaggattccaccatatctttgaaaagaagaagctcttttttctcaccatcaccatgtttctttggtactccaaccacattagtcaccaccttatcattttcatgcatcttaggtcgtttcttcgaaactcgcctcgaaaattcatctttcttgtagtgtacttcagaaacttcatcagtgaagcgccttttgttacgacattgacagccatatccttctggcttaactgtcaatcgagtttgagttgataaacgaggtaagattggcggggttgagacaaaagagggagtagtatggcgcgagggagcaaaggatggatagccaagattattcatatcaccacggtttcgatgattttgatcaaagtttggcaataagggattttcagtattgaattggcaatgagggttagggttgatatgccttgttggagagctaatgatttgattcttccatggattatcttctctagagaagtaatgaatatgaggatgacaatcagttgtcatgaaaggattagggttagggtttgcaatactcaaggaatcattacaagtattggaatgattgagtaagctcaagttcctcatccttaaacttgaattaacattattttgatgagactttagatgacttcctaaggcacgagaactcttaaaagatttacggcaataaaagcatgtatagttaacacgacgcttttgaacatttcctctatgagatgttagaagaaaattcatttttgacactgagtttttattttcttcgaggtgtggagattaacaagtgaaaacaacctgtatttatactaatttataggtcataatggttagtgaaatttatgaaaacgacaaatataataaaatttgttgaagagaaataataccattgaagacacatatggaaagaaaaacttacatgcaaaaaagtaatgaaagaaatcctatattaaggacaaatatgtatctcagatttccataaatgcttagagaaaatgcacctatcaactttgcccgaacaaatgtcattgtattctttgatactatatttgttattgcggagtaatgaattgacttattataaaatttatccgttataaaatacttttggaaaatacgagttgataagataatagatacattgaatcttaattaacctctcattgattatttaagacacacacaactaatattttcaattctacactacattaaaaagaataatttgtgactttacttagagtaaaagtggaaaatataatataagcgtcttgttttgtgacatggtattttgtgtttgcagtgatcggcttgagatagtttaagattttcttctatcgtgcttgtgtttgaagaaaatgttttaattatattttttagcaatcttgagctattgttagatttgtgttgcatagcttcttatcaatgtgataacatcacctgatcatggatttacaaaatttgtaaatttatgaatttctaatcatacacgtatgactcattcttagaaatgaaataagttcataactattgaacttgaacttgaagtttatcaaatctgaagttcaatgtcatatagtatatacgagtttaaacaattattgacctattgtgatatattgaaataatccctacaggtgtattaatattattgatatcacaatttttttttaaaaaattctcgatcagaagggagagaaatacaattgggatcgatgatgatttttgaaaaatgattcttgcataaagtatataagaatgatatagttcaaaatgatatatactagttgcaaatgatatatactagttgcaaatcaatattattcaaagttgagttagaatgattctaaatatacctaaagcgtaaatgaacaatgtagaaattattaataaatgttca

SEQ ID NO: 380326 - DNA, 1403 bp, Cannabis indica
aaaaaaaaagaaccaaaaatcagatttagaaagcctttatgcacctaattcattgaaagccagttcaaaagaatatatataagaaacacaagtctttatttatgcttttttttcttttattaaaatctttagcatgttataaactatatttctgaacacaatacttgatacgtagttttacatgtatatatatattgacttgatacaaattaaagtaagaatttaagaatctgccgtggatatacaagaaaaagctaccaaaacaaatttttggtatcattggttgtattactgcaaaatatattttattataagttttcattacatttttataatcaatagcaacccttccaacaaaactgccaagagatttaaatgtcaatgatgatatgtaacataacatctcaaataaattgttaaaaaataagtcgcttgattaatgagacttcaagtaattaatctgcacaaaatttgttgcaagaaatttttcatcctttgttgtgtacctatgagagaaatcaaaagagattcaaaaaaaaattacattcttaaatgatacattctgaaaagcacaaggagacatcattattatgataaaacacaagcacatagttgcattctctcattaaaggggactacaactgttagagccaaaaatagttaaactacagctgttgagactaaaagcctataacaactaactaacatgtaaaattctttgatgtaatttcataacattagtagaataattcttagttgacttaacagtcattatgtatacatataaatcatatacacgaccatattgagcatataaccgttgaattcataactttaaaacttgtatctattatccaataataaaaatctcttccaataacaatgttgactatatttgtgtcctgactaataacttccaataataaaaatctaacatcttgttcttatcaatggagcttgttgggctccaaagccaatgtgaccaaacaaaaactcttctctaataagttacaggagtagctaaagataacattttatgattgagaaaacaacataaatatacaaatttggtttgtgctgccaattcttaatactataataaaagtatattgacatattcatagtttattggaaaaaatacttatggagcacaacaacaaaataaacaaaacccaatcagtaaacaaaaattattaaagagaaaaaaaaaacaaaaaaaaaaaacccaaaaagttttaaattgtacaaattagaaattcataaatatttgagagtatcatttgttagacatttatatgtataaattgaaacatatgtatgtatatataaaatgcggaataaacaaatatatacactatataacttaaggattcgaaatacctccagccattgaatctttgagc

SEQ ID NO: 380327 - DNA, 2614 bp, Cannabis indica
agaaagaagaacatgggaagaacgggagaagaagaacatcagaagaaagaagaaaaagaaaaagggaaaagaatgtacacgtagacgtaggttatcagaaggtttttgtggatgtaggttctattacaaacttacagtatagctatatttttttgaatggacagtaaaactatattaaaaacaactatttattaatttataaatttattaattattcaattactatatatttatatattatttatttataactagtgagatattgtggcttattatttaatcatttaattgtaattttgaggtttaaaaactttttaaaataattaatagaaaatgatagaccgccaactttgttttaatggtatactagatcaagatgtctaactttgttgtaaaaataataagcaacttatttatttcttatgtctactgttatatttgaattttaaaagtaccaaaatgtagaattccaatgtccttttgatttaaaataaatatatattaacattagtattttgcttgattaataaatattagaggtcctaaaagtgtagttcgtcatataaacaatgtaaattgtattacgggtgcaacgctcaccatcttcgaaatcgttttcgacgatatttggctaaacttgcttgctgcagcagcagtcaaacaaacaaaatttatatgtttacactttttgggtcttgttaacaaaaattatatgtcctcttcttccccttctcgtcttgccaacaacagccagaagaaaatggctacactacaacaaaattgtacaacaacaatccaacagtggtgtagcctatgtaaattcatatatagatatatatatatatacatattaattgtaattataatgttagaatgttgtattttataaactataaagaaagaaagtattcttttaattgaaaaataaaataaatgttctaatttccaataatgaaacttatatgtcattttcattgtcttatggttacaaaaactcaacaccttcatgattttttcattttttctgaaacagaaaaaagaaagaaaaaaatgttacatgtgtgcttacaatttagtatataaagtttcatataagtatgaacttgaattcaagattaatgagttgttggaggcaaggcgagagacaatgaataaagctcgagtagaagagaagatgtcctacattgagtgggttgatcatgctatgagaagtaacagattcgtcgagattataatttcgattcaagagaaattaaaggatattttgaggcagttttgtgtggaaatgtgtgaactcatgtttggttcaaccaaatttcgatgttacttatggttagaaacacattcttaagagagactaacagtccaaagctagtaaatgttgagaaaagtcttgatgagtgtctgaaacaagttgaagaatttggatacaaaattgtaggaaagatgggggctctttaattagtaccatcaatgttcattcttgtgcataggaagattgaaagcaaaagacaaattgaacaagaggctgagtagtactttggtatctaatagtactcaagatggtagctcttcacatattcaatcccaagagtcagcaagtgaaagtgctggtgttaaagaggaagaaaaggatttaagtgcgttgtaatgtagctcttctgagtacgaattcataagtattgcaagtcccgacaagtgaaagagttgttacagagggagaaaaggatttgagcgcgttggaattcagttcgaatacagattcacaagcattgtaagtccaagaatctggtgttatagagtgagaaaaggatttgagcgcattggaattcagctcttcgagtacagattcgcaagaatcaacaagtgaaagtgttgatgttaaggatgatggaaacactcttcaagtaaaaattcacaggctgtgcaaccagaagaatcaactaaagatgaacatcaagtgttcaagaaagaaaaagatgatgttgtttgtcctaaaagagaaatcatttaggcttaagttaaaaccattaactactacaattactaaagctgaagttaaaaccattaagaataagagattttcaagctcattgtccaactgatgaaccactattatctaagaagaaacactaagtttaactggttgaggaatggaaaagatgataaatttgagatagaaagtgctactgattcagaggagtttagagtgaggaacatgtccaaaatggaaaacaagatttcaggttttgattgaggaaagacaaaaaggcgatcgagcatgctcaaaatgaagagaagaggagttacttgatgtggtttgaacttcatactaggactaatcacaaaagagtcaatcagattacactaaggaaatctcattggagatatatatgaaaatgccatacatcttcatgagaagcttgttcatcaaatgtgtaagctgattttcacctttgaaatttatgggacaggtaagaaaatggaatgacttaaaacaacacatattactattaagctactgctactgcaagagcaggatgatattggttgttggaattattttaccaggatcttagtgttgggttttatgccctaaataaaactctgtttc

SEQ ID NO: 380328 - DNA, 5350 bp, Cannabis indica
ctagttattttgaattgtgtagtaataaagttattatagaagtaaaaaataaatataagtttgttataataatattagcttaattaaaatagaggtattttttatttattagttttttttttggagagaattaaaatggagtattggagaataggtctatgtgaattgtattttagtacacaaatccaaagaatggggtgttgtatagtttggccaacattaggattaggtgggtggatcatgtgtaacatgtttctcaatcgtccgacaacgaaatatcgattactttggacggtcatgatttaatctgtccttctcctcacactcttggcttggcttggcttggcttggcttggcttgggcagttgaatcgttttaccattcggcttaagccgagccgagcctaatcaaaaccggttgctttagaaagactgtgaggggatgacgtacacgtgcagggacacagctgtcggatcttatcctaccaaagtcgatactgttcattttttggattatttcctttaatttcatttttttcaaaaatctaaaaatatataattttattttttttactataattgtataagtgaatttggaagaaaggttaagtctaattgattaaccttaaatagacattttcattggtgaaataattgttattttttcgggtataaactttcaaaaaaatgaataacaatgatgtttaagaaagtgcataataccaaacctcataaatgataagtccccaccaccaatttaaggttatactttgttcaaaataattaattgtttcttttttactttaattaatgaaaaataaaacaaagacactttaattttattttacttatttttttggggcttgaaaatttgggcaaatttgaatttggatttgaagtccgcgcttggttgcagctggagcgcactacaaaagcccgcttggtcatttttgggagattcaaagtgtggggcccactttctcttctcacttctctaccctccacatgctctctcactcatttattatgattgttattattattattatttatatattaatttttgaatacttttgggcttggcccatgaaatgacggtgggctccactcagcattaaataggccgatgaaaattggcccacttgctccaatcaaatgccagtacttgatatgataattcagttcatgacatgagaaaagataaaaagtaaaatcttgtactctatttttattacagtaaattctatttatttatgttattttaaaattttaacatggcatggtccaaattaaaactaaatctttctatgactatgtcaaacttactcaaatattttattttcttagtatttaagaataataatatgtataatttttcaaaaaaaaaaaacgaataataaaatgtataaatatcctaatttgattgaaatgtgtaattaacataggcttagcattactagtcctaatctcatacatatatatgcacacattgtgaaagaataataagaataaacttttatatttttttcccattgaataagactttgatttgattggtccacttcatccaccctccttaacagaaactttgatttttattaaaagtaggccaatttattccttagtcaatggtccatacaattgatgaggtgtttttaaaggtactatgtacataaacaaaggtaaaaagtaagaatagcctcatggtccttatacttggtgtgactttagcagactggtccctaaagttcattttcaagtcaaacgaagtagcagcagatttcaaatttcagttactaaatagacaatcttagtacatcacactaaaaaataaacagaaaatatattgtggaaaacaaagtacagaaacacacatacaactacataattttgcaattacagggcaatgttgttgagatacaaatgtcataccgcacgagtgaattagcagaaacaaggaacagagacaatgctgttaagatactacacgatataatagaaacacaggacataatagaattagaggacaattagtagctgataacgtacacttagcagagaaaaaaccgaaagccctcagtgctgatgaacaagagtcaagtcacagcttggctcggcttggcttggatcatgtgtttatctacgataaccagctggtggggactgttccctgcgccttctatcatatggagatcttgatcttctcctttgatccctagaatagggatctctgtctggccatcgacgtggtgagtagctacgagaatgtctattaccatggccacctgcatagttttggcgttgatgagtatgaaatacaatacaacagtaatgcatcaaatttgaagcaacaatgctttgtcattgctcaacattcagaaaattagcaataatcaacacaataggctaagaaaaatgagattagatcaagaatggcaaacattacagaagaagcttggtttatgaaattgaaaccaagcagcaaagctgtctaaacttcaaatatcgcatcagatcagatgatgcgtatcaacttccaaccaaagaaccgaagagtactaaacaaaagctccaccaaactgctgagaactaatacatctataatttgggaatgatgctactcaattttaaggttcagtctaaataagaaaaccgaggcctaagaggcactagcaggttggtgattaaactcagatgcaaaagtacagagctacacaatagttcttcttccctacttgatataaaagttgatacaaaatatttcaagtgtggtcatcaatgtacctcgcttatctcgcaaaccttgatacctgcccggagttggtgtccttcctcgcttccgtttcgcctgcatacgcacaaagatgcaaggtgatatcgaggcaaataaactagcccatagattactcaaaacaatcatagtgaaaccacatattgctgcctactggcatttcaaaccgatagcacattattatggcccccccaagaatatgataacaatccaacaaaatagaaagaattatcatgtagtcagatgtttcatctttttaactagctcttcaaaaatttatcatcatggcatgcattgccaactgaactcagctaagaattcctcttaaaatgtatttgggagaatctcttctaaccttttctttacctatgaaggataaaaaattggtttttatcaaataagcaggacaagccgaaagactgatgcaaccagaagaatttaccatgcctctagggtattatatataaagaaatttcataaaccatggtagacgctgttgccaagcaagaaagaggtaaaaatggtacacaacactcggcaaaatagtcgaatttgaatcgatgaatttgaaatcttcgatgcagaactcatgtcgtgaaggagatatacaactgttaagagcttagattgtgaattcgatggagctacacagaccagacctgctgccaaaactaattaggcaacatttccgaagaaagcaaagaaactgcattttgtgcaaattggaaagccatactcagaataagttagatcccttgacgcaaactaataccttttctacagtgattaatcgaccttcaagaactgcacgatttaaatgtttaacacagcgctcagcatcttcaagagtttccatagtgacaaacccaaatccacgagattccctagtgcgaggatctgtaaccagatggcactccaaaacctgatagcaaaaatgacaagtcaaacttcattcaacaggtaagagtttctcccattactaaattaatatattcaaaccacccccataatgcaacatgatcatgagttatgagtattacgactccttgttgctaacagatagccacaaacacaataaacttgtgccattcaaacaagaaatcgacatcaagttctgtactcttctaaggttccataaatggtgaaactacaatttccaattaaccatacctttccttcttttccaaaaaacttctcaagatcatcagtggtaactcttgtcgataagcctgtcacatacaagttattcccagggttgactacatcctcaggactcctattgcaacaaaacccaaaattcaattatgacagttgatatgaaacacatgcatgttctttagcaattatgatattatttatttattttggaaaagcttcacagctataaagatatataccttgaacggcttctccttgacctcgtcaaggacaatgatcttgaccgtcggtttcctctaccaggtgactctggtgaaggagacctaaaaccataatcaaaaaacaacagtataataccaagtgaacaatgttcccatattacgtatatgatttatatcatagctaagtgatcaaacccattattccaagaaaaaaaaaaaagactgaccttctttgtcttgaatatggcatctaccagtaaacaacataaatcactatattagattcattaaatacagtcatagcacatatgcatatgtggaatttaagctcaattagcaaatttttttttctttaacgccaaaactcaaccccaaaacaagataaagaaaaaattaaaaatagcacaaataagcaaaatcacgtaaaaaaaattaaatgaaaaataaaaaagaagaataagtagagacaagggaggttggtttaccttggggatggaatcggtgggtcaagtcggaactgagaagtaggaataccgaagaggcagtgtgatggtgaaatcagctttaactccgatccgatcggatccgattatttatttgattaaaatttgcagagacaaagaagaggaagaggatagtagtattggtgggaccatccgttgtttgcattgttggatgggctttattctcatgataaagccaataaagcccataggctctactccatttaaacccaactaaattggtctctttcattgtttgttaatgaatttcataaatacacccaaacaaaaaaaaagtacaaaaatagaattgtacagaattttaaatatttttaccatttttaaaattttatttataaaaaatacagttttttgatatttttatatattttgttgttggcttcatgttatttgaatattattctgatgttatttggaagttattttcctgttacttttatgttattttattgttattttcgtattattttttatagaacactgtaaggatatgaaaaaatatatatttgagcataaaaatatatcaatgtaattttcctttttgttagccctaagggaatcaatggtttacttactctattcaagctcttatctttttttggggggtgggggaatttcatttttacaatttaaaatagtttttttttctttgtattt

SEQ ID NO: 380329 - DNA, 2414 bp, Cannabis indica
ccaccgaaagagcatattttgctaattcataaacaacagtatttgcggatctatatacatgggagatttgaactctgagaaatttaagaatataaatatttgttacaaactatgtaaatttgaaacactagattgtgtagttttcaatcctttaaccgcaaaaagagaatcagtctcaatgtaatgaatcggtatctttaagccattgcagactaaacataagagctaatacttcaatcacttatgtcttctggtttaaaacaactaggataaggttttgacattgcaacaataactagtcccatagaatctcgtaaaacagcaccaaaaccatatttgcgatataacgttaatagcggtatccgtgtttaatttcagcctgcctaaagaaggattcatccatttgggtgtccttacggaaactcgtgaggatgagttgccctctctgggaggaaaaatagaagaaaggcgagtagaatagtattcacccaagtaagaaatggcggagaagagtagtagctcaggaggtttcgattttgtgtcatgcctctccttattcttttcataacacaagctccaaatggtataagcaaattgttccaattcaaattgacaccattcttgccacactttaagaatcaaatctttgagattatgtctctctctaagcaaattctcaattaaaaaaaatgaatctctccagacttttctagctctcttacagttaaacaaagcatgaattgttattttactatcacaattacataaaacacatatagaattatggagagcatcaacaatgggtaagcactcgcggagggctttccataaaaaaatttgaaccttggaagggagagaaagtgccccaaaaaaaattttcacatatgaatcgactgttgtgaactagaggagagagattgatccgcaagggtagaacccaatttataacctaatttcactgtgttacttccattagattcatgaagccaaatcaactaatgttcatgaggatgaatgttaatggaatgactctgaatcatttccacatcgaatgtactaagaaaagtactatttgagaagagataaatttcaatgtcgatcctcattaattaatgccctcaaccttaagatttgtagcagaacccaccataaatgtttaaaatagtgtgactaggcagccatggatcagtagcacaattgatactaaaatcattaccaactttccatctaagatcttattgtagtaattctttatcccaaataatttctctcctagtcattgaaagataagaaataatatcactctaagaaataaatttttttaaagtactgatgttttaacaatctactaaaaagtaatgaggagttgcagaaaaattttcaagtttgttttgctagcatggcttgattttaatgcacaaaatttttaaaactcatgcctccttctccctttgacagggtgacaaaagcattagaaccccaccaaaatttattcatcattttttctatttggtcaattattcgagttgaccctctattcttaattagatcaacccgtttttttgtacgggttcaaattcgtgctctgtatttttacatttttatttcaattaatgagctaaatactaaaatatttgtgtattttataattttagttacttttatatctttttcaataataattatatacaatcatattaaaaatatctataataattatcatttgaatattactataattttaattaataaataaatatttattattattattattattaaattattagacatgttaatgtgttgtacttttgagctaatctattcgtgcttgcgggcttattgtcgtaccgtgtcatgcttaaactcatatttttttcgtgtcatgacatatcgtgtataagcacatattttttcatgtcggatcgtgctcgtgcctctcggacccatgtcgctttcgtgtcatgtcaaaaaatccaaatcacatttacaacacttttaatcaaaaactacacagaattttcatatcataatcaataatatgaaaagaacaaaaaaaatctaagtattaacatttcatcgttttttcttcttttaaaagaaaaaaaaataaaaataaaaatagcaaactgcatgtcctaactatttctatttgacatatttgttattctatttgtgtttagttctctttttagttttgacctttgtggaaaagtgatgattgtatagaatttgataattttccaatttaagatttgggttatgctatatttcaaagttgaaaaagtgttattcttgaaaattaagtttgggctttgagctaagattatgggtctatttagtttattgggcttgaaattaggtgggttttttgtggataagttgaggaatacctcttttttatatccattaat

SEQ ID NO: 380330 - DNA, 2755 bp, Cannabis indica
aataaaaaatcgtatagcaacccacataaaaatcattcgagaaactactttagaaattcaaaccgtaaatttaaaaagaaaaaaaaagttaaaaaaacaatgtataggataattcccctataatttattgaacttaataaatatttaatatgaaaatattcttattatattaataaaataatagagcaataaaaaatataaaatttagtataatatttactcttgtaattagaattgaaaaaaaaaaataatgttgaaatagtaattttttggtgttgatttgacaccaaatttaaattttatcgttagagatgtcctaagagaatgagctatagagttaacaaagataactaaaggccaaacataagtagggagcacttgccaagaaaatgagctatagaattagaaaattttgttaatctctatctagaccatttcagaaacaattgaaaaggagatacccacaaatgtagtcattgactcttttttgtatttttttttaaatttacaagtaatcttaaataactataacatacacgatcatgaaaaaaaaataaactaaaataatctatgtataccgaaacagatataaaatctaccaaaacatccatttaaaggatctcctgtagagttaccctaacatatatgtgcaactactatacaccaaaacacacaaacaacatttgaacaatgatgtgttattttccatttttcttgccaaaagagaaaaacattgtaaaaaagaaagttacacacggatgattgttcaccttttattcttaaacaaacataaaaataaaatagaaagcttcagaaatacaaaagtacaatgccaagtagaataaactttgaactttaatcagaggtaaaatactcattaatgggcagaaacagagtcaattctcagagttttgggctgaattatggggcaagttatcaagaatgtcagatataaacttgatgagagagcaaagtccacccaagaagttatgatcaataacaccctcaccttctatcacatgtgcaaagtcaataagtttaactgtaacacctgggctatgcccttttagagctggttctttctcataaaccatcagaacagaacaagaatagaaatggaatatggtttgattttcaaaccatgtcttgagcttcaacaattgtgccaacaccccattaggaccaccataaacactttctgcaaaagcaaaatctggttctgcaactaaatcattagacgaatttgatgaaacaaacttcttaagagctactctaacatcatctgtactaaatcctagaacatacttcctttcgggtttccaatatccagagtctttgtctccataaatttgaaatccagatatcctaaatcccaaaggcaaagttgttgtttctctatctttctttagacatttcatgatatagtcttcagaagctgttgggaaccatgttctagatcccattttaatgtccattagagaaggattagttcgaatcgaaacaacatcttccatgacaagatggggacaaggaccggatccatcagacgcctcaatttgtttagttccataataaatggggaagaatttgcgaatgtgatttggaatttcagtgatggaagagaactttgtatagaactccacctcttgggagccacggtgatcactttgaagaggcttgtaaaatcggcccgaatcatcaattaaaggaccaatgattcctgtactggcttggtggccagcaacctgatgatctggtatcttaaacatggtctaaatgataacaagtaacataacaacaatgtcaaaatcaactcttaatcctataagattcaaaaagttcaagaagtccccttttccctttttcattaacaacaataaacaaagttattaggtactaacaatgtaaccccaaaacaaattaaataattttaaacagaattgattctgttgaaagtacttgacccagaaacaacaagataaagatactgtacccctaaaaaccattaatattaaaaaaataagatcaagtcaaataactagtataaacaaacacccaaatattattaagggaagaattacccaaaacccttgaaaagtcagattgaaaaagaaccaaaacatcactatcaagtctgaatctcaacccagaaatagatgtttatgttggtttataagaatcaaaacccatgcaataatttaagggtattttagtattcacaattacattaaatattttttcttctttaaagtacaaagatttaaaaatctaaaaggttccattggatcttgtataaattgttttaatatgtaaagatttgtttacattactttatacatctatctacacataaataatttatgaaagcaaacacacactttctcagagaaatttcataacaaaatagaaaagcatacatactgtctcttatatagaaatcaaaaccaatatggagattaaaataaaagagtaaataagataagatacctgaaataaggggcggtgataacgatgaagagtgtagccggagaacccaaatggagccgagagaaagagaattttggtgtgaatttgagatggaacaagtgacagtggaatttaagcttttgataaaaatggaaaagtggcaaaacattttgctttttctaatattctaaactttttgtcttaatttggtggaaaatcaaatcaatcacaattcaacatttaacaggggaagaatataaaataataaaaaaaattgaaagaagaaaaa

SEQ ID NO: 380331 - DNA, 4042 bp, Cannabis indica
taatgatatttgttgtagtgttataatcttactcatttattcacttaatacacaaattactctatatttcaaaaaatatgctttaagtactaattaaccctcttaagtgccagttcaaaaacacgtgacgatcgatatatttctttaacttatttaatacgtaatctagtaataatatatcatcacgtgtttctgagtttacacttaatagctaaaaaatggtacgactgcaataaaattataaataaaatatttttgccgctttttttttattactcatgtatgtaacaattgtaaatattaaaagaatttcaccataaatatcccacaaatatatatatatatatatatatgtattattatctgggtcagtttattcttgttttagcgtacttgtgccaaatatatatatatgcccatatgtttggcagttaaaatacacatataataaaggtacaccaatcatgctcaataatctatataagggcttcctgtttgttcttcttgattattggttattggcttggctgtgaatgtgatccaattcattgttgcacacaaatttaattaactatacattcattgctataaatctatatatatatatataaatgcaagctagatctaattaaaggcatcaaagaaaacacactcatgagatgagataccaaccaatatatataatacacactatattaattatttatctagatccataaaataaaaaatgaagaagaactagatagctttttaatataagaagataaataaattgacttttagagccatcaaatcgtaaattataaataaacatatttattatgtacagaaaaaatttaccatatataattatatatgtccacctatgaattcactacaataaattaaaagttttaacagcgaccaattagagccggtcttaaaatttaataaatcattaaaaaaaatatttatagattcttattttttaaaaaaaaaattatatttttaaaaaataataattttaaaagggaaatgtttttttcctctctagattagataggccttaactacaggcctaatctgattatgcttaaagcttggtctgcgaccaatgtaaaaataacaaaaaatcgcctctaataattagattgtatattgagaattttaatgtccataccactagggtgtttaatagatttagcaatagaaatcatgtaaatgtgaaaaaagagaaatatcacaacaaatgtagtgagtagcaccaccgtaaattatctataaaaattatgtaaaaggattgagtttaccagaaatgttggatggaaagtgtttaagatgcatttgaagtagatggtgtgggctgtaaattttgacttgggagagatatgagagtttgagtgtcttcatgtttagtcagattttctaaaagtgagatatgatcagtggaagtagaagcttgatgtgcagagggttgattttcaatttttcttttgtctccatatcgtggtggaaatccaatcaaaaagtaaggcttcatcttctaattattgcatccttgattggcagtggtggctgatgatgatgatagagtttgagtaagagctgtagaaggttgagatgaatcttggacaaatgcaagaagagatgatagagtttgagtaagagatgtagaaggttgagatgaatcttggacaaatgcaagaagagaggggatttaaggaattttaagtttcatttgtctttcttcatgatgaccatagaaaaatttttggacgcggatgaaaaatgatcaattaacaaaatttaagctctacatgaaagaatggtccatttaaacttgttaggaattgtaaaacttgttcttgattcaagaaagctaaattatcaacaaaagcagcataagtgcatgggattcgaggcctgagttcttgaaattcatcccacatacatatttgagtttagtaaagtaagcacttacacaatcatcaacttgatgcaaagtgatgatagttcccctgagctcgaagatgcgaggactatttccttaatcgaagtgcgagttgagttatgtcgacatttcaacagtcatgtctaagaacatgatgctgcttttgatttcaggtgtcacggaatgcagaatccacaactttgccatctgattacagtgaagccaatgattatgtaggggaccattgattggtggttgtggaagggtgcatttgaggaaaataatcttgtttcttacaccaatggagagctcaaaatcatgacaccaggttgaaagtttcttttcgagagtggtggcgtgatcaagatcaggccaaggtgatcaccagaactcacaaagtaaggactatagctatcctcatgagtgggacagggaggagcgatgacattttgatgtgcaatgtcgccagtgacaacagaagctgaaggaatgatcaaggaatttgcgaaggagcatctataatggaggaggagttatgcggtggaggagtttggctggagtttctcgatccattagctcttgttctagccatgttgattgcaatgacaaaaagttttgaagaggaagatagtgagaatttgtcttagtttaagtgatcaaaattctgaattgtattgattgagaaaacataatgagaaatgctaaaaggcaccaatggtgtctagcacttaagaatttttattagactacatctaatattttcaggcctatccagatctgatccaattatatattagatgttagattttaccatgtagtttgatccaattaatttcagtcatctaatcaatccaacattcattggatgttggattagatcgattctatctattggatacattacatatatatctattgttctaatttgactttatccaatattttaaacctagtatgtttttagatcgaatcagactcatccaatatttaagatctagtacttattgggatctaatccaatccaaaaaagaaagtaaaattttatgttagttttgatatatacatatattttttcatgtatggcaacacaatatcaaattactcgttcaaactaaaaaaaaaatattaattagtttgattggatgttgaatatattagattttttggacacccaataatcttacatcttatacgatctaattggatatttaaaaataatatctaatgtgatctgatcacaattgaatatctaatgtttggcggtcaaatatcgttagattttattgatttatgcacactcctactaataccttccaacataatatattattattggtataattaagtatcggattctatataatttattaataactaatcacagaacgtcacatctaaatagtattaagtaccactcatatccttataacaatattctaatataatatataattattggtacaattaaaaaaatattatagtcaattattcaaggatgcaaaagtgtcccaaagtattgattggatccttaattaagtagttgggaaatgagaatgcaacagtaacacatatacataatataacctcatgctctagaagtgatatttattgtgggcaataattcacacatatataaatttagaaaaaatttaatagtagggcctcacttttgttattattggtaggaatgtttcaatttttttgtatgaaaaaaattataatacaatatttttttttatatgatatagattatagttatattaggcattcgactatttttatttttttttattaatttatggtgataagaatagagtttaaaatagtgacttgatcaatgtgtatatatatttatataaaactatcacacatgcaactaatcatttgaatcttattttaaatatcgtataaattattaattaaattattaattttttttttaaattgaataaaatacttaatatataatatgtattgtcatataaaaaagattgaattataatttctcaacgtacaaaaaaaataaaaataatttttacaaataaagacaaaatgtttctactatattatatatatggacactagcttaaaaatcaaggtacttattcattt

SEQ ID NO: 380332 - DNA, 4847 bp, Cannabis indica
tatatatatatttataagtgtaattacaaaaatgatagaaaaattgttctatacacatacattaatttagatggccaagttagctgatttcaaggaacatccaaggtgctggatattcagcgataataattgtaatgacgtttcacgaacacattatgatgctacacaggagggcctttgtttgtacctgtatcattgcccatttgtctaagtagagggttgcttttttgggctgaatgtgagttgctaggatattgaaattatgcagtactgtttagaaaagaagggctcgaaatcatcttcttctcaaccaccatgggtactgctcaagggagatttttttcccctctctctggattcggttcataggattaggccgttgaaaaactcgtgctcaagtcccaaattgttgaaccctgatgctagaagagcactggccccaagtatctgaactttccctataatatgattacatatacctgaccaaaaatggaacaagagaaagatgtcaggtcatgtgttttgggataaaaagagagcaaagtttataaatcatttgtttcttattgagatcaaatcagatttgagcagtcatactatagagaataggatcaacaagcaagatcaaacttatataaatttgtggtcttacctaagacttctgtattttgttgcggtttcactaatgtctcgatcagctcctttgggttcttattatctatgaataaggccctttgtgttcgcatattatgtataccaggtcttggccttgtcttttcaattgaattttctgatatctgatctattgtgtccaagtcttccctatcactttcatatgtacttgtctctgtaggcacttgtgaacactgtagctcttgttctgatactgtcatctctgtaagaaattgtgaacactgtaaatcttgttgtgatactgactctgtcatctccgtaggcaatagtaaacattgtaggtcttgttctgatactgacattgatgagcctgaatcatctcttgtttcaaacgtacaatgggatattttagatggagagaatttgcaacatgaattcttttctggaaaggtagtttctggggattgtgctctgccttccttctgcattgtaaatgtttggttgaccctgccaccatcttgattcatatcataacaacttccccagattttgggtggagaacgtaagttgctctggctttcctccataaacatatctcccaagctttttgtgtgtagtattgtctcaccatttagtgtttctggtggatattttgagtcacatattgagtgcgcatcgataatattttccatatttgttggaggtttatgaatttctacttgtttcaaccttccagatcctaaaacatcaacataactttcatgtttttcattgtttgcaatcgttttctttgtgaacttatagttatgtttcttctctggggcaggaattgctagaacccttttgcttttttgagaagtagtactcaccgtaggttcattcttgtgcaaacgtagccagttgtcaacttttgaaaagtttgtagagataaagctatttttctttccttttccatatccatcactgctgacaaggcaacccttttgctgagttgaactctttgatgatatttcatgttccatgaatattatactttttatatcacattcagttgcatcctgactgtattctgtttcatctgcattacttttcacattcaaatcccccaaacagctatttcttgagatactgcattctgaattgttttctgatctacgttttacagggaaactcacagactcagcacgatgggacgatggccttcttcttcttgcagggaatttcactttctcttcagacgtttggctgtctgctccatattttcttgtgctacaaaaagtggcttcataaatcttggtatcctcgataaaggagcttctttagtttctgttgtttttctccttgttgcttcaagattatgttggttaaatttgctcaacaaatgagaagcctctaattgatcattagaagatggagctgtccctgttagtttctgtaattcttcattaaacttttcaatctttcctctgacatcttggcgttcatcttcaatcattttcatttttttctgcatgtgtgctattgcaatttccttttgtgctctttcttcctgttattcaatatttcagtctagtgaattagtgtagctgataattttaaagacaacaatatttatatttctttggatgatgatcggagaggatactccgagcaaccaaaccaggtactaatagtttgttgcctttaaagaaattaatgaaatgcattctctaaaataattagctgataatatgaaagattatcacctgattttatattaatgtctgttatgtgtttggaacttttgttcttatatttatgtaaaatgttatgcctcaagagttatttcgggtatattaaaatttattacatcctattgagagtggtcaaatattatataagttttatgagtcagatcagatcaaatatttaaaggactaaatatttagtttagactttcatgcatgcttagttgatatagtctaacaagttgtgtttataatagatcaatatgtacttcgttagaggataacaaaaacctccgttttgttttgactaaattagacaacactcttcaggtgttttttagaaacatctaggattgagtgtctaatttagccaataaacataacgaaagttctttgcaattatctcttatttgtttatacacctttgtacatgagctgcaccatcttgagagaaagacattattgcgcatatgtaggagtaaacactaaacagcttatcaaatgattatgtaaagagaaaatagcttcgtttgtaccatactgtttatgttacaggtttatagaattatctgaagaggtctaagaaacagaatgataacttttacttacatttgaatccatgttccccaaatgaatgcttctcacccttgttgcaaaatttaaagagcacaatgtctcgcatatatcttcttccttttgactaacatgcactaacatcagggttttcgaatcttctcctgaaattgtgaagattacgtagtcaagaaaagaagctagtcagcataggaaatttaaatgtgaacaaacaactcttgctcattgcaacaaatgaatctgtccatttttctagaataaccattttccctgtacatcttccaggatagtgtttaattacagtatagtcatgcttgctctccttgaagtggaggaccttgaaagtaagatcagtacatcctcattcatgcagtatgtattgtaagtagagttattctagtatcttgatacctgttaagtttaaacagttcagtacatgttcaagggagggaatgattaccaagggagtctttaagaacttgtgttagcttgctgttcctgttagaagcaacaaacaaatttcattacactttgttttgtaatgctgaagaacccaaataaattggcaacagttgtatataattatttaaaaagaacatagaatgcctgctctaagaaagtttggaagcttaaatagctcttgaaatcttgtcatgtcaactttgtatcagtctagtactgcatcttagtattttagtaaaggatatgaccttaattatattttacttttgcaattgacgtgtaatttatttaaattgtatggattaatgattgagtgaacgttgcagttacctataaggtacatgacaatttttcttttgaagtgcatggatgacatccccaagagcagaaagtgacaaattgatggccttcccttcatcaagtcttcttcctgaagcctttgtcttaagcacgcgctcacttccgccaaggtcgacaaaccataatttatttgtttctctgcgcctctcaggagcatcaagacatgtgattgataggcggatcaagctagaaagcagcattagaaatgttaagtattgcttctttttctttctaaactcgttcccaattctgaaaaatggagttgactagtattttagtaagttgttaccaatgtgatctgcttgatgttttgtttgaatttgtagaagcagttgatctaaaccggcatcctaatttgtacagcttcaatgcttggttgacgtcagtcactggaatagccacaaggttgtcaatgtcaatccctcccttaggatctgtttggattgagagactgttatcagaagaatgaactcatgttagaaacgatttaatgtatccaacaatggaagtgtttaagagagcagaggtgccaagaaattcatacaatatgcaagatgagaggacctattgactgaaaattgtgtgtaagaagcatatcatactccacagtaatatagatgaagcaataagtaaaagctgagagtaactttattgaatacaaaaaaatttcaagagacctggcttctcttctggaactattgcttgatacaaaataagaataggcataccacacacttatactctcatctaatttatcctcctatgctttcccaaaaaagccgattagaggaaatctttagacaagtcaatcagatatgtccttttatcttccattctcttgatcagtcacagtcatgctgccacttacagatcattgctactcaggtgtgtgactgaatctatcacattatttgatatagaagttgtttgaaattggtgtaaacagggttactctttatattgtttgtttaatttgcatattggaaaacattgtcccacccacatggattaaatgtaaaagtattgagccatatataagaacatgggctactccactcattgccaattggt

SEQ ID NO: 380333 - DNA, 1466 bp, Cannabis indica
tgtttatcgagatttttggcaaccgaatatcttagagcttaagaaagaagtaatagaataaataactaatttgagatttttatgtggttcaggcgttaattatccttagtggatgagtccatcttattaggctcattagtcagtaaatatgagtacagatatatatacaatggactagaactctttattcctctcgttcttcttatagaagaagaaacttagtaggaatgttcttgtaaggtttttccttatgccgatagtatattttctattttccaaaagtccccctatcttagcaaattcatggatatttttgggcagcttccctccatgcgcgtgcttgaattgatcatctttgggtgagatccaactcttagtttggtaggtggccatttaaccatatggcatttaagggtgccagattgtactggttgggtatcatacatgtgttgtcccagggttttcctttttgaacttcctttgttaatggacgttggatcattcagttaggtacgatcgtgtgtgcatgctccgtactacagcgtatcgtgggggacaaactctagcgctatacctgaaaaagcctggttgttcaatttgtagtctaatatgtatcagcagagctttcgcaaaatgaagtaatggcttggtcaaacgtattccatgacacctctaggcatttgatgtgaaatccataccctttgcgggagctctcgacttcagtcctacgggagtgaatggcttctattcctgggaatgaggaagaccctagattgcaaataccccccgcatcgctaattggtagggaagtcccaatcacggaagccctttccacgagccagggccagttttatcttaacctttcttgattaggattcacgttttgagcttacaaaaaattggacaacaggtacggttgtccagagttttttttatggcttggaacttgccaggaactcaaccttttggcttagaacctaccagggactctgtctttttggcttggaacctactagggactctgccttgccttgaagatttagcccgatacgcgatttctttaggaactatgtccatttattctctggctatacagttcttgtagggccttgaccttatgcatttaaactaatttttaattcatattcgggcttgaagctttcatgttcttgatttggcctaaagcactctatttttgaacactactagtgtttaaccttaaagccttttactatggacatatgatcatcctggctatcttcttatggtcttgaatgtatttacttttctttatgtcaagctaaggtatacatgcacttgacttagaggtagtttagtagcttattctaatcgttgaaatttctttgcataagttttccatgctagttcaatgcattgtacggtgtaggtgcccccaactgagcacacagacttacagtcagttggtcacttacaattcaccaagt

SEQ ID NO: 380334 - DNA, 1286 bp, Cannabis indica
aataataaaaaaaaaagaccattaaatttttttccaacaacaacatattgaattttattttattttctttttgctaaaatcaattttaagagactattttgaatagtttgataaaacacgaggactatattaaatcgtttggcagaacatgaggcgaataaaaaaattgtcaaagaagatctaaaagcgggtatattataaaacaagtagtccaaaactagtattttttttcaattatttaagacatggttggcttatttgttttgctcctcaatcaacattcaaacaatatactacaaaacttggaatatttatggcaaaatcctcctattatatataattattactaatatgatcttaataaaaaaaataataataaaaattttattttataattttgttgcaatagtatttttttttagccacaactcagaaacacgtaaccactaaattatgtattaaataaattgaaaaaaaatatccttagatatttttaaattagcactaaacaaacttaattaatacttaacaactaaaaaaaattacgataacaacaaaataataaaacaaaatatttttgtcgctacttctataattaatgtattatgtataacaattacaaatattaaatatatctcctaaaattccaaactgtagaagtcgaagacccctgttataataaaatagtgaacattttacatgttcgcaattggatgacatacataatgtctcacatcatgggacaaaaaaagtctttcaaaccaaaagataattaaagagagaaacaaaaataagaaaataataaaatggttaaacaatgcacactctttcatgactattatttaaatttaaacattttttaaagagttaggtcactttatgtatttgcaccatttattgatcattgtctatatcactaaataaaaaagttaaaaaaaaaatgatttgtggtccgtattttatttaaaaaaaaataaataaaataagttgcatttcaattaggtcgatgtcaactaattaaccgcaaggtatttataaattacggagacgaaatgggtcaacaaagactgtacagaaattaatatattctcttcaacctcaataattaccattgaattctttttagtcctcaaaattccactttgatcaaaccaattcactaatggtcatttaaaaaaaaaatattctacatctctaaaaaaaagaaaaaaaaaataattcaacataagagtttccaattcaatgacaccacccaatacggtaataaacattatttttagttaatt

SEQ ID NO: 380335 - DNA, 2110 bp, Cannabis indica
tttgattgtgtgcataagattcataatcttggctggatttttctttgttatttttggtttggtcttttgatttgcgtgggattaattaatttgatagtcaaggatgttctaattgttccacttatatgtgtatcatatttttagttaatggccgtgtgtgattgtattgataagttttcatttctatcagatgaatgacttgctatcaagaagaccttccattgctgaactaactggaatcagtgattcaaggcttggttgctttgcaactcaacttcgtgcctatcttgtcggatcaactacagttggaactcaaataaatgagcatcagaatgccagaattgagcaatccgatgctactaccccccaggatggacaattttcatccgtattatcaaaatctctaagattgcggcaccctgggagtcaggtagtaaggcctaattcatcatttcaggccagcttaagtcctagatcaagttcctttaaagaaggcatgtccagaaacctgtcttcccttaagaactctgctagagaaatgttgaggcgacgtggggacagccatcctgctgttgataacttgaccatcacttcagtgttagctcctgatggatctttgagtcactttgagaatgtcaaggtgcctgagactataagaagtttgtcattaccttcttcttcctttttggagtcattagggaacttgtctgtacctgcaactctcagctcagaatcccaaattcctttaatgggcgctcctcttttgtctccctactactgctggtgccctccaggttcatcgacactgcagtgctcagctgaaccgatacaatttcccagctcatcattggaatctcctttgctcccaccactttcctctctattgccatcaacaatttcctccagtttgttgacacaaaccccaccttttaatctggttgattctccatctctagacttccctgcttttcttcctgatccattggtccgattcccaaggcctactgcccagcagatcccaacgtttacaccactaatgtgcgaccctattgttcaattccagtgatagatgtctgctcatcgggtcaggctatctggtgagcgctggtcccgctatgtcaactgccatccctccactgcatccaaatcttgttaacccattgataccagacactaactcaatggtggaaaagggtgcaagagagactctacggatgctcataaacagttcaagccagaatatgcactctcaggccaacgagaatccaggaatgatggttggtgggagcaggggtttatatggtagaacaatggatgttggtgttattgttggtgggagcaggggtctatttgggggatcaagggatgttggagttatcgcgagtagcattgcggctattggtttggtttctctttcaggtagatcagatggggattcccatggacattctggtttgcacgaagaggaatcttgtggttataatggttcttgttcagatgatgaagattagatgtatgttaccatcaatagaaatccttgccatcctttgtctttttcttttgggtgttacaaatgtagatgtagatattcaaagccttggccctctgaaatgtaattagcgccagccccatctttgctgtggttctttgttgtttttgtggactagaatgtgaatgaattttgtattttgctatgctagccagtgttagtgtatattcttggttttttccctcttcaagaggctgtatatttcactctttttttttcttctttacttcggtcatttatagatgtggccctaaatagataagccatcatataaaggggtgctggaattatttctaagccctcgtgatactattggcgtgttaatgccttttcgggttgttctttttctaagtttttatttatttcttttttatgaaaatttgtatgagccgtaggaatgaaatttgttaatttgttattaaaaaaaaaacaaaatcaggttaagaaccattcatgagttcaaaagagtttcttgtcacagaaacttactgaaaaaatgtttgtatatatatatatatattaaatgaaattattattcaaatttcctcgtacaaacctatt

SEQ ID NO: 380336 - DNA, 5369 bp, Cannabis indica
atcttcatcttcttcttcttcttcctatctctctctcttatataactaaagaaaacttataaaatacagaagacactaaaaaatagactatacaaaatattatttgggatgtcattactgctctctattgcatgctccaattggaattctagaaaaagcataccttttcagctcattaaacacccatctttattttatgtaataataataataagacacttggattttgaagcaatgatattctcgtttagtgagttacatacgtatatatataaatatggcatatatatatatatattgtaatacattggaaaaactagtaacgctacttccatatataaaagaccacacatcatgagttggcaaccactttatgattctaacgcaagggaattagaaactttggaagaggattggctggcatacaatgtattaatgccaaaaatacatatctcagtttttatttttcctttagaaaattttgaaatttgttagtaatgttatggacgtttttgaaagttagtgtaattattacacaatatagtaattatatttataatttattttgatgtcaaatagtgagggaaagttaagtttgtatgtttgatttgaatgcttaaagtgcccaatgctattaactggttagtaattttttttattatttatttaattaaaatgtgtggttatgtaacttcttatgatacttggaaggtattttttagcctttcttatggtacagtccttctcagttgggccaagtactcttgtcgtagggtttttggtatttagaaatatttttcgaagtaccatatctcctacaaaaaattttctgtcattggcgtccttgttaaagtatctgaccggccacctttagttggtaggcttgtaacttcaagttggcctgatctgtttttctttgatttcatcaagggtttctgttaggagagtgtggtttacttcatggtcgtaggatatcctcctaggagatagtagttccaattcgacgggcaacacttatttatagccataagctaaagcaaaaggtgtttgtccagtggtcgtcctctcggtagttctgtatgaccaaagtacttctagaagttgttcggcccatttgccctctgcctcttcaagacgttattttagtgtgtctttgatggttttatttacagcttctacttgcctgttttcttgtgggtaagtaactgcaaagaagcttttaataatgtcgtgtcgactgcaaaaatcaatgaacatatcgctatcgaattgtttaccattatttgatacaatcttctgtgggagaccaccgacagatgatgtttttaacaaaaaaatccaggactttctttgacgttatagtggccaaaggtttcgcctcagtccattttgtaaaatattcgacaacgaccacggcatgctgcactcctcctttctccttcgagagtttcccgataaggtctattccccatatagaaaatggccatggagactgcatttgtatggtggagcttagagaaccattggcacttttcacaatttttgacatagtctattgaatccttgatcattgtaggccaaaaatacccttatctgagtgctttttttcaaagactctgctcctagcgtgattgtcgtagacaccttcatgaacttcaattaggagtcgtgcaacttattcttgggtaacacatcttaagagtagcatcgaaaaaccacaatggtacataattccgtctaggattagataccaaacaactttcctcattatctttcttacttcgtttttgttttctggcagcactcttggctgaaggtatgttgctattggtgtcatccaggtcaggctatcatctagcataactatttcttctggaatagaatacttggatcttgtaggtattgaataaggacgagatttgtcttgtctgcttctgtgctgctggcgagtcggacaagggcatctactgtgatattttcttctatggggatttgtttgatggtgtaccctttgagttaacttagaaggtcttgtatctttcttagctatgccatcatcttttctcccctaggtagtgtattcacctagaacatgattaaccatgagttgggagtctctgaatatgtctaggtactctgcttagacctcgtgtgccaatttcagttcagcaataagggcttcgtattcggcttcattgtttgaggctttgaaaccaaactttatggcactatgcagttgctgcctccaggtttaatgaggacaattcctacgccagatagtctattcgtgtaggaaccatcaacgtgtaacttcctcgccaatttttcttgctcttgcactcgcttcttctctggcacttgctttttctctggcttttgcttctgctcttgctcttgctcagagttttcaagagttacattcatgcattcagcaacaaattcggtgagagcctgaccttttattattacccttggttggtaggttatctcgtattgtcccactttgattgcccatttaagcaatcggccagacgcttcaagtttttgtagaacttgtcatagtggttggtcggtgtatactataataggatgagcttgaaagtaggccttagttttcttgaagctagtagcaggcaatatgttagctttttgattggatggtattgaatttctgcatcaataagcctcttgctaacataatacactggatactaaactccattttttctcgaatgaggaccgcacttaaagtgaacttcataactaccaggtatattcctattttttcattatctaggggttttgataggatgtgaggttgagctagttactttttaattcttgaaaggcaacttcacatttattttcccattcaaacttcttatttctctggaggatgttgaagcacaggacaaacttatttgttgagcttgacacaaatttgcgctatctggctagttaaactatgtacctccttgatattcatgggcagtttcatgtccaaaagggcttggatcttctcaagatttgcttcgattccccaggcattcactatgaagccaaggaacttgcccgaattgacttcaaatgagcatttgagggggcttatcttcaaattgtattctcgaaggattttaaagccctcatttaggtcctctatatgccccaagtcttttttgacttgactaacatgtcgtccacgtaggctttcatattttggttgattaggtccttgaacatcttattgacaagacgttggtaggttgcttctacattttttagcccaaaaggcatcaccttttagcaatacatgcctacatctattagaaaacttgtgtgttcctggtcaggcagatacatttttatctaattgtaacttgaatagacatccatgaagcttgggatctcatgaccagctgtggcatccacaagcaggtcgatccttggaagtgggaaacaatcctttggacatgccttattgaggttagcaaaattgatgcaaacttgccacatgttgtttggcttgggcaccaatacgggataggaaacccaaacagggtagaatgcctcgatgtgtgcgcaacttttcaacttatctttcaatgcttgtgctcgctctttatctagtcgcctccaattttgttgtactagatggaagtttggatctatattaagggcgtgagaacttactgatggattgattcccaccgtgtcttcatgtgaccaagcaaaaatatcgaggtttgcccttagaaatttgatcaattcgaattttatttctggcactcgaccaattttgagtttcttggttggcattgaggggtcgatctctgcctcttctaattcctccagcaatcaaaagttgtttgtaggatccttaaagcaaggatctatgtctatctccttgctttgggtagaccctcattgcccttggccagactcgctatttgagctcttggcgggtaggtcctcctttttttttgctttggatagagtaatgtagtaacatttttgggtagagtgttggtcttcccttaggcactcgacaccatgctttgttggaaacttgatgcattggtaaattgaagtgattgcttttaggtcatatagggttggtcgccctatcatgacattgaatccagatgccacatcaaaaattatgaattgggtcatgactgtcatttgtgctatactttcacggattgtcaacgataattggatgtaccctagaggagctagtccttagcctgagaacttgtgcatgaattgtctacagggtgttagatctttcaaatgaagccccatcttctcatacacagtcttgaaattgatattggaagaggctccatcatccaccaagcaacatgctaccatcatattccctatttgggtggttatgaccaaagggtcattacgaggtaaactcacatgggcagcatattcttcagtgaagttgatgccaggcccttctaactttggctactttgaatttcttccctctataggaaggacttcatttctttgctcgtgacaaagagtttgaacatatatgtccaatgctttgtttgaatccctaacaatgtggggtccaccgatgatgacctataaatggccagtaaatagtggtggcaacaagtcaaaattttgttgggcctgggcctggttttagtcagcttagacatacagatgtaagtggggattattccttctttttaagaactcaatttcttctttgaagttttacacttattagggtcgaccgaaatatttatggaatcgacagattttggtgggatcccacttactaatgtctttcttcatcagagggggcttcttgtatggaacaatggcttatgtggccattaggatagtctcgggtgtgtgttaggacgatgaagcatgtgaagttctcctctttttcttgagaatgttgttgtgtagggggatcattgaattttcctttctggccatttcattggctggaaccattatttttctgtttccctccattattgctgttagtttggggctgggcggtattactggccccagctgtggtaggtgtgttgttgggaatagctgcttactacccgctaatttgcacctgttggacaacttcttcaagctttatgaaactgtcagcgcggtctagaaactctctcatactgttggctaatcttttttcgatgtccctttaaaggtcactcagaggtagaatacctcctataatgattgtataccgcccttctttcatcagacctttgacctttgtggctttggtcttgaatctttggatatagtctttcaaatgttctcctaaccttttttttttaatttcaaccaagtcctccaattgagataatatttgt

SEQ ID NO: 380337 - DNA, 3724 bp, Cannabis indica
tttattttacaacataaataaaaaatatttaaacaaccgcgcgaggcgcggtatcgttacctagtagtttttttttttttttggaatgcaaatatcaacttttattagatgcaaacttcagctaccaagcaaggtaacaaatcagtaggaacagactccatactgaagaggcgatcaggatataatatagcagcttgagcaaaattatgcgccactacattgtcagatcgtttaacaaaagaaacaaacacatttctcaaacttgcaagcaagtttttacagtcttttattacttccccaaataaagaaaacatagataatggactctgcaaagcttgcacaacacataagcaatcagtttccactttacacatttgcctttttgaattctttatccagctgagggcttctcaaactcctatagcttcggcaagtagaggatcgacctggttgtgagctaaagtggtacggccttcaagtaacataccattaacatctctgataaccatccccaacccatagctacggcctccatcaaatattgttgcatcgacattaatcctcacactgttaacatcatttgaactccaatgcccgttaccaaccgtgagctgagtttcagcttgtgttgtattaattttccgagcctctaaccattggtgaagataagttttagcgaaagcaactatattatcgggatgtacctctttccgattccaaaccaagtcattcctagcccccccaaattgcccagcaagtaacagccagtaggcatttcagatcatagcaggacacccgaaataccttgctgcaccagtcaaaaaaagtgtctcctggtctggtctgtgtgcctattcccactcggtcccaacattgtttgatgatgttacaggtgaccaaacaatgaaggatagtttcctcatgctcaccacaaactggacagatactagatacatcaactctcttaacccgaagttgtgtaagagttggtaagcagtttgtacctgctctccaaaccaggtttgctacttttggtgggagtttcagactccaaaatttacgccagaactgggatgcttcatcctcgaaccatctaccctttagtttttgaagagtggagtatgcactcttaatagaacagatgcccgaattctctctacaccagaagagttgatcattgttttgggtgatcttcaaggggatactaacaatcagctgtttatccctatcactgaaaaggtcagatatcaactcctcatcccaaaatagcccatccatggtcattaggctagacacaaatgcaccagtaagtgcgggatgagtagattccaccatgagattgttatcatcgtttagccatggctcacccaaaactgggatagagcggccactcccgacacaccatcgaatgccacttttcaaaaggtcttgagcttcaaagatacttcgccacacaaagctcggtttggcaccaatttgagcagataagaaagacccgtgaggaaagtatcgcgccttgaaaaccctcgatacaagtgagtttgcctttgtaagaattctccaaccttgattccctagtaaagcaagattaaaatcgtgcaaatctcgaaagcccattccacccccacttttatgtttacaaagcttatcccatgccatccaatggataccttttttatcacccttaggttcccactaaaatctattcataagcttctcaatgtcccgagtgatgtcaagaggtagaaggaacacactcatggcataactcggcaatgattgaaccaccgacttcacaagcacttcttttccagcacgagatagaaatcttccctcctagctctgaagccgcttccttacttttgtttttaagtatcccaataccgctattttgttacggctcatagtgcttggcaatcccaaataaaagttgtcttcagttgctgcattcatacccaaaaaagagcacaattgattgcgaacattagtctccatattggtgctaaagaatatcgaggactttgaaaaattaacttgttgacccgaagctctttcaaacttttgaagcaactcatggattctccttgcctcttccattgtagccttacaatacaaataactgtcatcagcaaacaacatatgtgaaacccgaggagcaccatttgcaactttacaaccatgtatccaaccattattctcatacttacgtagcatagcagaaagaccctctgcgcacataataaataagtatggggataacgaatcaccttgtcaaattcctctagtaggagtgataggcccaatttcatgtttgccgtggatgacggtatacgtagctgaagcaacacaactcataactaatttaacccatttatccagaaatcccatccttctaagcatagcctccagaaacgaccattcaatttggtcataagccttactcatgtaaatttttaaggccatgaaacccgtcttccctaaccttttcctttttaagtagtggaggacttcaaatgaaatgagcacattgtcagaaattaaccgaccgggaataaatgcactttgggattcagcaatgatagtatccataaaaggtttcatgcgatcagccattactttcgtgatcaccttataaataacgttgcacaaggcaataggccttaggtttttcatagagtcaggacacttcttttttgggattgacacaacattggcagccgcacaagtttcctccaatacaccatgttcgaaaaaatgttggacataggctaccacatctgtcttcacaataggccaacatttctggaaaaaagcaggtgtcataccatccggtcccgggcttttatccgggtgcatatcaaacacggctttacggacttcttcctcagtcactggtctatctaggtccaggttcatcatctcaggaacaacctgattaatactttccaccacttcaacacaattggcatcaggcgaagaaaataactccgaaaaataatcataaataaccccagccaaaccattttaccaatcagtccatatgccatgagagtttttcaacttagtgatgttattattccttttacgagaacttgcggctgaatgaaaaaacttactattttggtccccttctctaagccacagttgctttgatctttgcttccagaatacttcacactgatcaagaatgtcaaatcactttttcttcatgtccatataagcctgaaccgaagaggagtcacgcttatccttcaactggttgagctctgttttacacctcttgatacgctgacaaaaatttcctgtgatttctttaccccattgagataattgagacgcacaaaggttaatcttctcctttaccagcatactttggtccgagagccaacaatcatcaactattttatagcagatagtaggggtgttcgcggtgcgggtggtgcggttttagactatttttccaaaccaacccgcacatacggtttttcaaatttcccaaaccgcacccgcactgcgaaattaaaaacccgcaaaaaccgcaccgcaaaaaatagtgcggtgcggtgcggtttttgtggtttatgcggtttggactatcactaaataattaaactatcacaaatacaacaaactttgagcaaaacttgtcaaaataccataaggcttgaaaataaatatgaaaaaaaaaatttaagtgtcaacaatacaataattagtagacttt

SEQ ID NO: 380338 - DNA, 2133 bp, Cannabis indica
gcttgggcttgggcttgggcttgcattattgggctggaagaaatcttcggcctatgaaatgtgggccacttgtggtcatactcataatattactttccatttggtaatttgtgttcgcgagtcgtatttgtgtcatatcaaaatacgtgtattagagatatatgcttgatctaaatacgattcgattaataagtatgtcaaaaaattaaattcaaatacgactcgtttataaataggttgacacgacataatttgtataatttatttataaatagattttattcaaatatgtcaacccattaatatattaatgacatatttaacatgtttaaaattcatttataatttgttaaaatactataataactttaaataagtcattaacaggttagttaagtgttacttgtgacaacccgaatacgacccgaactcatttaagacaaatctaaatccctttaactttcgtgcgagttttgaatcatgttattgtgtttaacatatttttttgatcctaacctcaagaagtaccgtcttataaataattaaggattttttatattgttattagtggcaatattagtagggttttcttctaacttttatcttctttaactcaattacttttacttcttttggtgtttttcaaaatttcttataactatattgcttctttgaatgcttgtagtatacataaattatacttctgtagttgagagtgctactactagttgaagttataatttttgatagcatatacactctccactaatttaaaaaatgtatgaagtagtgttcttctagtgttcttacttggtgcataagcgacacaaaagagatttaaaattcattttttatctgtgtcggtatttaataataacttctttaatattgagttattagtagaggtgtttatcaaattacttatatcgtataaactattcgtactacaccacactgcactaaaatatgtaatttagaatttttacaatgcagttgtgatttgaatttttcttaaattgcgtggtataatttgcggtttgaagttgtagttcgaaattttataaatgtggtttaaaccacacccccactcttaaaaaagtaatactaatttttaatataatttatattttagtcaacttttagttttgtttaatcttattggaagtaatactaatttttaagcattacatttatcaattgtgtacacatttgtatgaatagaatgacaaaagtgagcatgttttataaattaatgaatattttgtgtaaaaaaaatatttaaaaaatgtatataatatattatagtttatattatattatattatttattaagttaatttttcgtatcatagttttattatctttattgttttgtttgaatatttcttggttattaactatataaaaaattttattttaatgtttaattataaattagttagcaattattacaaattgcccgcgtattttatagagcagttttaagatttatacagtgcagatacaatttgaaaaattgttcaaaccacatgtacggtgctctccgaaaaattaaacaaaaaatatatcacccgcactacaaacactcgtaaattaaatacacacatattgaatgagactagacttcttaaactattattttatttttcttatatttggtggaccaattaatgattacgaggcaaattaacttttttaatttttttgtgatatttgatttgtggggctctttttttttgaaaaaattatttttatttaggtggtcaaccattaactaattcaagagtaaacatgtactttatatgttattttacataatgtataattaaaaatgtttatttttttaagttagaaaaaaatagtatatgtacgaatatgcagattctgagtttttaaattgtgtttaattattcgatcaaagaatttttaaatagaataatttgtagcataaatacttaaatacttaagtttaattttaattgcaaataaatacctacggtaatagtacttaaattataattttagaatttctgtagatacctagttaaataaattgccacatgacaatttctgattggtcaaagtcattaaattcttattatttaaaaaaaaaatagttcaaatatactaata

SEQ ID NO: 380339 - DNA, 3340 bp, Cannabis indica
ctggacggtccctgtatgaaaagtctgttataaacttataatgaacatgatcaaatgatcacatgaaatgcagtgtccttttcatgatgtagcaatgacaacaggagttaggtgttcatgcattatggacaatcttaaacagtttccctagagttcgtagccactttcctcccctggtctcaagtctagagaatattgaagatatttcatcctgcatagtacatacaatatcataatattatacacattaatataatcacaaaaacagttcatgcttataaaaagggtggctgcccctgatattacttgtaaccctttttgatctcaagtatgaatgcacccctatgtgtttgtaatttgtaaataaatataataaaattgttgtagtgagaatggggaagtgtgaaccactgtttgaactttgaaagtttgaaggctatgaaagttttcactttttaagattctaagttgaattataagaagctataacttgacaagaaagttcagctaccaggaaaaaacattagagaaagttgagaagccaaatattcgaaggaagcagtataacacaaccgaatcaactttcatttgaagttttagcttcaaattacaaccatttatgcatagtgaatgaaagaaatctcttcagttatcgaatttcaaagcacaaacaaagtgtataaggttagctgaaactttaaacacacgtttagcttctgtgaaagacttaaactcaaccaaccaggatgcctcaataactttaggccgggagtcattgctatgtgactgttgagttataacttcctttaagatttcttagttttacatgaatgtctatagttaatgaggtatttcttaaataataataaaaaaaagtgtggttacttgcaattaagtaagagcttctgttaagagatgttacatgtttggtgattgctgctcccggacttgcacggggttggctggatttgattcttcttcaactcatctccagctacaaggaagaacgctgtgtgcctacatgagatggcaaaacaagaagacatcatcttttatggtgaaatttaacaaagttatggttagttcttaattgcggacactgctatgaatgggaagaggtgattctggttctgggaatatttttgtacctgaaaaaattcatcattttaacttttgaatctgcatcgatatctgaggtagcgtccaatgctagttgcatgtgatgcaaccacctctctgcagcttgatgagttactggaaatggtcggtgacgagcaattagagcaggatgccctgtcaaatatcaaaggggaatgtgaaaacttttcaagactgcttaaatgaagaaataaaatatcacagccataccaagagattattttgcatttaacttttatattaaaaaatcaaataagagaagttgatggaatgatcaaaaagtactctagcatgaagctaatggaatgatcaaaaactatggcatgcaagggcatgataggaaagtacacatgcctgcttttactaatttttaaaactttggcatgatgtctatgatctatgcattcaggaaagctaattgaaaaggagatcaccaggcccttaaatctgaataaatctagagatggaaatagcaagctagatactttgttttaatccttcaaccccaaccccacacataaaagcattcttactagtctttgccaagttgtaggattcaatagttgttaagatcttcgcccccacctcaacaaaaaaaggaaaaaggaagaaggagaggaagaaaaattgtccaaataaaccactaacatttggatagtagtttaatcatcataaaagaaagaaagaaaaaatacatcagtgcaaaggataagttaaagcatggtgaggataatttccaaggttgagggtgttttctgaaccaaatagaagaaacaacaacgcatgaaataaaattaaaaataaattaagaaaggtgagcattttgactgtgatataaatccagaacagttcagaatttaagagattagtcacaaattcatattttgtgggcacttttagacaaagggaaatgcttccagggataaaatttaaagctgcagttcgggtagaaactagaaatgtacagtgttgtagtttagctcttgcaaaataggattatcatggatatagattttgaaaagacaatacaaaaagatagaaattcgtgtgacgactaaatagtaagcatttctggtcttttaacttcgtgattataacattcttgaaactaaagaaaattacaagatatagtttgtataaatcacagccagtggtaccataaaatcactgatttagaagaacaacctataaaaatcacaactttcctagtcacctgaaatcagtacccccaccacaagatataacttcttaacagttccaaacatacacaacataatctaagacagaggagaatttgaaaattcatgatcaatagcaatattcaagcagaagccagaaatgggttaagctaaggtaagatttttctcacctcttctctgagagtagagaggcggccctcccattctctgaacaaaaaattcatattggttttgaatggcctcctctttcttcgaattagcaaagattatacgaaaccactcttcgtcatcatcatataccctggttttcaataagttaccgaacttccatgaaaagagaaaagagagagagataagttgcgatggagacaaaagaaaaaagaaataggtgttacctattgtagaaattggtggagagatttatgaatgtctggaggcctaatttgttgaagagattagtggtgtcaatggcgaaagcatcggcggagtcaactccactccactgggatgccttggcttgcaaactctgcattttcttttctgtcaaatcgaacaagtgtaatatctaaccaaaaatgaggtagttgttgtagatactcatacaatacattctagaagacaagagtactctactcccccaacccaaggccaaaccaacgcagttgggacccacatcctaatatcgataaaactaataaaccaaaatacataggtcttttttcctaagttttgattttcaaagaatacaccatttcttaggcaatttctcttatgggaaacgagagaattcagattcttagtgtttcttgggaactactaaataggctcattatataatgagttttgagtatttataatttggcccttcaacaaattataaattaacttatggtacctacacattattccatgacaatttaatacccttttgatatctataacacaattggtcacttaattttgtatcacactttataatagca

SEQ ID NO: 380340 - DNA, 4112 bp, Cannabis indica
cactcgagttgactcgcattcctgttatgatcaaattcactattataatttattagaaatttattagagtcattgcaatcaggagaaattctatcattatatgaagagataatcaaaacaatgaataagcagtattttttggatgcattataattataattatgtaagcatcttcacccattaaaaaaaagtctaactaatttacaaaatcaaaaattgagtttaaagcattcaattacagatatttaaataatttaagatattataaattgaatttaaaataatcaattatatatgtataaaataataggctcgaaatattctaaattttatgaaaatatgtaaaatgtacccaatcattatactataatttttctaattactaaaagtagaaacctttctacaagagacaaaaaatgtgtcctacaattaaattttcctatatgtaatagctacgaagataattaaaaatttataatacacaaaagacatgagtgtcccattataattaaaaatttgtgcagcataagtagtattctaatgcatgggtggagttggtaagtagatcgataatattctgacctgaatttgttgcgatattactgaagactgtagtggaagcccatctatgtcgctagagttgttctgagacgaccatacctctcttccgctgaattttaaaagtataatgaactgtaattctttatttattttttaaataaattcatatacaactttaagctattgcaagtaattgaaatatcatttgggataaaataattaaaagggtggaagccacatttcagttaatcacataatccaaagcacaatttatgatattgggcacagtactatacccttgtaaagctagatgtgagaatgattagtgatattttataatatttattaaaataaattatgtgaaatctaattcttaattctactaatagttaaaaagtgttaatcactatagattttttttagtcatttttcaataaatatatatatatatatatattaaaagtcaaatatatagtaactcatgaattagtactccatatatatgcatacgccatgaacatatgaacaaattcatgatcacacttccaaccaataagaaaatgattgaaaatacataagcaacaaacacttaccatacgcaaccaaaacaggaaagagaaaagagaaaagaaaaggttctattctaaattaaaatatggggcgctatgaactattcgatcttgtaacattacatgaattcaagaaaatttgctttttttttttctttctttctcaagcatgtatatattttttcatgggttacacataccaaattcaatcttgttttctatttattcagtggtttaagttgtaaaagatcaaaacatgaccatacgagaagattggtacattagtttgtataatataagcacatttaagtggggtatcacttttacttataggggtgttttttattttcgtcactaagataaattatatatattttaatttttctatatatgataatgtatattatagttatattatgcattttgtactttcaaaaagagatactcgtaaaatttattatttgaattatatatatattccacacctacttacaatataaatatatatatatttcttactttaattatttcaaatttcttggaaatagatggaatatacaaagttatatagtttgtgtactataactatatatacttagtttataacttctctttatagataccgatccaaaataagaaatgcctttaaagtaaaagcaaaaattttcaaacagattatgagattatgagatccagttcagttatttgttggagaagtttgtagctcggaatacatagcctaatcctaactgataattaaattatatcttgggagggtaaagataataaaaactatataagttgatatcatataaagtaggaaaagtaccaattaagttctttaaaaataaactaattaatcaagtatgtgtaaggtgctcagcaaatgataaacaaaccttgaaactaacgactgtactttacaagggagaacttatttattagtagtagtgatatatactctcaaagtaagtttcttcacattcttatatttcaacacgactcatggtgtatatatgtcagtattgtaagatatgcatgcacacaaactatatatgatcatattcatatacatagggtgtttttgtttttaccgggtgtttctcatcacacgtggagaaatcattacctccaaccaatcaccacataaatagttaattacacaaataattgtatgacaccagaaagtactaaacaccagcaattattttttagcaattctcttatttaaatttatgatatgtttaactataattataactacaactataactatcactataactgtaactgtaacgtacataatcctataaaataatttcacttataacttttcttataaccaaaactgaattgccttccatcaataagcatatttttaatttggtttttataataaattagcatatgtatattaaacacaaaattacaactgaatattcttattaacataaatatatttacagagaaacacgtatatatgcagattattcaagaaaagattgtgaatttgttattcatataaaaatttggaatatgttcgatagttgcacttataataacttattaatatcaaatgatgtaattttctatctgtttttttcgctttataagaactacacacgcctcttcaaattaaaagtagaaatatatagtatacaaaattacataaataataattatgtatagactatatataaaaccctatattaggtttagttttagttaggtttctacagttaatgatcttaattggatgctatatatatttatataaatactagttcagttaaaaatcgctatataagcaactgttttttattacgtaccacagacatgggtacggttatgtgtatcatatcaacacaaacatttatagtttactacttatacacataaatttctgtgtgagggcattttcgaatttcgttcagaagaaatacttagcatatattggccggcaaattagatgcaattcaacacagattatatatatggacataattagttgacatctggtaagttgatcaccatcattaaaattttatgtatattatatttatgtccaaatatagcagtgagtgaaaatcttaaaatatatttctttaatagtactcaacgtacattacaatatttgagatcaaagtagcactactttattttttcgagttcagtccaatgtgagtgctgatgtaaatttatatgtatcaaaaatatatctcttttctcttgtcattgatgattattttatttgttgaaatttgacttatgttgtctagctagtaattagttcaaatgtttttggcaatgataaagagcagctggaaactagctgtaacacaatatttactgctttgcaaagagttttctttcaattaatttttataactatacaatattttataaatataaaaaccgaaatcttgttatatatttgtaatgaaaaaaatgttaaatattattatataagaaataattataaaacaaaattgtggggtgcaaggaagaaacaaatcagacaaaaaccgatcgaatgccattatttgatatggaagctggtgccaaacagcataggctactttatataaatatttgtaattgatttataatatatagttagtaggaacattaaaaggagaggtcagcgcacttaaatcaaggaagaaactttttttgtcatatatgtaatgcaatctctcctcgtggatggaataagaacctgagttttatattgaccaaattaaagtataattcattaactattaagattttaattttaaaaaacaaaatcttaaaaacacaataatattaataaacgaaaagaaaaacaaagtgaagcagttggttgctttctcttatcctaatttatacgatttggttcatgtgtttgatgcttttctttatttaaacccatcaaagctacttatctcaaatcagcagaaagaaaggacatatatatatatttaaataaaaaaaaataaa

SEQ ID NO: 380341 - DNA, 3109 bp, Cannabis indica
catattttatgtcacgagtttttcttacatacgtggtaagtaactgtttataaccttatttttagcaatgtaacatattcagaattttctaaaaaatttacaagtaggtctaaaatagctacaacgtatagctaatcaaaaaaataaactaaaaaattctataaataccaaataaatagaaaatatctaccagaacaaacattataaagatttctacagaaaattttctatatatttcaacatacttagcatatatagttgtataaatctctctataaatatatacattaaaggtgagagtcatgcattgcttgcttgaacaaagattattattattttttttttcttttttattagttagttttctttctcaacaaaagacaaatggatttggtgtggttcatacattatagagtcaactacttgatcttgatcatatatattaatcaataatcatgtaatttgtattttaactcaatttgttcaagatatatattatgtatgcatatattaatgtagaatatactaataattttatttacaagttcatttttattaatttggctctacctactcattcatgagaagctttattgtcaaaaaacattattatcagcaatttagcattaccctttgaattttatggtatggatacatttttgtttttattagtagagaaatatttattttaagcattttgaaaaattataatttaattttttacatgaccatatacaattgtactagttatataatatatattttagtaattttttaattttttcaaataattcataatatcaaaaaatataattcgaactttcagttgtatattgtgtctttttttttacacgcgttcaactgatattttaatcttattttgtgatatcgtaaattataaattttttcaaataattcgttacaattttttttttctacatactgaaaaagagtactattaatggaatttatattttttacggctaatttagatgtttgtcccctaaacttaacatgtatcaaattatgtcttctgaacttttctggtcattaaaatttcattaaattattgagattgttcgatttaaggacttttgtccaatttcattcaattttactaattcggtgattatttttttactaaatcataatcttcagaatttgatatttaccaaatcataccactcgaactttggcatgtaccaaattatgtttcctcaactttatccatgttagactttccttactaaaattgagcaaaaatccttaaatacaatattcgcaatagttcagggtagatttttatcgaccttaatagtttaggaaacatgatttagtacatgttaaagtttgggcaacaaaaaccttaattaagtattttttattgataaatatatggctttttttttttttacatagtgagggcgctatattttcaatattacaacactctgagaacaataaaaaattgtcccatgcatacatttaatttcacattcttaattaattgattgccatattcaaaagaaacattaccacaatattattacacacataaataatcaacctaaattaatgaaaataacaacaacatgatctctctagcttcttctatggttataattctttttttttttcaaccaaaaaaagaaggcatttatttgcaacacactccatagtaaaaaaatgaaaattaatattgaaatactatcacactattaatctaggattttgatggtggaaatggcttcttaggatgtgggaacttaaagaatggtttcttaaaaaaaggatgtggcttgtaaattggcttcggttccacctttggctttggtttcggttttgattctttttttggctttggctctgacttcggctctggttttgattttggttttggctctggctttggttctggcttatgaacgggaatcgacggaggatgagacttcttaaattttggaatagggtgatgaaaaaactcatgaaattttttcaagcatggtttctttgatggtgggatgaacgtatcttcatttttgatacccggagcttctgcatatataacatgaaaaaatatgttattgaatgttattatatttgaagaatatataatcttttaacattatgtatattaacaactatgatatcattgatatggaatgcaatgaaaaattgggtcattagaaatgaaaaattaaaatgtaacaacttttattttgttggtatgattaatgcaagttactttttaattatgtagaaaaattatgatagattattgttaattataatctcttagtgattctccacgcttaaaattacatgtcgaaatatttttttaattttttttatagtggtattcattatatataattacgatgcctgtaaatttttttgaatggtttaccgtactgaaaacaaagttttcgacatcccaatctactttgtgtatgttaaaaaaacttcaaacctatttcgataatgtaaattatatttagaatttttaaaaaatttacatatatcatgttgtaattatatataattaaagaacttgctataaaaaaaaaatattccagtatatagttttagatgaaggttgactaagaggttaatagttgcactccccgtatatatgcctatatgtatatatattacacattgagtttatgaatattctttttatcttctcaattttctatgaaaaagaataaattattattgattatttacatacctgaagaagcttggcaaaaactcacagcagagaaccaaagccagagacctagaagtgcccattggaaaagagcaatcttcatttggagaatttaatattattattatttttattataagtttcaagtactcaaaggtgatatatattttagtgatatgataactcttatgggatatataaatacatagctatggatcgtggagaagtaaattgaagtttatttcacttaattataagccagccaaggacttaaacaatggacccaaattgagcttttctttaataatttatttattattgtgttaataattttcatttatgacactcccaactgccaactgatacacaattcatataatttcatatatatatata

SEQ ID NO: 380342 - DNA, 2006 bp, Cannabis indica
taataatagagatgtatgtctttagttgtttattttgatttttatttattttcatagcttctccattaccatcattaatcaattctttttacctactccctggacagtgatatttttgccaagaataatcaaattctaatgaaactttataaaaagaagaaagaaaatataaatataagagactactagagaatacattacacatgttacttaaagtttttctgcctaacattagtggctatgaataaaatgaagccgttttttaacttttgggatcacaaatcaacacagctaaattaacaactctaagaggacgtaaagtcacaaaaccaaaaccaacataaaattggaaagaagaacaggaaaaaggtaacaaaaaaaaaaaaaagacaaaaaataaattagtagaggaaataaatatgcaaaagttgaacacataactagaaaagtagcccaacaagttggctcttttaaaagactatgtggtgaaccacgcattcttatccacaggttcaaaagaaaaagaaaataacaataatgtattacttcaaatatcttccttgattttcacgaaggaaacaaaaaaaaaatgttagtgaaaataacctttatgtacataaattattgaaaacgttgactagatatctgaatcatttggctgaacacacttggattggatatcaaatatcatttgtgtatgttggcttggtataaggtggatgcatagtgtatctgcagaaaaaagatcacaatagaaaatcttgatatttttagttaaaatatacattctcacaagttggttgttcataaaataaatttaattcaatctgtatgatttaatttaatttaatttgtacgatctaatttaattaatttgtaaagtgtgaatatttatatttatgtaaattagattggattttaaaattttaaaattcgtacttgtacagattgaatgttatttcacatataaaatagaattaatcgattcgatctaatctatacttatttaccgagatttttagaaattaaattaaagaagagcttaagaaattaaataagtagttaaataatagagattgagatttttacggggttcgattgttaataaaccttagttcacgagtcaatgtattagtctaaaggctttggatgtattacaataaagtcttacaagttgaagaaccctagtttttagctatagtgattttcctatgagtttttccttactttgtgaagaagaaggactaaagaaaaatgtactcaaagttctctctccctttacatgaaggtataaaagggtatttataggctaagatttagatccaagcatacttgtgactcgctacgattactgggcaaactaggtccactattaaggtaaatacataaaatacacgactttgaggaccggtgcagaattctggctcgtggggtgaatgtgttcgtatagatggggcccacgcgatccggacaggtgtcacacacgggtaatactacagtatacaaagatgtcagacaagtgccattagacaaagaggatgtattcctcttggtggtgtgtgcattgccatgttctgacataggagacaatgtctgatttggtgggaccgggtattagggaacaaccacatcacccctcaaagggcttctaagaatgcctcttgaaattccactctgagtacgtcccaatgttcacctggagggtttggcctattccatcttccaaaaggcggggaaccttctaaattcggataagtctcgtacttggaggcgaggcttctgggcttcaaatgggctcgggcccatctcccgtctcgactaggcttccttgcatggaggagttgtggctgaggctattcccacttgatcattctcttaaaatatcacgtgtcatattactaaaaaatacagataataacacttatttatattatttaaaaaattataaatttattattaatatttgaataattagcttttttagtccctgtacttatgacactata

SEQ ID NO: 380343 - DNA, 1503 bp, Cannabis indica
ttgaaggtggcagtcggccaagatgtggagatggtggaggcggcaggcggcggcagtcggcggcagcggcggtgatagagagagcaaatgagaaagagagacaaagtgaaagagagagagtgcaagaagagagagagatcaaacgagagggaaagagagagaaaggagaggctgatttttttgggtttgaggagagggcattttggggttaccattaaaagattagcatagttacaaaattcttaggatgtggtataattaaacaccattagtcattttttaagcataaaatgtcaaatttcccttttatatttgtggagtttaagtgtaactaaatgtgttgccaccaatatccctgagaagtatacaatcgtggcttcttctgttttaatatggaggaattcgaatggggctttctgtttcataaattggtttaaaagaaaacataactttgaattttttagcttgtggaagaggaagaaataaaaaaaagggaatataaaaaacacaaattgttattcagacaagggacacgtggcagaggatgaaaagcaatacgggtttgggacctagagaagaccgagttcattatactttcaggagacacttggaagccacttgagaagtctaacaggaacgccatttgagcagaggaaacagaaggcctaccatgaagcaagagtcagatagcccaagcgatggttatacttttttgatacaggatcagatcttgttccctacgtcagaccatggtagtgcgcacacctcgcctctgaataactttttttgcctgacggcttgcctaggcgtcttattttcaaggtgcaaccttttggcgacacgtgtcctaccacaatggtcccattgtaaatctgcctcatcgcaccagaaagaactttcttgggggcccaatagtgggctcttttgcagaaaccctaaacgggtcatgggtacacccatacccgtactttaacttataaatacctctttattttcacatagaggggggatcaaaaaaaaagatagccggagctctgctaaaattattttaagctttcttcttcttcaagagaaaccaagagagcagagctagggttttcttgtaaacaccactttaaaatatcatacaagccttttttaggccaatatactgactcgtggactaaagcttattaaaacctgaaccacgtaaaactctccatctattttacttaatgtatttattatttcttaagctctttattaattagtttatgaaaatctcagtaaatgttttagtgctttcattgagagcttaggaaagatcaaagccacgatgttgctcaaaccatggtggctaagttattaaacacaaaattacaattttaaaactaactaagttatttaaaaattcatttaaatataaaaaaatattaaaattttaatttttgtaaaaattaaattttactggaacaagcttgagtctatttttttttctctgaaaatctaaatttttttaagtaa

SEQ ID NO: 380344 - DNA, 1816 bp, Cannabis indica
ttggaggtgtctctcaaccaggtaagttggctcaacacatcaacttacaggtagggagtttccctttcaaatatcttggcattcctcttacaccaactaaatggaagcttgaagattgtggtagttttctgaaaaaaaaatgaagaataagttgatttcttgggccaacaagcacctctcttttgcggggagggtgcaattaattcactcaactttattgagtctcaggaattattggatgagaatttttctccttcctcaaagtgtgataaaagagattgagaaattgtgtcgcggatatctttggggaatgaaggataaccggccaaatattcatttggctagttgggataaagtgtgtcttccaaaaccttatggggtctgggtttcaaagatggagttaaatggaataaatcttctcttgctagatttgtttgggatcttatgaacaaagaggacttgctttgggtcaaatgggttaatggtgtgtatcttaagggggttgatttttggaattatgagttgaaaggtgatacaagttggtactggaagaagttgtgccatttgagaaatagtttttcgactacagatttattagctgctggtgtttagggaaaatttagagcttctaagctctataactctctgattgtggagcagtcggattcagcagctcgggctatttggtgtgggttgaatgttccaaagcacagtttcatcttgtggcaggctgctcactcaaacctgctcacaagagacaaactgattttattccacataccaacttctgacttgctttgtgctgtgtgtggtttagactttgaaaaccatcagcatcttttcttcacttgcaggttctcaaagatggttcttgaagcagtttttgcttgggtaggattcaagggatgggctgccgattttgggagctggaacaattggcttaggatgggccattctaacttgattgggaggttgttgattgttattttggcagccaccatttatcatgtttggaggaataggaataattgcatttttttggattactcaaatacagtcacttgtatagttagcaaaattaaaaaagatgtcaaataaagattgtatttactcaagaataggattggctccaaagtggaattagatttactaaagatcttgattgtaactaagtgagggagtggtctctttttggagagccttgagggtgtattgttggttgttggtgtgattaatgaagctttattcttcttgataaaaaaaaaaaaaaaaaaaaaaaaaattatctatatagtggcattaaaaaggcattatcaagaaatttatatcatttttttttctctctccttctcatgtgatactctacattctttaatcttttcatacttttcacaattacaattgaataagtgagtaagataattttgatgccttcaagtgatgaacataacttaatttcagtaaaagaatatgaattactgtaaatatatgtgaattaatattataatgtaccaatatttgaacaatgataactcatttagctcgagtatgtattttagttaaataatattataatataatatttattataatttttctcataattttgtcatttgtataattaaaatgtaagaatattacaagtacaagatcacattggatcaatttctcaatcaatattaataatcaatcacatattctaaatcaatatcaatatacattattattttaataataatgggtgactatttaaaggttacatttttaaagtaaccatatggttacattttttttttgacctgtaatagcaagttac

SEQ ID NO: 380345 - DNA, 3883 bp, Cannabis indica
aaaaaaaggcaggttcggaagaaggtagtggaacattgtggagaaaagaccacgtattgccatctttgattatcatcgaacctaatagtatcatcaagatgaagacatgatgagagatgggcttatcttgaaattgctagaattctcttccttaatcttttaccttttttaatattacaattacaataccccaacaaaccagaacactcctcccatcactatatatacccttgagtgtgtttatactccaccaatatccatagtgaagttgttaaatcatcaatttaattatttcttttttcaaaatcttacattttaagcttaattctctcaacaatgtctctcattcccagcttttttggtggccgaagaagtaatgtgtttgatccactctccctagacatatgggatcccttcgatgacatcttcagctctacacgggctgtggtgccttcatcagcaagagaaacatcggcatttgccaacacgagaattgactggaaggagaccccggaagctcatgtttttaaagctgacctccctggccttaagaaagaagaagtgaaagttgaggtggaggaaggaagagtcctccagataagtggggagaggagcaaagaacaggaggagaagaatgacaagtggcaccgcattgagcgcagcagcggaaagttcctccggcggttcaggctgccagagaatgccaagatggaccaggtgaaagctaaccttgagaatggtgtgcttaccgttactgttcctaaggaggagaagaaacctgaggtcaagcctattcagatcactggctagagatgataacttggctcactgagatgtttcctcatactggtttatgttttgtgttgatctaaataatgtcccagtacttgtgctcgtgtgtgctagagttgttttgttgtgtcagtatgatgtgtaatcaaagtgtgtgcgacttgttttttcagttaatgtaatgaatatttaattttcttctaatgtctatgctttttctttagtctaaccaatttataatatactagataagtatataaatatacatactttctctacatgcaaaattaccatgcccagataaaagggtgttcacaagtaaactagactaactagtaatgcacttgatgcgatgtcatccttttgatgatagaaactccttcacattgtgcagaatgcctttatcatatggatttgtaaaccacacttcagtggagccatgccctggatggaaattttatttatttatgtaagggtgaatgtttaaaatacatgatcataacctataattgtgcccaagttagattactgctttgaaaacttgaaatgtttacctggttggtgttgcattattaactggaattctggatacttgttccaattaatctacatggaataacaaagcgatcattgctcattagaatttgcacttcaagcaaccaagaacagattaaatgatttaccagtagagaagagtagagtgtttgattatcacatagcaacttacccactcatcagttctgatattgaaacatatgcaatatgcatgccatgtcaaaaatggcaccttccataccaattgaagaatagcaaagattcttaaactaacagccaatctttcagagagactagcctattcattggtggaacaacaatatattaggcatggaagcattcgtgattgatgctgaaaaagatctagaattgattcagtgcattttatacctctgaactgtgtattcttgagatggtgtctgaaaatgtaacagcaatacaatcaagcaatcatcaaagcctatgttaatacagtgtgcgttctgattcttgaaaatatagatatgtgagtacaatagtttacagaaagtacaaatatgttccaactaatatgctttattcatcaattttgatggaaaatgaaaaagatctccatactttccacgtgtgttcagaacatacaatcaatcataacttacagtcagatgagcatgccagaaatgaagcttcagtaacaatgaacccaagcaaaagagccatgaaaacaaggtaattcttttgacctgcaaacgaaaccggtaaagaatgtaatgtggtttaaaaacaaactcaacatcagaagttgttaaatttagtggccaccttcaaggaaatagcagcatcagaaatttttggactggtttgaaatctaaatgtactacagttatatttgaatcattaagcatgacatctttatcattacctatgcagtttccaaaagcaggacaatgatggtcaaaaccttttatgtatgccgtacagttcctgcaatatctcaccctcctctccaaaatagaatcctaaaagaaaattaagtaaagaacattcagttttacaaagtaaaaataaaaatacacagatgcacagatgcacagctaaaatcatattcgacctgattagaatattttaaactttcccatcaataattaatatgaaatcaatttgaagagtatattccaccacattgcttctatcttcaacattcaccacaacaaaataaagaactgaactagatttgattaatagagatgctgtgttccttcagattataagggactaaagaagattacttcagccgattcatgacttaagccacttgctaaaagctccaggtcctgcatattaatcattaagtcattagtggttgtacaagcctacagtagaatattagttagctcagctcaaattatcaacctcgtccagattatttagttcatcaactgaaccctctgttggtttgtctgaaaaggaaggcacatgccttaccaccccaggatcactctttaacatactgccaataagaacatctacattagtagttcccgatctttccctctttactttacagaatataataacagcaaatattttatattcctattatcttggggcaaggggtacagtatacaacctacacagaccaaagataagcatagcaacttctccattaaacaagatatccataaaaagtgatacacctgcaacaaaaaattgagatcaaaagcttccagattatgattacccagttaaaattttcaattttagcaatacccaaatgaaatatcagcttaaactatacactattataatacagagcctcagaaacgtctaattatatgtataaaatagtatattaataatgaaatagtacctttccggatgataaagacataaaaacaccaaatgaacagtatattgaagaagacgaaagctggggcagaagcatgaataccaagaagtcttctgaaccatcctcccaaacccattacaagcagcagcactagagctgttatagaatatcaaaacgacaattaaagacaattattttcaagtttccttaaaaattcaacaaacaagtaaagttgaaaattgaaaataaaagaggacctgagagtgagagttgaagtagaagagaagaagaattagagaagaatcgagtcaccaatgagagagcaaaataagtgagcaaaaccatgttacatgaaacgaagcagcgagcaattaagctcggccaagccaaattctctcttcttctctgattctgcagttgaagcattttcgtgcaagaaaatactttgatttttgtagatgttttctctcgttgacaagtaccaggtgtggaaacgaagaacaaaagaagtctaatccaaattccaaattccaatttgaacgtacgtcgtcgtttgagcacaattgtatggattgatttctattcatttttttactaaattttggaacaggaaaaactagggatgcacacggggccgggaattggcagggagtgctcccccgtccctatccccgttaagaattttaatccccatccccgtttattccc

SEQ ID NO: 380346 - DNA, 3380 bp, Cannabis indica
atttatttatttatttttcaaaacaactgtgaccacgtgcatagccgttgtgacaaattgcctataatattattaataataattactattattatagttgtcttagtctacctaaaagtgacaaaaattgtggtcatattttgacaatttcgacgtacactaaactcttcactactgcttcagaaagtttagtgttggtaatatcttattagaagctttatcatgacgggaaaatgattttgtcctgttattgtacttttgcggattgtaattcgtgatgtacggcagccgtcagatgagtgagttatttgatttgacggctgacattgatctaagggtaattagggttaaaaagtagaaatgtaccttgacacttatttaatgtaccctgagattcatctaatgtaccatgaaatacattccgtgaaagtacatcacgggacaaaatcatatccttatcatgatgcaagaagattaggtgtttaaaatgaaaacttgtaggagatatattgagttgtggaggataatgattaatgggaatgaccaagtacaagaacaaaaacaaatataaaccaattagatttttgcgtgttgactatgataacacaagttttttcttttactactgggtcctgatcaagtaagaaaaagttttaaatgactagccaaacttgagcaaaactataggattacaattacttgtagttgtaggaactattctgtcgtttttaatctgcaacggaaatcaataataattaatgtagagtaaaacaataatattgcagtattgcatagtgcacaagccactcctgtcattatttttggtgcaattataggatccgcgcgcatttaactcatttatgggctatgtggcatctagactctagagattatattagttttagtttattaatacttttaaattatgaaaacaactaataaaacaattaggaaaaaactatgtacaaaatttctttttattttatttatctatatagagtagggtgataatttgtgttggcgtgttgtgttcagataatactgacccaaacacaacccgtgcacaaaaattttataaaacacggacacgaacacgactacgacttgatcataattcatgtcgtgttagttaaaaagagaagaaaataattgaatgctcctttaatgacaaatatttgatattctcagcgattggtttatacaatgttaaatacttctatatatacagagtaaaagcaaggtataaagggaatacgaaattacaattggaatatacaatcgtatagagtaaaatgtatagccgaaaatagctgtcacaatggtacaaatattccctcacaatgttagctgtcatattgattgtcctcatcaaattttgttatgcaattctgttatggcaattttatcattttcaatacgcccctaaagctttgctgtaggtgagatacaacaagcttgttcttgaaataatgaaatagtgagatgctaagagattttgtaagtatatctaagatttgttcttgtgttggtatatatctcacatcaacttccttattcaaaaccttttctctgatgaagtgcgcgtctatttcgatgtgtttagttctgggatagaatactagatttgatgcaagttgtcgtgcaccagcattgtcacaccaaagaacagctggttcattgtatttgattccaattttagtaagtaaagattgtaaccaaaccacattagtacaagcttgagcaaagctctatactctctgcttcggttcttgatcgagcaacgaccttttgtttttgagagctccaactaactaaattattgtcgaagtagatgaaaaaacctatagttgattttctgtcatctaacgagctttcccaatctgaatcacaatagcctttaatgataagtttggctgctttggtgaatgtaatttcctctccaattgaaccagcaagataccttaagattttcttgcaagcactccaatgattttgagtaggaacttgaagaaattggcttaacttgttaactgaataagcgatgttgggccggctaagggtgaggtattgaagagcccctatgacactttgaaagatggttgggtgcttaaactcggcactatcttgcaggctgagtttattgctttgttttatgggagtgggacatggtttggcgttgatcatgtttattttcttgagaaggtcaattgtatatttagtttgagataagtttaatgcatcatgccccctactgatctcaaagccaaaaagtaggtaacagatcagagagatttgagggcaaaaagactttaaagcttggcaatgatggtggtaacttgagaggcattgtttcctgttagaagaatatcatcaacgtaaactaagacaaaaagcaaagcatcaccattgttataaaagaacaaggaagtgtcaatagaggagtttcgaaagccaaaggcaagaagagaacttttgagcttatcaaaccatgcacgaggagcttgtttttaaccatagagggcttgttgagcttgcaaacagtcgtgggattagtggaatcaataaaaccaacaggttgttccatgtaaacttcttcgtgaagagtaccattgagagttgcattgttgatacctatttgttgaatatcccaattatgtgtgacagcaaaggagagtatgacacgaatggtgaaaggcttgactacaggactaaaggtttcaaaaaaattgatccctgactattattgaaattgtttaatcacaagatatgctttaaattgactaatggagccatcaaaattgtatttgatgcgatacaaccacttcttgtcaacaatatgcatgtttggttggcggggtacaagactacaagtgtccatgtgttgtaattttttagggcaatatattcatcatccattacagcaagccagtgaggaaatttaagtgtttgagcaagacattctaatatacggttaattggtatgttgtggtcagcaatagtaaggaagattttgggtttgtaagatgccgactttttgagcaagttatcatggggtgacgggaaaagttgaggagatggaggaatgggtgagggaagtggggaggtggagctattatgaggaactggtgaggttaagaaaggcaagacaatttcaagtggtaaagtggaataagattctactgaatttggagttttgccttgactatttgaggatgatgatggcatgggaattgctgaatcatggccagtagcaacttcagaattattgacttcatcttgatcttacacagctatatgggattgaagtggagcacgttaatattagatttaaagatttttatctaattttagtaaaaaaatttaacatgaatgaaagttca

SEQ ID NO: 380347 - DNA, 711 bp, Cannabis indica
taagactttttttttttatataggccactttgtctcatagattaacgcaatgtcatggtattgatcctgaagcccctgctagatttgataattattaccccatcttatgtatgttagctataaggctgtcgttaagctcttggcaaataggctacataatattttggatatgcttatatcacctaaccaatcagcctttgtcaaaggcagatggatagctgaaaactcgattattgtccaagaaatcaccaatgatttgagaaagaagtcgagtggtttggcctttgttggtatcaaatgtgacatgtctaatgcttatgatttccttgaatggagttttattgaaaaggtcgtacgtgccttttggttttgatcaaaaattcatctcactcatcatgtgttgtatcacttaagtcagcttccaaatccttcttaatggagccctaaaaaaagctttaggtcttccagaggcattcgacaaggtgatcccatttcaccttacttgttcattttgtacttagaggagctatcttgtcttttgtatgatgaataggaaaggcttggaaatttggtttgttttagggtaggcgggtgtagcctcgcaatttctcacctcatgtatgcagacgacaccctcatcttctgtaacgcccttacttacgtaaaataagatgccataaataaattggcgttaagatactaatgttgcct

SEQ ID NO: 380348 - DNA, 2258 bp, Cannabis indica
aaaaaaaaaaaaccaaaaatcaaactctctttctctccctttgtgttcggctaagaaaaagcttaaggaaaaccaattttttttcttcccctcttttagacctagatcaaggggtttttagcaaggatttctagtatcaaccaaaggtaagctcgcctcttgctcttccttttgaatttttaaggaaaaagttaggtcttaacatgcaattttgactgttagttgctgttaggatttgatgttgttttagctgagttgatatggttgaattaagtttgttttgcatgttttatggctgtttggtgagttgtatcaagtttgaactaggtttgagcttttgaagctcatatttagctctttaatggtggttttgtgctcagtaggttgatgatggaattttcagttgttttatgttgatttgtcccaattagatgttctggagctttgtaggtggtttgggttagttttgaggaagaaatgagattttgtgcaaatttgaaaagcaatgagtgatgaatttggttgagattatacatataaaatcatttaaccctagagggttatgatcttcgagacactactgacacctttttggttatgttgttagacattaatttttgatactttacattatatatgcttagtgactagattttgagatcctggattataaatattttataaaagtgttcaaatttggtgaagtttaattatcacaaatttttttattaatacactttatgttaaaatcctttgattaccaaagattagcataataattaataaaacattgtaacgtgctttagaatagctactaggatgttataatttggtatcagagcgaccaagtttattctctgaagacctactatatatgtacaatcatcatcaaagacaagcttgacttacactttagtaagctttaatatgctttagtagttcaaataagatagtatgagttagaatgcatgtttgtaataaatgtatgaatacgtatatgagtaagattccatgttatgcggcattaaattgtatgattacaatcaccgcctgaccgacctgatttatgaaatcacaagcttgttctttaaaatggacacctaataaaatcataaaaggcagggtgatctggttgaggctggaggttattggggaggtcagaatccccccctgctcgtggccaagttagaggtcacggtcggggtcgtggtagcagcaatgctaatccaccacaagctctgctagattgggaacaaaagtttgtagaaatacaaaccagatttcagaggcaagaagaggagctacaacgacttaggcaacatgctcctccttagcagatgccaccagttctcgttccagtgttgtcaattgtccaaactgcaactaataatagaatggaacctctgtatgaaaggttccggaagtaaggaattcttattttcctagaccatccagatgttatgaaagtcgagtagtggttagccaccattaacaaaatgctgaattttatgagagttaccagtaatgaccaagtaacttgcgctacttttcagtcttaagatgatgccttgatatggtgggagatggtatctatgagccgtaatgtggcagctatgatttaggatgaattccaagaactgttcaatgtaatttattataatgaaacagttcgcattgacaagaggaaagagtttgtttaggtaactcataaaaagtctatgttggtgacaaagtacactactaagtttgacatgcttgccaagtttgcctcaataattatgccaactaattttagtaagaaagcaaagtatttggcggggctcgacgctaagattagacacaatctggtgatcataactgatgaaggcaccacttatgcatagatggtggaaaaggctcttagggccaagggtgctattgagcctattcagaagtccaaactaactctaaatgatagtggatgtgctgctcctcttgcttccatttttggtaaaggtggtggtagttcctttaatgatcagaaaagaaaagcttcaatggcatctagtggctcgggtcaaaataatatgttcatagggaaccagaactaaggagattgtcaggatgatcttaaaggtcgttatacttacccagagtgcccagtttgtaagaagcaccatcttggtgagtgtaaggggaagggatgctttcagtgtggtattatagggcatttcaagaaagattgccctcaactgaagaaagaagtgttgggttttatg

SEQ ID NO: 380349 - DNA, 2213 bp, Cannabis indica
tgccttttggctctagtctttatgcatctccaccatcatacccccagtttttgctcatgactttcttatactgtcttttagttctgcaagtcataagaagtcttttatgtttatattccaaccatgttctcttgtgcacgtgaaaagagattctgcacccttaccttcccttttctttctttttatcatcttcatttctttttatgtaccttgacctaatccctgtatagcttctcccttgtgccattaatgctgcttgtgctgcttttgttgatgctggaattcctctaaaacatcttgctggtaataagatttgttgttttcttcactttacccctcatttgatgtatgcttgctgactgtgtataattgtttgaacagttgcaatatgttgtggtcttgtcgaaagtggatatgtaatacttgaccctaccaagctagaagagcaggttattatgaatttttatattaaaattaccaataaatcaattagtttaaataacttttttgcatttttattctcaaatattttaattggttacattaagtctagtacccagaatcttgattcagtcagggacataaattgtaaaatttgattgggtttgaaagaagaggattaaaatatttaaaacctttattatgtgagagagctccttattatatctttgtaactttataattaaattaaatatttctcagtaggacgtggtgtttttatttttagctagactatatgggcttttttttttccttaagattcattgcattcccttttggcattccttcttttagtctagtttatatcaggtttgggttctgatcataatcattgatgcatttcatgcacgaaagcttgatcgttaacgtgtttctgtttctgtttcataatgacagaaaatgaaggcttttgcatatcttgtcttcccaaactcagctctctcagtccgtccagaaggatcagcagaagtgaaggatgaacctctagaacatgggatcatcacatctgttacacagggtgcaatggcaggtagctgttgttatgcatcatttgtgtctcatatattacctatattcatattaaacattctgtacatttccacaactgtttgccatcaccaccttatcttctattcttgacctcttcactctaattacttgtgatgctttaaatttatctcatggactatagaggaacaagctgtttagtcaatgtcttgtgttaaacatcgtttcatttgtactcattgaatgcttcttcagagaatcttacttatttgtataactaaaggttctaatttcttattgcttaatttgttcaaagtgggagactactttcactgtctagaacgagggcgcgccactagcgaaaagatgtctgcattcctccggaggagcttgcaaccccaaatccccagttgaccgacacatctgtagctcagtgatttagatcataaaatctaaactcaatactaatacatcttatgagatttcaaatggggagttagttaattttggtgccaatacttgacaaatcctagccgttgagttgagtttaacaattttgaatcccaccatttttggttttctatgtccaccgtttcttgtatcaagtgggtagtgattttgttccacagcctttgcacataactgtagtaaatgctcatttcaatgtacgtaatgcaaaagagttccttttggcccctccagttgtaaattccccttttgtactgtgtttttgagattctgattgatggggtatgtgttagaccgaaattaaatacagtgaaattggaacgaggagggttgttgcggttagaattagaattcgagttgcggttctgattcttaaaatttttgccattaggcttcaaaaccgctggtgtggatttcttagtgttgttgtttgaaacaacaagcacttcatctttctggtcttgttttcttgcttcctcctctatacgaaggcgggtgatcaaactttctaaggaaaattccttagtcttatgcctgagagtacttttgaaatccttccaggaagggggtaacttatcaattaatacagtaacttgaaactgttcatctaaagtcataccttctgagatgatctcatgtgcaattttctgaagctcgtgagattgggcttccacaggtttgtcgtccaccatttgatacttgaggtagcgactgacagcatactttttagttccagc

SEQ ID NO: 380350 - DNA, 1665 bp, Cannabis indica
tagtgaaaattccaagtgtgtttgagacaatttgtgttcttccgattgaagcaacaagcgaaagagtgataaagctgtgtgatgtatggcaaagagtaccaagaactgtttaaaaaatctgaagcaacacattgtatcagtctccaaattataatagtattagtaaaaacatgatatcagttgattctaaattagcacaccgatttatttacctgctagcatctggggcatatcctattgtgtagtatgttagaatgatccaaactgctgattctacaaatgacagaggaatccttagaaccaaaataggtaaggcaaatgcccaagcagggtaaaataagaaatccctttgcttataaaaaacaggaagtctcataacagttaatgccatctccaccaaccattaaacattacattaagtagactaaaatagagtgttccaagaactttttctccatcttgtaaagtaccaactggcatttcagtcctaaagaacacagtcaaagcaataatcgacatgattgttatctgcgcaatcttgaatgcgtaaataaaataattatgcttcattaacaaccattctcttgaaaaacaagctttgaaaagttcccaatttgatattccatacttgtttgttgttaatgcagtttttggtgctttagacttatcatatgggaccttaagatcatttaagagttgttgtccaatatggaaagacttaaaggagtctgagaactcagaaaccgaaatgaatatgtatggttgctcagttttgaaccagtactgctcttgatctttcttggaagttacttcttggagaaaatcagcaactcctttcctatccgggcatttgaatcccatgtactcaaaaaactctagtacattctctcttggaccttggtacactacttgaccttctgaaagtaatataatgtcatcaaaaagctcatatgtctctggtgctggctgtagaagagagatgaccattgttaaatctgaaatatgaaccatttgtctcatgtagttacatatttgataagtggtggtactgtctagtccagttgaaatttcatccattgcaaaaaccttggctggtcctaccaacatctctcctgttatcaactcataatattattagctaagacaattatactaattaatttcatatattagtttttgctgaattaacatacctattgtcactcgctttttctgaccaccagaaatacctcttctcattacatcaccaactatggtatcggcacaaatctccaatccaagaatctgttttggtaaatatttttgtcaaaaaagtttctaaataagtaaacaatgataacaaagatgtaatcaatattagatttttagataataaaggctagccttgagaacataatctgtaattaaactagtctcttggcctgacacagctgtggccttcatgaatgtgtcaatctcaatatctggctcaattcccgcttctttttccttcttagaaagttgttctagtatttcatacctcgaaccgacacctaaaaaccgccccgaaaaatcgagtgtctctcttactgtcatctctccaaagtgaaggtcatgttgactaatgtaagcacatgttctttgtggaacaaattcattgaattcatgtccacaataggtcacttt

SEQ ID NO: 380351 - DNA, 1420 bp, Cannabis indica
ttgggttcattatttgtttgcgttattatgcagtcccaccatcaccaaaatctccaaccacttctctaaggattgatcggtttctgcggcccttcaccttgaaagcagtgcaagagcttttgggcaaaactggcaatgtaaccagtttctggatggatcacattaagacccattgctatgttactgtaagactctttatgcatatatgtgtacttttatgtttagtgtgtgccatggatttatttgttgctcattgaaaaaaaaaagaaaaaaactcaattcaataaccttggtggtgcagtattcatcagtggaagaagccattgaaacacgcaatgctgtatataacctgcagtggcctccaaatggtgggcggcttctccttgctgaatttgtcgaccctcaggaagtaaaaactcggttggagactccaccaactcctgtagcttctgctaatgcagctcatgttgcatctcccaaggcaactcctgttccttctatcccattggccgcacagccccagcagtcccctcggcaaactaggcagcagccgcagcttgcacccccgccttccctccctccaccaccacccttgtctaatcctccccaagcaagagaaaggcttcctcttccaccgccaccaccactgccagaaaagcttgaccctccaattgtcacattagatgacctctttcgaaaaaccaaggccactcctcgaatctactacttacctttgtcggaagaacaagtagccacaaaacttgcagctcaagggaaacgtgtgatgcagtagttactgtagactatgttaccgatctctcagatctgcaccggggatgctcttgcaggttggctggttggtgtttggtagattgtagtaaggaagtatcatgaagttgcatttttgcaggtctacagatgttgttatagctgttgtaaaggacttaaaggagtgtccttccatggtggatttgtggtattgtggaactgctttgattggagcttaagttgaatttagtgttagaacctgtcgagagctgttttttgtgacacatttggtatacctggttttccttttcgaaccagagtttgttttttcttttttactttggttaaaaattgttagtttaatttgtatttgaagattaatatacattagctctcttaaacgtaggatctgcaactttaaggcacatgccttctgctatctgatgatatgtgctataacattttatactcgtgttttaaccaaatatatttatttttacctgtatttcaaaaaataaataaaaaacaatactgaacttaacaaaacaataatatctggaaacttatttagttatataatataataagtgaaatttacacccattactgcctttatcattttttttttcatttgtactgttgcacggtcatt

SEQ ID NO: 380352 - DNA, 4384 bp, Cannabis indica
ttcctgagggggagatccaaaattataaggacgagtgagtatgcactatttctatactatagcaattttacataacatattatatacagtgtatactgtagtttcttttggaggctttaatgaagcatggaaatcctcagtcttttcatggtcgatttttttatttggttaaaatttaatttaggatgatctgttggggatgcttttccattaaaggcctatctgcatccctctcacccctgttgtacttttcttttaccttattgaagttggtattgttttcagtaacttatggaggactacctctgaggagaagagggagttggagcgccttcaaaaaccaatgtataattcagttcgtcgagcagctgaagttcatcgtcaggttgccttttgggtttcatataaataattaaattcttgcataattgcattgctttttaagtgaaatgaaaaactatatctacctgaaaatgacttttaatgtaggttttctttaccgtgactaggttaggaaacacattaaaagcattttgaagcctggaatgttaatgactgatatatgtgagacattggaaaacacagtccgcaagttaatatctgaaaatggtttggaagccggcattgcttttccaacaggatgcctttgaattggtgatttttttttcctgctttatgcatatttcacgtagtagccttatttgcattgtcatctcatattcaaaggcctctcgcatcgacagggttgctgctcactggactccaaatgctggagataagactgtacttcagtatgatgatgtgatgaaattggatttcggaactcatgttgatggtaatatcagctgtgcgtgtgttgcacatgtttatttattttttttttttttcatattagtctttccagtgtgtttgtgtgtgtaatattttatgtgctgagtgtgtttatttgtttagaattttttccctttgtggcatatgttactcttggctggaggtatcacacactttgttgtttgattaacaggattaattgttgactgtgcttttacttttgcgttcaacccaatgtttgatccattgcttgaagcctcgcgtgaagcaacctatactggtatcaaggtactgttacatggtgccaagaaaattgaagagaacaacttatattatcgtgcatagtactgtataggatgccaggttcaagtgtaaattattggagcccatataaaaattcaagatgatacctactgtaaaaattggagatagtttttaacagttgcagtatgttaatttaaaaacattggatatatttattgtctctcacctttctggataatctgtatctttattctattacttagctgtccttgttggtaactttttgtattttgatttcttaaacatgagtagttatgtatggagttgtgattcatgtgctctgtagtttttttgtttccgaaaacaggaacttaatatgcagtactttttattttctattgattatgcaggaggctggaatcgatgttcgtctttgtgatattggtgccgcaatccaagaggttatggagtcttatgaggttgaaattaatggaaaggtgcatcaaggtatgatatctaatgatactatcccaagttgtaccaactgttagctaggagaacacgttctcgttctacttttctagttcttatattagtttggtgctctaatttgttactgcatatgaattcgttatttgcacctcttaatctacattccttatgtatatgtggattgcaagtaagaatatggttaatcttggcagttaaaagcattcgaaacttgaatggacatagcattggaccctaccaaatacatgcaggaaaatccgttcctatcgtgaaaggtggagagcagacaaaaatggaagagggtgaatttttcgctattgaaacttttgggtcaacaggtaaaaggtcctttcatttggttttcctacatcgacaccctgttcttttttataaaaaaaaaaacccctctggcttatattaatgtgtttgtcatgctcagggaagggatatgtcagagaagatctagagtgtagccattacatgaaaaactttgatgttggccacatgcccctgaggttgccgagggcgaagcagttacttgccacaattaacaagaacttttccacattggctttctgcaaaagatatctagaccgtctaggagaaaccaaatatcttatggcgttaaaaaatttgtgcgatgtcggtatagtccaggtattgccaacatctttttgctccttttgttttgagtttgctaagtgggagttgatgcatgtgaaagcttttctgagttttgccattgtttttgcagccttatcctcctctatgcgatgttaaaggcagctatgtatctcagtttgaacatacaatcttactccggccaacctgcaaagaggtcatttccagaggtgatgactactgacatggaagtattaaattttgctcttgcatgcatggcggctgtacaacatattattaaaaggaaaaaagaaatatgaactttctcctcttagattttatacttatgtatgtttcttattcagttttgttgaacgagtacttgttttataagtggtattatactcttctgtagtggaaatgttgaattgctaaatttagagggagttcaaacaaactgatccatctgttcttcactgctatttcaaaaaaaaaaaaagagcctgatgatagaactaacttgtgagtggtgagaattatctgctctttatttcttccttaggtagatagaagtgatcactcctagtagttgatcagaggaatacaatattataagaaattatactgtgacttatatatagcatattttagaagctctatgtgcctttcttttatttagttaagcagtttcaacaagtaaagaacctagcagaagagattatttctagcatcaacaccaaattgctggcaatagttgcggtacaagtcgaccctagcttgaactttggggcggtctttaccatcacattcaacaacaccattgatttttcgaatggttgctccaaagccttggcttacaacaggactaacattctccatccagaaccacaaagctgctttaaacgaaatgacaggatcattggccactgtttcaggggaatttatcccgtcgaagttgttagctttcccggctgctaaatagttgtagttccatgtcagttggagtgggccacgcccattgtatctcttattagggttgcatgcagttcttggatcacaatacttttcattttggtttccagtttcttccttgaagcaaaaatctgctcacaaagtaaaacacttgatcagtacaataatacacacttacacagaaaggatgaggtagcaaggtaaaggagaagaagaagaagaagaggaagtttcttacagccagtctcgtgagtcacatgagcaaagaaggctgcaatctcacgttttgaatcatcaagggagccagttgtggcgaaacgagggtatgagtttagagcattgagaaaagcctctcgagtgtagaagttctggttgggacagtttggagcagcagccttgttctttatctgagtgaagaattgctgtgtcacaatgttagccaccgaaacaccatttgttgtgcaggggcctgctttgcaatttgcaccacaatactcagtcccacggccgcagaagtcaaatttgctacaacattcaccaggggcacatgtctttgatccacatggtgtttgagccatcacacttgcagccagaatagctaaaagggttaggcttagtagtagtattctcacttttaggatagccattttggggaatgagtagtgatgaaacttaatgtctgatgagctactgatatatatagtgggaaatgaagcaaatgctcattgaagatttgatgacatccaatgtgaaggactttgatttttcaaaggcattgactgactgataagttcaattgacttgtcaaagagacaatagcattggcaaatatccactttctatcccaaaatcaatgcttttgtcaatatttattactcggtccatggaccatgactacaagttgggcgctttctaccctttttttcttcttaggaggaaattacgtaatttatgattttgtttttgaaaataggagtttctcaaaaagtttatttttttaaaaaaatatgtttatatatcttcacacggttaaaccaacatttatacatattaactttattttattacacttttaccacttgcacacacaattcatgcatgcagccacacacgtcattgtcattgattgatgacttatatcaatcacaccttacatcacttcctttatttttttttttttactttt

SEQ ID NO: 380353 - DNA, 2972 bp, Cannabis indica
cttctgtcaagtaacaatagtcttactcagctcagacccacatggctcaaagtgcctcaaatggctcgacaaacagagaccacaatggaagcttcaccattttcaacccaatacagctttgagaactggccttggggctagaactctctaacagtaatagaccttttctctggattttaagggacaataacacagaggaagttaataagggtgacttcttcccagaaggctttcttgaaggagtagccagtcaagggctgatagttgactgggcaccttaacagaaggtccttaatcatagttctgttgcttgttttgtaagccattgttggtggaactcaactgttgaatgtattagatatggtgtccattttctatgctggggccttactttgctgaccagttcattaatcagagttatatttgtgatgtttggaaaactaggttggggtttgatcgacataaaagtggggtcatcacccgagatgagataagaattaaggtcaagagagtgataaaagatgaagaaatgaaagaaagagtcttgtgtttcaaggaaatggctgctaatattgttgaagaagatggaagctctaacaagaatttcagggattttgttgaatgggtcaaatcataaaataaataaatgaataaagttagataatgatgatgatgatgtcaacaaactgcaaattcttaaactaacaaaccaagcatcttatgatgataataactaggtggattttctttgaaaaagattcccaaaatatttagttactctttactctgcaatattattaagatggtcataatatagctgaataaaggtaagaagacatttagctttgaaccttgtaaaacaagtgcaaacaacgtaccaatgactcttcattggtgttcttttcattcctgccatatatataaaccaagtactttattataagcttgaattcatttcatgatctagacagcacagaggggcacttgatctcaacgagtaggcactcaaaaatatgatttattatatggaagtcattttcttctccttttattttcgtctttcttcataagcaccaagaaaatgctaaaccttatatatgtggttttacaatacaaacacaggagcaaagaatggagccactgagggtaagcaaaaaaaaaatgaaaaaggacgtgagaaactatacaaatgcaaagaagaaaatatcaaacaagaaaaatgcaggtaagacaacagagaaaagacagatttaaccaaaataggaaaaaagaagagacaaaatgagcgattcccccacactttatattcaagtgaaatttctagcaatggcaccttaaccccagagcgtccccctatataaacatctcaaatatatgctcagaattcatatgcagaagcttataactatacatataagtaagaacagagaatggtgatcccactcccacatatcttagccataccttttccagcacaaggccatgtgattcccatgatggaattgtgccaatgcttagtcagccagggctgcaaagtcacattcgtcaacacagactataatcacaagaggatcatcaatgcaatgtcaagcccagctcatattgaagatcaaattcatatggtttccattccagatggaatggatccctgggaagacagaaatgatattgggaaactgttggaaacaattaaaagagtcatgcggacaaagcttgaagaactcataaaaaacatcaatgattcagaagatgacaatatcacttgtgtccttgcagatgagacgctcgggtgggctcttgaagtggccgagaaaatgaatatcaagcgagctgttttatggacttctgcggcggctgtattgaccctatcgtttagtatcccaaagctgattgatgatggaattattaacaccaaaggtgaggtttgcaacactacaaaaaccactcatacatgatttttaaatacaaaaggacattattacctaacaagcaattcaactacgtttaatctttttgcaggagttctactaaaaaaccaaatgattcagcaggcaccaatgatgccctttacaaagccagagaacttggtttgggcatccattggtgatgcaaccacacagagaatcgtatttgaaaccatgtctcgaaacaaccagactgtgaaactagcagactggattctttgcaactcggcaatagaccttgagcgagcagcattcgccttggctccagagattcaaccaattggcccaatgttagcgactactcggctaggcatttcatcaggcagtttctgggcagaagacctcagttgtttagaatggctagatcaacaaccacagagttcagtaatctacattgcatttggaagcttcacagtttttgacaagacccagttccatgaattggcccttgggcttgaaatctccaacaaaccattcctctgggtcgtgagagaagacataggaaacgggttgaaccacgcttacccagatggttttctggacagaacagagtcccgtggaaaagtagtgaactgggcacctcagcaaaaggttctgggtcacccttccattgcttgcttcttaagccactgtggttggaactccacattggaaggtgtcagcaatggcgtacctttcctgtgttggccgtacttcgcagaccagttcgtaaacgaaagctatatatgtgatgtttggaacgtaggagagagatttgagagagacgaggaaagtgggattatcaaacaaggagagataaagaagaaggtggagcaagttttgggagatgataagttgaagaacaatgctttgagtctcaaagagttggccatgaacaatgccatgcaaggtggccaatctcatattgtctttaacaactttatcgattggcttaaggcataaggtcatacatagatgtgttagactatatatatagtgtatataatatagcatatacaatgatatgaa

SEQ ID NO: 380354 - DNA, 4371 bp, Cannabis indica
gtccctatgttacaaaaatacccttttttgtcacattttttctttagtttttaaaatactctctggagtgaaacgtgcttcgtttcacacttataaggcttcagttggaggttcttcacgatcattgcttaaaagggttcgtgttggtgaaggagatggtgtctcctcttcattttatttttactctgaacaggcgggtgatgctaagcacacgtgcccagaaaaacgaccctcattagctgggatgcacggagtattgggagtaccagtgcattccgaagactctcactgctagtgaaggagcatcaacctttatttctttttttagtggaaactaggctgtcttcccaagcggttaatagggataaagacttctttaagttttgattttggttttgaggtctctaggaaatatttttttggggggaggagggggagacttatgcttttatggaagtttaatgtctatgttaatattttaactttctcgtgattagtaatataagctttaatgataatagtatgtttcattttattggttattatggatctctagtacataattaaaggcatcatacttggaacctccttcgtaaagttttctataatgcccttaatctcccttggtttatcatgggtgattttaatagttgacttttacatagtgataagtttggtagtaatttctattccaatgttgatatgaagtcctttgcttgttttttatatacatttagtctttttcccctcccttatgttggaaataaattcacttagaaatatggctttacttatgagtgtcttgattgggttgttggttctgacaattggtgtgatttattccctagtgttgtcctttatcaattacctttttatggctcagaccatagagccttgaagattatgctccatgaggacaataatacttgtcttaattttgttaataaaagatttcgttttgagaatgtctggcttgagaatcctgacttttatctcactgttaagaggtcttggtccaataatcaaccctttaatgctaataaagaggctttatctagttctttggacaagcaacagtcttgtgtttcatctctaaactaggataaatgcttcggctaacaatcttttcaaaactaaaataaatgctcttagtaaagccatagttgatctccaaaactcttatcccctggatagcaacactaatagtcaaattaaaagccttcaatctcagttggatgcttttttgtataaggaggaggtctattgatgccaacgtgctaaggtaacctagctcaatgttggtgacaagaacactaagttcttccatcattttgcctcttataggaaaaatattaacaccataaagtttcttaaggatgagactggaatgttgttaatgattttgaaggaatttgtggtgccatttctgcttattccaatctttttcagtctcagtgatgtgatgttgagtctaccgctcaaatcgtagaccattaaggaccccccccccctagatgaccatgattcaacaatcttaggacagtcttttagtgctggtgaagttaaaagagctctttttcacttgtctgggaacaaagttgttggacttgatggcccgaatgcttatttctattcaaaaaaattggtcaacccttggagcggttcttgtgaatgtagcccttgattgtcttaataatggagttgatttttcctctattaattcaactctcattattcttattcctaaaaagcaacatgctcactccatctttgactttaggcctattagtttatgtaatacactttataaagtcatttctaaggtccttgctaatcgcctaaagttaattttagacaaaattgtgtcaccttcccagagttcttttgtctcgggtagggttatttttgacaatatcctccttactcaagaagttgttcatgcaattaactctagaaggcaagggaagataggttgggctgcccttaagttggatatggtcaaagcttttgatagggttgagtggcattttcttgagagtattatgtttcatctcaattgtcctttacattttgtctctttgattatgaagtgtatctctacctctactatttctttttttatcaatggggttgttagaggtcttattaaatcgactaggggtctaaggcaaggggatcctttatccccttatccttttattctttgtgttgaaggcttatcatctctccttaaggctaaacaatacagcaaccttttgaagggaatctctatttctagacgtgctccatcattaactcatttgtttttttgcaaatgatagcctcattttttgctctgcagatagaacctcttgtgctgctcttagtgatgctctttcattttactctaaagcatcaggtcaaattataaattttgccaaatcctctatcctgttttcccccaatgttcccctgaatactagaaatgttttctttgccactttcaatttggaagacaggccttttattagcaaatatctagggcttcctcaatgtttgtcgcgatctaagtatcactccttctcttttcttaaagataaggtctcctctattcttcattattggcactccaaacatttttctagagctggaaaggaattcttcttaaagtcgtggtgcaggctattccaccctatgttatggcttgccttcgatttcatgtcaagctctgtaaggatattgagggtgctatggctagatttttgtggggatcttcaatagattcaaaataaattcattggaagagttggcgaagtgtttgtcaacctaaatttgtggggggtttaggctttagatctcttactcattttaatcaagctatgctagcaaaacaggcttggcgaatcttaaataatcataattcgttgcttagttttactctcaaagctcgctattttcctaagacctctattctagaggctaagactggtcataatccctcattttcttggagaagtatcctttggggaagggatctgttggcctcatgtttgatttgaaaagttgtagatggggaaaccataaatacgttacaggatcattggatcccaactacaaggtttaaatgatttgtccaaaatcttgagcctccttctaccaagcttccatactttattgaagattctggggcatgggatttgaataaacttaaagaccattttgacggatgtatggttgaataaattttggatgttcctatttgtggggtaaaaagtaaagatgatcttatttgggccaaagagagttctaatgtttagtgttaaatcgacatatcatcttactttatcagggagggatcttccttcttcttcatcctttcaaacctcaaaatccttttggtccaagatatggaattctaaggtgccctttaaagttaagcattttatttggcgggtgtctaactctatccctgtggcagagttgctttcccaacggcatattattttttcatctttgtgtcctctatgctttacttgattgcactagagctaggaaagcttggaaggcctcagattttgttagtttttataattctaataggcattttgacattttgcactatatacagaatatatttgctaatttagataactctctattgatattttgctatgtttcttatgggctttatggaattagcagaataatgtattttttaatcgtttggctactcctcctcaagagctttttgcttggtgtaatagtttttcgcttaaatatttggatgctcagcagcgttgttctcttgaaaaaaaagtttgatgaacataccatcctctgatttggtacattgcttgaatggttgttatcagatttgcacagatgcggctctcgacaatgcaaggaaaaagcacagtttgggaattctagtgattaatgaatctaactagattgtggcagggattattaaactgattgttggcaatgttcccctgtaattgctgaagtaaaagcggttctgcttggtgtgcaatggtcttagctgatcagattgcatgttgctgctatcttgactgattgtaacattttagttgataagctcaagggttgtaattggaatgttagtattttggatgatttacttcttgtattaaaaactcgttatcctttagtccaggactttaagtagggtatgtgggtcgtaattctaatgttgttgctcataactttgctaggtttggtctaagattagataatgagtttgtaatacccgggattaagaaaaggattagcaaaaccctaactagataattatgagttaattgaggaattatattattatatagttcaacatatgtgaaattatatgaatttaacatgttaaagaccccg

SEQ ID NO: 380355 - DNA, 4884 bp, Cannabis indica
ggagtaatggttagcattaaagaatagcgaccactcaaataacacattcattttgagtttttatataaataatttgattgtcacgttgtttaatagggtgaccaactaaattattttaaataccaagagccatacgattttttatgagtcatgacacctacatttatgaagcctaccaatctctccaatccctctcaaatctcccgataattttcatttacacataaactcgagcagtttgtgggcagcgcaatccaaacccatcgtctccaattcacatggatgctcttcctccttcactcatattgacccaataaattttcgtccaaactttgtacgatttcattgaatagatttaaggagactgttggtggtagttgtgagtactaactctgttttctcggccctaaagatactataaggagtacacgcacatctttctctctccgttacgccaatatctgctaatcaatccattacatacagttacaggttcatttctttttctctctacctttttgttacattcttttaagtttttaacattctcatattgtggttttttttccctttcttctgaaaactgcagtttttgtgacttgtttgggttgaattattgtcttttattgccaaattagacgatttgaggaactgggtttcgttaattttatgaaaatttgaaccgagtgtgcaatttttgagctcaatccgaattgggtcattgagcttttgggttattgatggacctgcaagttgtgcgaaagggtattgattttgcccgtaaaaggaagaagtgggttattgtattggccgccttagggttctctggttatggtgcctataaattttatcacttgccttcggtggcccaaaaaagaaaaagaattttgaagcttttgggagctttggtctctgtagccgaagcggtttctgattcagccgagtcaattagcttggtctcgaaagatctgaaggaatttcttcagtctgattcggatcaaattccaaatagtttgaagcaactttcaaaaattgctaggtcagatgatttttctggctctttgataaaggttactcaggctttaacactcggtatgttaaggggttatcggcaattagagaaggatgatggaagtgatggagcttcttcaggttctagcttttcagaacgtgtaatggacaaggtctttaccacagcaggttctggttttgcttctgttgttgttggaagctttgctaggaacttggtattgggtttctattctgctggtgaaacaggtggtgaacaaacctcaaagacatcatcaaatatggataattgtggttcagaactaatcctattcctgaatggatgaatgtgattttcagtgataaatgcagagatttagttggtgattgcatacaagtatttgtgaccactgcagttggtgtgtatcttgacaagaccatggatatcaatacctatgatgaactcttttctggacttaccaaccccaagcatgaaacgaaagtgaaagaaatgtttgtttctgtctgcaatggtgcggttgagactctagtgaaaacatctcatcaggttttaacgcgtcccactttcaaggagaaacctttggctattgaggaaggcccaacttcgacttcaacaaaagtggaggacttggatgaagaagaaaaggaaacattctccacagaatcggagacagggagtgaagctgatgagaaagatgatggcgggtgggtcggtaaggtttcgtctactttggcagtgcccagtaataggaggcttgttcttgatgtcacagggagagttacatttgaaacagttaggtccttccttgagttcttattggaaaaactgtatgatggtgtgaagagatgcgtcaactttgttcatgaagctgtgattgagaggggtttcgatttagtgagatatgcagcagccaagtcctcagtcatagttactatatgtctctctctgtgcttacatataactggaagtgcttggttgttaatgcccgcttgaccttcttgaccattatcatcgattcatttattaggaaaatcttatagaatagaccaccaacattctttccaagcaaactgcttgtttggagaatccacttgtatttgatcgctctgtctctctctctctctctgtgtatatgtttgttcacccaagaaaaaggaaagatgttatgcatttcattgtacttttgaaaattatggtctttgtaggttgggtgacattcttgagatatatgttttcgaattctcatggagagattcttaggaaatatgtaagaaaatgatagtattatttgaatcaatatgcacacgttgtaatattttcttcactttcttttaatcattatgtggtagcttttcaaatacaggataattcatttgactatgtcaagttagaaataaaaatgggttttcatttttatctatatatcaataatcaaatggcgtcgtaaaagctaacatggatgccctaggtgattatcagcttccgaacttgcttactacgttcagaagaagaaaaataagagttgacgcacacaagaaaggtgcactgccgccattaatactgatccataaagataaaactctttggaagattcttcttaagatgtcagctattgaggatgggtttcctttcctatgtacacaaacacaacttttgcttttgaactcgtttgttatgggtttccttcactcaaggggttttctcagaaatcttatccatatcttttattttctttttcttgtattgaattaaaataccaaaacatcccttccctaacactttcgataattttcatgcttttctttttctttatttaaacagcaatattacatatttccataaagaaaagactacttcgtaactcacacatttgataaatttttcaaactatgtattccaaaaatacaagttcagtacataaatcaatatatatctgttcctaaaaatccacggttgacaaggtttttttttgttcagtaaagcttgtactgaattattgttggcaaattgagtggaattgtacaataaaaagttaaaaattgctatagcttttcatccttgagatttaccatggaaaataatggctaaaccaattaatctaatgcattttggggttggaaaaaaatgaataaaatgatgattcaatggtgtctagttgaagaaattcattcataactgttcaagttgagcttccatcattttctttcgcggctgcttcttcctcaattttctttttccagtactctgcaagaggaggtccaaatattgctttgcctgaaacaactccaatcctgcaatgcacaaatgcatgtttcagaaaagcttaaaattcaataaatttgataaagaagattgcaaaagccttaaatcacaaagtcaagtccagtcataactatcaatggtgattaaaaaaaatgagagggaaagctcattcaacacatgaactttatatgaagatcttcacatgatctaaagatgacattgtaaaattcactatgaatgagtaaggatctaaattctaaacatacacacaagagccaagatattaaagaatataaggcttacaatgcagttcagcaaagacatacatgccgctggaagccttgcaaagacttttcactaagaaactaaaatgcgaattataccctcttttcttacctaaattacacaaataaagaatgtcataaattctagtttaggcctttaatccattcttattctcagcataaggaagctcagtaaaactttcacaggacttcgtttgccaactatgaaagtttccattgctgtcttgtctattgggaaactaaagttgaaggttggtaagtgccaactgcccagtaacaacactatattttaccaactaagctcaaacacacaaaacaatggctggagctaaaatccaatagcctgaatcactgacaaaaacttgagcttgttttttttttcttaaaactaggatacccgcctaaccctacagtatttggaaatcataaaaccagcaatttctatgtaggtaccacaagagactcgaacctaagacgttctgggagcaaactccatgcctgaccatttgagctactctcttgggacttaagcttctttccattcagaacacctgagaattctggtttttgattgccattcatggatctgaattctcaagactccaaagaacatctcccagcgataatatagtctcaaaatacatattgagattcttcaatgatagcaaacattcatagtgaaaaagaaaaagaaaagatgattgcctatactatatagtaagcaaaccaattgagataactaggcctgataaatatagtcgatatagtcaatatgtgtatatattcctaaactcagcaaagaatgcattcatgtatttgtaattatacttaaatcctcaaaacaaagaaagaagtctttaattacatggtcattgctggaattgagataccttagaaaatcagctaacaaatgaatgtaatgtaaaagcaacacggaaatggacaacaattacagtttacggcaatcccaagctaaggccatattctgaaatagtatatgaaatgagttgaattagtgggaagaaacttacaggactgctccaatgactgtaggaaaagtgaggaatctgtttcgaccgaacattatttctgaaaatcaagggtttttctccgatgttttgcttttctgtgagagggttctcacttctcatgtcgaacgcgaagctaaatgggccgggctgacctatattggactaacatttaacttcattctcaaacagtatttttattaaggaaattactctctatacctttttatattgtcctcttttatttttattttctttt

SEQ ID NO: 380356 - DNA, 1461 bp, Cannabis indica
ctagaatatcctggttccagacctgtttagcaagattacaggcacggtcaggtgagttgagaatctcgtagtagaacacggaaaagttcagagccagtcctagacgaattggatgtgtgggagccagctcagcgttagcaatatcctgtagatataatttgtacaagttatagcaagtcatataataaaaatacaagaccacacacttataaaatgacccaaaactcacaatatatcgatgattttgaaatagtaaattgtagatttggtcaatgtctacaaatctcacacagatccacatttttaagcaatgaatgagatcagaagtcaaaactaataaaatgtatgaaatcagcccaaaaatatcagaaataaaccataacaattacagatccactctccaacaggaagatttaacttagatcagtgaatcataagaaagagataactaagacaaggaggaagtcgaaatcccgaatttaaggcttaaatatttcaacttagcacagcaaaagtgatttttatgtgatacctgagcggctttgtaagcggtaagtgtactttcagcggcctccttgcgctcggcgccggtcttgaactccgcgaggtatcggtggtagtctcccttcatcttgaggtaaaagaccttagaatcaccggaggtggccgaaggaatgaggcgggagtcaaggagcttaagaataccgtcacagatgttggagagctcagtctcgatcttggatcggtaatcacggatgacagagacatgttcctcgttaccacggctctcctccttttgctcgatggaggaaataattcgccacgaagcacggcgagctccgatgacgtttttgtaagcaactgagagaaggttccgttcctcgacggtgagctcctcgttatcaacggatgcggagactttttccatgaactcgaccatctcctcgtagcgctcagcttgctcagccagcttggccatgtagacgttctcttcgcgagccgaggccattgctattcggcgattagggtgagtaggtggtttagatctggtttttgagagagagagagagagagaggttgagtttggcaaatggggtttctcttggccttttgttgacgagggttgcgaaagccgtagtggggcgataattgcgtccgagggtatagtgggaattttctatgttacgcaatgtgagccgttggatctaatctcattggggaggacttttaaaagagctgtgcttggccggtggatgttgagatttgagctgtcaattctccagcacggggttctgattttatcatactaaaaagctattcgcttttctttttctattcctccctttttttttcaagaaaggaaaaatggtaaatactattttagactatgtaatttgtaaaagttattaatttgatcttctgttttgttaaatgataaaatagatcttatattttttaaaa

SEQ ID NO: 380357 - DNA, 4617 bp, Cannabis indica
caggggaggttgcacatgcatgactacagaagtactcatgtatttattataaattaattaatcaatgatatgaatgaactgtttcatcagatccaattacagtgtcactgattttcattcaacttcagagacaagatatgttaaacaaaacaaatacagaatatcaaatagttggttgcctaaataggaaattctataaagatatactacattaatattctcttgttattcacggaaccgagtgataattataaaagaccgaccaaatgaagggaacaaaatcaggtgagccacattgcttcgcctttattaactaattatataaacagaaaacgtttgacttaagagttagaatatatagggaaagaaatataaagaattgatcaaatttcttggatcatgaaatgtggctcccaataaacaactaaggatttcaattcaattactggttttagtatacttttgtttttgttttgttttgctctgtttgaagggtattggctatgaatagtgactgtgcagaccaaatcaaaactgatatttctatatttaatagaccacgtagtgttatggaagtcaattaaccaggatttatctaaattctcttcatcatttttggcatttttttcaatttaatattggaaggaagttagttggtgaaagactaaatcaacccaagtaaatatttttaaattccagttggggactatttgactcaaaactagactacgtaaccactcatgtaagtcaattgtttatcctccatgataggggagaaatattttgtttgacagtgaagtctaataatgtcattacattattagtttttttaaacagaacaacacccttctcctaacagagtactttcaaataatgcaatgcaagtcttccgcttaatcttttctattgttaacttctagactttactaaaaaatagaaaaaaagaaataaagaaataatatgtatgaatgaatgacattaacaaaaattgccttatctacttgctttagatatagttggccccactactatttcatagactcggtaaatttgaccccttgccttgcccctacatcccccaccaccccaaaaaacaaaaaaaaaaaagaaagaaaagaaagaaaaaaatacctttcgaattaggatctgccccatggtccagaagaagaagcacacagttggtacttcctttggatgatgctatgtgctgttttttacatgaagaaaagaaatacacaagtaaatatcaagttatcaacagttagcattattatgtttagactaaaaaagcataaagtgggaagaaaaataataaaacaaacataaacagagaaatttttcacacaccaaagctgttctgccactgttgtcagactcatttgcgtccagaccccttttcaacaattgatttaacatcaagtcatctcctctaagagctgcaaagcatagactgagtggtaggtccattctaccacgagctagcatgttctctgtctccaacaaaactccctccataatagggtccttaaggtccttcagatgctgtaccaccaaacaaagaaaagacacaagactataaaaaagtttaatgtcaacatacaagatcttatattatattgaaaatgattctcttattggttttatatgtaataattgtgtgaaaagctacacacctgaagaagattgttcatgattatggtcccatctccaacattggcctgaacaatattcatgaacgccgtacggttcagccggagcaactggctcaaccgctttgttcgaacagtaaagagttgaggtcgataacaaagtacaccaatttcaccacatagatcaccactttttatttctcctacaacctgtgatgagttaacacaatgactattagaatctcaatgatcaaagaagctaaatgtcactttatagtgttgtcacagaattcatcaaacttgcctgctcaactccatttattaacactactaagtccgctgaaccagttacaagtatgtagaaatcagtaggagcttcattctgcaaaatgacatcttctttgggtgggaaatactcagctttcatctccgagacctttgaaattaccaaataaaacaatacaattaaaaatattgaacttgtgggaggagagaatgtaacttgaaaacacataaatgacatgacttaaaaaattaccagctgaaaaagcaaatcgtttgaaaccccacgaaacaagtagaccttatcaacaagagagtaaaagagataatgtgaaatactcgatcgaattgctttaggaagagagtcaagagtctcttgttgttgcagtccttctgaatttgtcctaaatttgagagacaaatgtgccaacatctgatcttgaagtcgaactggtagttggttcctctgggcaaaactagaagcagcttgtatagtgtccctctgaaaattccagcacaaaacaaagttaaattttttatagagatacttggattagtatacatgttaaatcaaacgaggagactaaataattaacttacaaattttctcgttttgctggttccatgtacaacaaggttagtcatgttaccaatcaagtaggctgtcaatccaagattaaagagcatgtagaaaatgtcaaatatcatctccctcgtattcacaggatgcaaatcgccatatccaacggttgtgagagtggtgatggaccaatatattgaggtaacatatcgaatccaaatactttgttcaaggaaattttccattgaactaccaatccaagtccttttcgggtcatgataacgtgccgcaataagataataaaagcatccagcacaatgaacagcgaaaagggtaacctgcaaaaaccatccaaatcaaaggggtttacttacttacacacaagaatttttcacagccaactaataaaagaaaaaaaaaagacaaaatatccaaaaattcattaaaaagtacttacacatatgagttttgcacaacgaacccagaagtagttgtagtttctatccttttccaatctgataaaaattaaaagaaaataacccaattaacactacacataaaaattactacctctgttttttaattattagaaattcttataccttgaaaataaagcactaactcttctaagacgccataaccgaagcatattggataagccatatgatctgaataccgaaggagaaatcttacgggcaagttcggctggaatagtggaaataacatcgaaaaccagccaagactttgcatactttaaggcaatctgctttggctcgtccacaagtaagtaggttgttttgtccaagtaagctacaaagaaggtaacaataatatctatgaagaagaatccattgacaacattatcagtaatggctagtggtcccgctggcttttgaaggaagccaaactcgaatggcgaaacccaagcagtgtaaacgaccagaactacaagaaaagtttcccataccctgaaaaatagcacaatgttttgttagaaaaaaaaggttctggaatttccaggaaacaccaaatagaagatggtcaaaagaattttctaattagttcagtttctcacataaatcatgtgatcaacaattcttaaggccatcaattaagaattgaattaaaaaccaagtatagtagagcaacacagaaaagagcaaagtttatgtgttgaccaaacgttcagtttcagaaagtttaaaaaaaaaatgtgtatttaataacaagctaaaaaacaaataagaaaggaatacaaaattcattgtcgtcttttcagcaattgtaaagttggaagaacacggtaacaggttataaccattcccaatatagaattatgaaccattttggagaataggaaagtgcagacaaatacaaaataacacaccgtaagaaaacagaaaaaagaaaaaaaaaaaaaaagtcgtaactgattttgagctttgaaaaaaacgcatatcacaatactcaatgccattaatatttgccttaattattacttacctacccaggaatcccaaatattattattattatatatttaatgataccaaaagtagtttttacaattaaggaagaaggaagagggaattatttttgaagaagaagaagaagaagtattacctgtaacggtggttgtatggagatataatgaaccactttagtttgtttctccgattactggctctggcaccgagggaaggtaatatcccagttgagagactatattgactaccctctcgagagagttgctcaagttcttcttgaccacacaccctgaacatacccatgttactcatattcaccgccattgtttctactggatctgctctgtgcttaattttctctattatttattaatttgcatgttctcaactctgcttctcaatatcatatcttaattcttaagacctatcaccgatatatatagactgccctctgctttgcttctaatataatgagtttatatatattattattaaaatacacatatggaattgtctataggcacacacgtacttattttattaaaacgtgacaactccgagtctcctctctctctctccaactatatatataacgattaatagtttttttttttttaaa

SEQ ID NO: 380358 - DNA, 932 bp, Cannabis indica
aagtccattacctgcattgatggcatgtttctccattaacttcatcatatatgcgttttccatcttctccatatccatcaacaagcagtgtccaagtgttcttgcaatcccccaaaagcttctcatgctcttctgtgtaaatctctgggttcaagccatctcttatgcgaatctcatcactctccgatgagcctttcgttcgtttaggacgaagctccacgtaactaaccttgtccaaagttttcaacctacaaacccacacgttcccagtaccgatcatttgatatagcacaacccattttgcaaaagtatcaaagtttgtgtcagtaatgaaaagtttccatttttcctacacatactctttcccccttcatttttcaggggaaaattaccaaaaaaaaaaaaactagacctggatgaacgcctgggcgacccagacgaagagggaagagtttgtgttttcctggtctcagaagggtgcctggaaagacgctttcttggggcgatttcagacttaagcttctgagaaagatgaagaatgccaaacttgttcattctctccttgttctctttgattctgagatccctggactgctcatacccagaagcatctgaaggtcctgagagtagggagggttgggtcataatcttatttgcatcgggctctggcgctctctttttccggccgaccatggcgtctctttcgttcctacagaaaggactgagtgaagaagtggcaaacaaagagattctattctaatttatttaatgattcgcgccattttatttccttagaacaaaatgacaaccatctattcgcgccatctgttttcacattatgtaatttaggtttaaaatttcgtgttgtcagtaaaaaaatagttcaaaaaaacacaaaccataaatttatggaaaatttacatctgcaccct

SEQ ID NO: 380359 - DNA, 2095 bp, Cannabis indica
gattgctcactaacaagcaatcgtagacgacggaatgcactcagattccccaacccctgtgcattccaattgagcagtttcatgatgaagagcgggattgcattgcatcatcagaaaccgaaagttgagtgtccacttcgactgacaaaaaggaagtttcaaagccttggttaccacggcatcttttaagtgtttgtctcaatgattttgattccttctgcctcttaactctgcgattaggattgatattttcttgatcaaccggtccttgtgcatgacagccaaaaccagatgaaaagttaataattggctgagtagtggaacaacaggttgtaacagatggcataggcaaaacagacgtggtcaatttatggtatgtggaatcaatgggaggataagtagcaaagggaggagtaagttgagtagtagagatattgggagaatgatttccaatattaggtatataaacatcaaagtgtgtagtagatgttccaggcagagaggaggaggtcgatggggtgtccataagctcagtaaatgatggatgagttgttgttttgactgaagtggtaggaataagtgaagaatttgtcaaaacacctggagtgaaaaaagtagaggcagccaaattttggttatttgttgaagcattaattggaccatatgggggggaaacaactcgagaattagagccttcatcaatcagcagattttgtggatgagcagggggtcggttattaatccttggaatggttgcagttaaagaattcctagccaatcgagttagtaatggccacgcattccccttagaaaaatcagagtggtaacgatcatatgatgaagatgggagaggagatccattcaacacaagaccatatgaaaattccagttcgatgcaattatcaagattttctaaaaactagggacatttctgatacaaatgaccaataataccacattccatacaataattaggaaggcgttcatagcagaactcaacccaaaattcatctcgcacttttggcaaggaaatcattttgccccgaagcaaaggtttcgtaatatccaaccgcactttaaatcttaaaaaatgaccacatccttcattcaaagagtcttcataaacagtcacaaactcccctagcaaattacccaatgatttggctagtgaccttgacttactaaggaaaggaagcctatatgcttggacccaaaatggagaaaaaaatcatagattcaggggatacattttgtaaagccattggtggataaagaacaatatgttgactttgaaaatgccaaggttctttgtccagagccctcaaacgatcaccttcacatccaaaacaaaggataaaaggcctgagaagtgctccttaatattaaccttaaagcgaccatcccaatgttccgccatttgacgctggaaagttgaaagctagaccttcttatgcgtaattactcgagcaaacagagagaattcttcttgggggacttcttcacgagagacatcatcagtaatggcaaaaacagttttttcattatcagctaaagtcattgtagccttcattttacgaatgaaaggatccataatgagaatatctaacagaagagattcaagaagaagtggaagtattcaaaaactgcaaaacaaagcagatttggattgatgacgttgtcgagcaaaattcgcaacaccaaatgtatatgatattattaatgacaagaagaaaattatatgaagaacaattgcgagtattcaacctagagtggcgagtactcgaactgggaatgtgaaatgtttaacagaaaactggaaataacaacaagacagaggattatagtggttcaatcagatcacggtctgcttagtccactgtagcaagagtttcgtagttctcatttctcggtggatcacccctttatatacaaagcaggtgtccaattagttatacaaatattgcattcattgtcaatccgcttttacacattgaattacaataactaaattaaataacgttaacatcaataaatgaatagcagttactaaattcagcaactatgcgaccttttaacatgcgagctgactgttcat

SEQ ID NO: 380360 - DNA, 2505 bp, Cannabis indica
acatatcagtccaatcatgcatattgagttattcataacacctttacgacatatctatccacatatgtaatctgaatcaaaatctctctctctcacacacacacacacactagaagtatagtgtatagtaaactgtacttagcaatttcatattaaagattcacaatactttaatatactacaaacttattttatttatattatataatcttaattctcttgtatgtccttacaagatcataccttatctatatgaaaaaagaatttttagatatttaataaggcactccgtatgctaacacatccgagagaggtaatactcattttcgtatgatccatgctccttgtccgaaagagtggatcaacattacacaggggttttcacccttattttcttgaattagaccatctccagtaccctgttacgcactactggcttagggtagacgagattgttgagattctgacccactttatcccgccttttcaatctagtagggtagaactatttactttgatgcaatacctaggtttcttccaatacgataatttcttaggttgtgatgatgtttttctgttttcataggggggtgtgaattacaacgattaatggttgaactcggacgagagtcacatgcttgtttgctaactttatcatgtattctttattatttttgagtttttaaccctgactttatttactttggcagtgtgccctcacactttgtagatgaatatccttgacaccttcgtcaagaatgtagactctcggagcgaggaggtgcagaaggccacaggaagaagaagagcaaagcttcctactctaggccacaggtcaaggacactgtgtcacctgccaaagtagtagatacttttgttacaacccatgcgtcagccggttccgccagtgctcctacaattttggtagttccactaaaataagttttgctagccccaaaaatactagtcccaaaaaagcaggtgatccctattgacgatgaggatgatgcagattggccaatcttcctgatgaaaaggccaataaaaatgttgataggtcaatagttggttgcccgacgaaagtcagagagggagaagggtgagcaaaaaagagtcaaaagggagaagaccgagaggagctcctgaaaggaaagggaaggaaaggctttcctatggagtttacaatgtatttttggttttcagatctagaaaatctcacccttgcatggagcagtagtgccatatttataggcactattcttaatgggctgacttatccagatccattaggattatatgagtgtaaaaacccactgatgggataaaatacatttgtttattagtatattttaagctattgggtcgggtaggtaatccaatccaagttggattgagctgcctttcctacacggttgtgttgttgatagtgataggtgaggtgtgggccattagtgggagaaataaatgtcagaataatgagtatccttcaaaaaagataatttcttttttgtgtgcctttccaaggcctaacagaggagacatgctgccaaatttcttaggattgtgtcaggagagtgccacgtagacgacctccaagacatcattgatcctggatgctttgttgtattctattcctggatgacccttgaggatatgctccttaataagttcatattgtatgcatactcagtactgtaaaattattatctaaaacttatcgtataaattcatcatttatgtgagatgcgagaatcgcagtggctatccagtttcgtccgttcttaattagtagatgggctaagtaattcatccgctttgggctagggaatgagcctaatttttgcaatgggcctcgacgagagcccacgtgtcatttattcaaaattattgcggataacaacaatatatttaagaaacctaaaaagtgaatcaccattttatcactgtttttttaataaagaatttttgctcatggattaaaaaaaacccaagaactattaatcttttgtgtcctatcaaccaacaccgatcttaaatgtagtggttcatttagaagatttggtgtgagttccattaccgttttatgatacaatttcgaaaagataacgatgatacttgatagttcatcaagagtttactttcctattcatctttttattttgaggtacaataatattttttttgataaaaagcgttcattggataagtaaataaaagttagacctcatgatcattatataataggtctgaaggaattgtttctaccggaatgactccaaacctttgaaggacgaaagcccatttaaccacgttatgggcattaaaattacaagttttgccgatattataaaaaatacaactatattaaatactttcattactacctgatttaataccacaaaaccaacaatccatccttatttgtatgtggacccatcttgtaaattatccactctattttattatggggtaagttgaaaaatgcctcttttattcatcaattaa

SEQ ID NO: 380361 - DNA, 4070 bp, Cannabis indica
aaaaattataaaaaaccgctaaccaattaaagaccaatggtcacttttaaccttttcctgttaaaagctaaaaaaaagggagaaatgttaaaggtcaccagtggtgcctagtattctcttatgtgttaatatcaatattggtccaactaagtatcggttctatataatttaatataataacttttagcgagtatagctaaccaatcgcaacgcgacatgtcaagaaagtgctaggtactaccggtgtataatagcaatgctaaaaaaaaacatattagtggtaggcggcaggtggagagagggtggtctaaaatacaccatgcgcgtacgtaagtggagagagattagcttagcttagcttagcttaggtgttgttttggatctggcgccattgaaaagccgaaatgattaccctttcccctggccttgctagtactatatataccaataccagtagtaccaccacatctcttccttttaattaccattttgcccctattaagtttcccacgtccaaaatatctctcccaaaatcatcatcttcttcttcctctaatactctcatctcaggttagtttgtctctccaattaattcctccaaccgtcttttcacattttccttcctttctttctgtggatcttattatcttgttttgtgttcctgtgaagatcaatgagtcaaatctctacttattttttttttatgaaatattgaactgcaacggtttttctgttctttcttttatttttttttttttgaacatgataataattattgaacagattttcttaacaatatgctttggtatattcttaaaagagaatatttttggtttgatgcgacttttcttaacacgagatttacttggctataataatatctttgtgtgtgtgtatatatttgttaataatgtatatttgggttatggtttatgataattgcagagccagatatggatgccaccacagttggtcaaagtctttaccctttgcatcgttccaaaactattcatctggtatgtgggtactttttaagggatctatatatactcatataaatttgtggttatagtgatttgggtcttatatgttgtggattttatgagggaaagaatagggaggaaaatatctctttcttttaactttagaaggttttttttttaatcttttcttgaatatatttttagtgttttaacttctaaatcttaatctaagaaaatattcttaagcaagagaaaattgaaattatttttgtaatttcttcatatggtcttaactgggcaatgtatttaggtaaggcatgctcaaggagttcacaatgttgcaggcgataaagatcacagcaactatatgtcttatgactattttgatgcgcaacttacccctcttggctggaatcaggttaaaatattagtcactctgcattaaaactaacaaattattcatcattgttcactgacagagtttcctaatttccgggaaatgtgtaacatttgagggaaaaatttaggaattttgttgaaaaattcaggggagactttgttgaaattacaagattgggaagtgaaataatttttctcattaaactgttaatgttactgattagttttgtggtatgataattaacaggttgataatctcaacaaacatgttcaagcatgtggacttcacaagaaagttgaactagtaatcgtctctcctttgttaaggtatgcttaatacttatcttcaagtgctcttaatttcatatgatagtataatacagtaccttttttgaggtttaaagctagtttgtaggaatgcagcatggagcttttttactcaatacatattggaatatgtaaccttagatatgtggccttttttgttgtgtgtatgtgatcattattggcgttgcaggaccatgcaaacagcagttggggtgtttggaggtggagcctatgctgacgggattgatgtacctcctctaatggtggcaaatgtaggaaacagtgaccgctctgcaataactagcctaaattgcccaccatttctagcagtagagctttgccgagaacatttggtatgttatgactgctttgacagatttatttttgcaatatataacttataaattttcttaagaagaacacgaaaagatttactaccagccacaatccttgctaccgcatgaatgagtttgtctgtagcattattagtgtgaaacatacaaaagtaatcgaagaaagcaaagatgaaaaaaattctgtattagttctgattctgaaagttatactttacaataaggagctgacttatatatagtcagcttaggagaaattaagctaaccccaataacagaattaactaaacttaatcaattaactaagcagtacttaacaaagcataactaagtatttgtactctgctgttttaggcaaaagggtaactattgaagataaatttcttgttattaggtgtgttgtcaacactagttttaactaatcataaacactaaaatatgcttgtgctctttttatattttatttttcagggagttcatccttgtgataagagaagaagcatcagcgagtatcggccacttttccctgcaattgatttctcactggtttgtaattcatcatcattaccattaattatctggacaatcatctgttttttattctcacaacaactggtaatggtttatgcaataataacactaataaagtgtggttcattttgtacttgcttctttattcagatagagaatgatgaagatgttttgtggacccctgatgttagagagaaaaatgatcatgtagctgagaggggcttgcagtttttgaactggtattcttctagttccggctatcattatattttattagttccaataaacttttcttttttgtaagttgaaaaattctccaaattcccacatgtttctactcaagtaaagcctttgttaacattttgtgatgactgtagttgttccttcttatcttctctaaagtaacgaatttgataatctctatcatatccactataggctttagaacatttcttttcctaatacaagtttttgttgctgggaccaggttgtggacgcgtaaggagaaggagattgctattgtttcccacagtggatttttatatcatactttgagtgcattcggcaatgattgccatcctacagtaaagagtgaaatatgtacacagtaagttctcgttttcacactcttccactacttataaataatcttatgctaatgaaaggtcatttatacctcatctgtctaaaatatagaaattgcaacttttttgcagctttgctaattgtgagcttcgatcaatggttattatcgatagagggtgagtcattttgttctaagaaagacccattaactatgtctacctacctctgtattataaataatcttataatgaaaatcattcatgggttgtctgcagttcgataggttctgattcttcaaccactaattatcctggaaaaattcctcatggacttgatcttccaagtgatgttgcagaaaagaaggatgacactaagtaatgcctcataaagacattatttgcatgcatgcagcctaggcagttttcaagtagggtgcttgctatgtggtttagaagagatttaaagatgtaaatttttggccagattcttggtcaaacatttgacttgacaatgtgctctacatatatacaattatgattatctatgaccctttattgagatcatttctttcaaaaagggcatattggattctaaatatttggttccattcgttattgtgtattgctttggatcctttggttggggcgacagtcttacacattaaggtgataccgtaatagtaatcgcaataataataaattggtctatttttaacttttataatctcctataatagttattatattgagtatttaaccatgattacatgctaaaatgaatgtaatttctattataattacattccattacaaagaaaaaaaaaatttaataaatatatagtaaaaaaaagtcaaaagtctatattacttctttttttgaatattttataatt

SEQ ID NO: 380362 - DNA, 6218 bp, Cannabis indica
ccaagcattaatagtgataattaatttaatgatttgaacatccataactaatatttcataacatatttattttattttcaattgttatgggcatatatttttttattgtaaatatttttaatgtgttatatataatttttgttagtattatatatacctttttaagtattaatatattaatttttttttgaaatatataattttattattacaatatattaattttatgctacaatatattaaatagtataatatatacaatgtaaatgtttaatgatattatatattcattgtaattaaaataattaatataaaataaaagtaaatgtatacaacataaattttatcattatataatttttttaaaaaaaatataacataaaaaatgaaaatatttttgtactttttattatctaatttattatattttactattttttaaaaaaactttgaaaaaagaaaaaaaaaaacatttacttaacttatttatctctttcggggtcattttccacctaaccccatcaaatatataagattttaaaatagagtcaaataagtactatattgagtgtttcaaaaagaaaaataagtactatattgaaaacaaaagttaccgaataaaagagtagatgtatttcaattgagtgtctaatattactcttatctatatatcacaaatgtaatcgaaattctttatgaattgtgtgtggagtgaccactaatggaaggaagaaactgaaaatcactagataagtcatgagtgacgaatgttaaaatgaaaagtaacatatacaaacatattgacaatacaatgtgaattcattaaacaaactggaagattcaataatgcagtccagcttggtcccccctctaccacaaatatatgacattcctgtatggaagtttgaacaagctaagtggcttccaaaagtaacattttacattcttttcagcttcccattttactctattcatgcactgccccccatcaaaagagtgattatggtacaacactttcggcaaaagggtagaggaaatgaaaatttaacaacatggtaaccctcaatctctctaaaatatttgtatgacccatattgtaacctataatttaatatcattgttcaaaaaataataattgatccagagggcacaaacctgctgatgctgttcttgtgtttaggccttaagaggaatcttgcaatatagaatttccattcctagtcccaacaccaggattggtaaaaggaagcagctatctttcaatgacactgttcctccaatagaagcttattaaatctactcagttgctacttcattttcggttcctcagaagaaggcaagttctttcttctctttggttcaggtttcaccaagccgtaatgaaaataagatctcctcatcagaaccattcctcaatcctgagaggttttttgattctgggttttcctcttggccaatgttatgcactgtagatctgctggtaaaactaggaatgaattggtgttcaatgttcagatctgtttcaattccatttccagtgtgaatctcactttcccttaaagttctagctggtgcttgacaggattccctttcaattagaacttgtcgaatatttaaaccaagaggctccgaattcccttcaagtctatccctaaatggcactcggtctgtcggggatgactccccaactgtagaatccatccctgcagctgaagcatttatttgctcttgcaccgcagctatttgaacaatgaaaccacatatatgcaacactaatcaggaacaaagaaaaccataataacaataatatattaacacttggactaaattaatcaatccagtaatgtatcgagtaaaaaagagataagttaattacacattcaatagtgtcccagaaatttgctacaaactctcgttgtcttttggtgttccttcacttgtttaacatttgattaaggaaaatataacagcttaaccataatatttcatgcaatattgttatttgatattctgtctgtttactgactactaaagcctttatagtttatatatctacaattagacattttctactatacgattgcaatgtgtaaataaacaattataaaagaaaaccaattgctgtgcacaaacaaaaacagagacatcttgctggaggaaagtaaaaggatgtcagaaaaagttccagtgcccttgagaatccaccttagaactttatatggaagttaaaactatgacaagtgtcactttcttgttagcaagcccagtgcaccagagtagcaaacttaaacatcattagcaaggcgtccaacatcaaacccttcagcagaacaagcaataaaatttgcaatatcctcattcaaatagcacatatgaccaaacaaagatcatatttcacattaccctcagttaagacatccccatcatcatgtatccgcatatcttaaagcacgtcaatacatgatgatgaggactttgtaatcaatctggtcagtgtttgtgttactaaggggaaatgattagaatttgaattaataggccacaaggaatagcaaaagatatccatacaaagtttaaggatggatagtacaaattggctggcatttttactaattggatgaatagtaatttgaggtcatggttgcgattccagcttaaggatgtctaatgttgcagaaattactgccattctttacggttcggaaaagaaaaaatgaatagttttactttccacagtgaagcatgttacttagccaaattaagaaatgttttaatgaggtcatagcaaaggagcacaagaatgtctattaatatgtaagtaactagagagtgaaagaaaagaatgtcttcaggaaatcatagtaataagagatgagagaaaagccacctagctcaagagcacaaaccttgtagcccttcatttgttgtgataagatcaagttccaggagatcaagaaggcgtcctagatcaaccccactagtccaattctcgggggtttggccaacttttaatttcaagcggcccctgtttgctgtccctccccaaatgatcccaactggccgtggcttctccccatttggactagttaagaggatgagacttccactatcaccttcaagatcaaaggtctgctggttctcaccaacaacaagaaaatcagtgaagaaacagatccccttttcatcattgtactctagggcgtaagccattatggtcccagtagttaagccagaacttctcccaactttgaccacctgccttccaatcagactgttgatcggagactgcaaatctatgacattgacatcaccaatctcacccactcctttcacagttatatttacgttattcatgttgaaatcttccgcaaaaggaatgaaagcaccatcagctcgcacaaatgtttctgcaggaacaccacattgtagttggatgtatcgcagtcaggatacaatgggaaacctttagaaaaaatgtgagcagaaagataaaaaatgaaaccacccacaggatgcaccttcaggatactcaaatgcctaaaagcacaaaacatcaagaaaaacatgacagtaaacttcagctggtaggacaggagagagtccttcaccagtaatgtaataaaaataagtatctttctaactttgaaaaggcctcctttgaatactgatattatcaggagtttatagttcaataattctcagaagaaataaagaggtcaacgagacaaaagcttatagaaagtacatgaaaactactaattcacggaactgacataggttgatcttggctattctggagtaaagcttgaccacttccaaagtgaaaatctaaaagccaacatcagtgcctaagcttaaatttagctattttgatcctatgaagcatatagtgaatttaaaggaattttgtcccttggtcacatataagaaaagaaaaacgaaacaaagagaaagaactaggtatacaattctagtgcaggaaacaatacgcacagtcacacctcttcgctaacaaaacactaataatagtgataaaataactcttacgagtccaactaatagaagtaatgcatgattgattacagaaattaagaatttttttacctgcgtttgttccagcaaagattccataccaaagatcatctgtgataaaggatgttgccctctccacagctcccaaatatacaccaggtccaagacttggtggtaaaggatgaaacattttctggtttggataatctaaatcaacagccacatgtcgattagtgagaaaaccaacctgacgatttccagttcgacttctaacaatagcacccaaggttccataagtctcttggcttgcaacctagacagaaatgaagcaattaaggtataagagtattaaaagtagcttgaactgtttacggcacttatcagagcataaaaaactccgtttcatgaattaatgatacagcgacatgaaaatcaatttataaaataacatatgtccctcaatgtcagaataatctaaccattaaatccatggtgtgtctaatcaaaccaacctgcggtgttccacacaagcaaatataatatggagaatataacgaatcaagataactttgtttatcaattctgtaccagttaaacttgtttgagtgacatcagaagaaactccactaacaataaaatttattattctcaagagaataaaagcaactgaaaatatcagaaggcctcccaaacccagtgacaagtcattgacacttttactctttattttaagcagtaaaacattatcatatattaagcaaaaggtagaaagagacaaagatagatgtctacttaggtacaacaataaatccacttggtaaagaaatcagaaaaacaaaaaatactttgaactctttacaccaaaaagccaagatgaaaagtgattgagctaatatatccagagagactcgctgtttaattcaaaccgatagaaaagcaggccataacatatattgagttacataataaactgaacatgcaaacacttggacataatatttataagaatgtagaagaagaaatatgtctgttaataataagcttccttttcccaacactttggtatagttgattcattcccaaaaaccagattataaaaacagttcttttgttggttgtaaatgaccatggcagtgaattgaaaggaccaacaaaacagaaccgccaataaattatcaatgtagaattgatctaacttgccaatactgtatttaccattgattgacataagaaccaattagtaacacatctacgtttgggaaagcttatagaaggaaaggacatatgatgacggagtggcttcttttaacactgtactttaatgacctgagaccaatgtaaaagcttaattaacacacatcaactgtgaatcaatagtagtagagagggccatttccatacaaataaagcaagaaattagcctgtggaagagccagatagaagttgccaagtttaagtaaccaaaatgatcttcaagcagtaaaccacaaataaataggtaaatccacatcatgaagaagaaaaaatgttcgtgaagcttaataaggagcaagtgtaagagagaacttaaataaacatagaaggaaataatttcagcttaccatatagaataacagaaattatggtcattatattttgaaatgagtaatacaatctacgcctttctggccattttatggacattatggttagagaagaacaagagatttttacaattgtactaagtcgatttaggatagcagtttgggtgcggtatcagagactgttctgtaatttaacagaattatcaagacttgtaaatgtcttgttttctgactcggaaagcaaagacatgttctgtaatttcccttagttatgggtgtatatcgggatcatttgacagaattatcaggaattgtattattagttagataatgatacagtatctttatttaataaaaataatcaaataagataaaactgtaagcaatatgacactgatcagaaaatcactacttgttttagtccttattttccaagatacattttgacaaaacaaaaggagtgcataatctttagattggagaggaatcttagccaggaaatgaatatactgctctgaaattagcaaaacagagaaaaaaaaaatataggcaattaggattttgaccccctaaactttaacatgtaccaaatcatgctcttga

SEQ ID NO: 380363 - DNA, 1822 bp, Cannabis indica
acccaattttctagtagtgtatggtttttctatatgaatgaaaaatatcaaactttttcaaaataaaaagagtttgaagaaatagttgaaggagaagtcaggaggaaaatttgatgcctctaaacagacacggtggcgaatataccttacatagattttcttagtatcttcgacaatgccacatacaccatcaatttacatgtgcaaatacgcaacaacaaaatggagtaattgagaggaagaatcagaaccttgcagagacatgttgaagtatgctacatgcaacgaacgttatggggaggttttgggtagaaggaatgaaaataacagctcatgtcataaatagacttccctaagctaagttagggttcctttcaccctttgagaaactatggcattgtaaacctgcagaagtcacttttgagtattttgttgtgtgtgcttcatattcgtgccaagccacctacatagaaaatttgataaaataggaatacgatgtatttttgtaggatacgataaccaacaaaaagcgtggagatgctgctaacctataattggaaagtgttatacatcaatgaatgggttctttgatgaggcttcataatggtggtcatcaaaaaagcaagcattaccagaatctaaataaatgaatgattaattacagaagacaatgggggaggaaattattgagttacctccaacttaagatatagatgatgagaaaaacaccgagaatgaggcaccttagaatccatggaaaaatgatgtgtatcagagagaataaaataatgtaaatgatggtcaacaagaactttagagatcaacaagagcatgaaagtaaaatcccaaatatgccaatgctgctacagccaaagaagagaagttcaaagagtcaaaatcatatgaagaggcttaccaaaactctatgtagctaaaagctatgaaataagagatatgcacgctagaaaagaatcagacttgggagctggtgctaaagccaaaaaaagtgaaacccatttcgttcaaatgggtctacaaggtaaaaactcatcttgatggttcaattaagagaataaagctcgtttagtagctcgacgattctctcaaccgtatgggctagattgtgatgacacatttaccatgttagtaagattacaatagtgcgggttttgttataacttccagccagtaaagattagaggctatgaaagatggatgtgaagaatgcccatctagatcactataagaataacggtttctaggcactataaagtttggcaccaatataggtcgtgcctaaatttcttaaggttacaaacaactcccaactcactccaattttctctatttttgcatttatatattattattattattaaaataatataagtatattatataaaaaatttaggaccacatgactccctatgtcctttccaatttattaataactatatatattatattttttatttatatctacttgataattaaaattatatttttttattaataacttgtttacatatttaaatatatcataatctttttttatttatatcaactctttctctgctttctttatctctcacacactcactctctctataacgactactatgaagattcacaattccagtcgcttgaagatgttgcacttactacaatctctctttcaggtgattgaaccagatctggtatacgtgtggccgtggttgtggaacaacggagttcgataagaaacactttaaggtgttgggtgtacaaacaggcaataacatggtagatttgtggtgcaagatgtctgtgttggaaattattt

SEQ ID NO: 380364 - DNA, 1897 bp, Cannabis indica
agtgaagattttgattcagccattaggaattgagcttaactcaaactcaaaattctaatcgttggagttgagaatgatgatgatggcttttgtcaaaattgaagcctaaacttaaaaccattacatttatatatgtttgtttttgtagtacattgtcagttttgtgttgatactcattgattgtaaaaaagattgaaaacattttcgattttatgaagattgataagaataggcgttttgattgaacttcatcaaaaaaaaaaggcgttttgattgaaaatgaatggtaaaagcataaaattggggcattccgagaattgaactcgggacctctcgcaccctaagcgagaatcataccactagaccaaatgcccatttgatgattgttttgttttttatataactataataacaattatgtgtggaaattatctttttaaacaattcactatacaaccctttaagctacttaatattatattaatgtgtcacattataattaatttgtgattctctatattacttaataaatcaaattgtatgatacttgttaataaaatatatcaattacaatagactactttttacagtgtttgatactttaaggcacctattaatattttcctttataacaataggtttctattaagatatgatttataattatgagtaaacctgattcatggcaatattattgttcagaaaatacataactctacacaatataaatttatttttaatttttttacaataaatgcgtttgattatttgttcttttaaaaaattattagagaatgctattaattttgacatgtattaattttaactaggatttttattccttaaattcatgatcctgaacatttttacccgttaaatttttttaaaaaaactattgaaattattggatttaagaatttttttttctaattttattaattcaatcattgtttatatactaaattatgttctccaaactcccttgaattttgacatttattaaattatacacatttaatttttaacggtcttaaaaatttaagaacataatttagtacatgtctaaatttaatagacaaaaatcagaattagccaatttatattttagttagttttgctcctgatttgattttctaaagttaagtcatatgggaatattagtattataatgtacgttcaaacaaataatttttctcctatatatatatggtcaatctaattttctcattgaaaaaaataaaaattaaatatgatatttcagttaatgatcttgtgttagttattatcttattaaatataggacaatacttttgaatttcacataaacctcgcattataaattatatattcttctggtcttatttgttacgtaattctaatattttaaattaattagggtatgcactaagaatataaacaagcttaaaatacagtcaagacaagcaattataaatcatcattaaaataatgcttttaattattattattatattaaaaatgtatttgaatcatatgatcaagctatattcctttgtcacaatcaactagggaaatttaatttttttatagcttcgattattattaattatgatcacataaactaactttttctatctagcttaagtccatttacatataattacatatcaatcagtacaaacttccaaggaatgctttccactttcaagcatgccaaatattaatgtattaaataaaaaaaaattataaatatttttgtcttcaaaattatttacctaccaaattatatattttagggtgattctagcacccctttaaaagagatgtactaattcattctctacttgtttcggcatccaaaaaaaaattttagtctaatttttttttcatattcatgtacgttatagctatttaaaat

SEQ ID NO: 380365 - DNA, 2286 bp, Cannabis indica
aaaaaaaaaagagaaaagcataactgactatactgagcacgaacatggtctatgtaatataaggacccattttgaataggctttttatccaacttttaggctggaaaattgcctcaattaatagtgatagcataaaagagaagaataaaaagaaagatatagccattacccttataaagttgtgcacttgttataaataataggtgtgtgattttgcataaaaccatttaagattttgatatgtatattaatagagcgatgttggcaaggttcaatctgagcatgaatttatgcaaatacagggcattataagcatatccatatcagattgagccgtgccaatatcactttccaaaaattaattatgtatatttatactttattataatatattcatccccatatatatttatatatttgtattactaactatgtaaattataatatatatgagtttctggttcaagctaaaggtttggctctttgcatggtttggagtttggagttacgtacgcaactttatgatatgataaaactccggttaagtaccgtttcttctttctactctctaatccatatttactttgtgtttttatatatacttaatagatgtttagcaaattataaaaagacaaaacttaaatagacatttatacatagctttggttagaagctcacgagatcttgattttgaaattttatatattattatattattatttttaattatgaaaatagtaattcaaattcaggccactatattaaaaaattggaattttcaaaaatatattttatttacaattttattgtttaaatttttatttataaaaatatacttgaaaattttaaaattaaaaaaattaaaaaaaaaaaacaaaattaaaaatacaaacgtagaaatcaacttcacgacgaatttatgaattaactataaaataactagaaaaacaaacttcattacagttgcattacaactatataaactataagaaaaacaatttattgtttttactaaagatatttttataaataaaaaaaattcaaagagtaaaaatatatttttttttgttgacatatttttataatttttttcaattttttttatctattgtgtaaaattttcttaagaaaaactcctaattagaattacatattaataattatactttttatacatatacacacaagaattacagattaaattttgacataatcagttctcataggcataggttttggctggacttttcaaaaatacttttttacacctccgaaactcaaaaaaatacttttaagttctaaaaaattctttaaagaaaagctatttttggtagctttttcggaataataacttaataattttaacactttttctcataaacaataagtcttaagtttaaattctcttccctaatatcaaaacaaaatatattctttttttaattagttaacatcttttcgaatattagtaagcatagtcatattgttaagtattgcatggataaagaaaatttatttatttatttgtatttatgttcgaaaattgaaacaaacttaaaaaatagtcaaatgaaactaatttttttttaatattgtcatttaaattaaagccagtaattacaataaaacaataagtagcttttgataacatctaatatatattttacaaaaagataaaaagatattaattagtattaataattggagtaatgatttgtgagagtaatttttaataagtaagatttattttaaataaaaataattagttgaaatcacattatgtgatttatgtatgtacatattattggtctaacaattaataaaattacatattctataaatattaacaaattataacctaaaacacaatttagataacttaatacactgacaaacataactatcaatactcgaatgagagcaagtttcctttgtagctttgataactatgtttgaatcactttctattattatgaattgacactatttagttgttgtagtttcaacaacaagcaagcagggtagtcgttacttatctaatgagaggattagaaaattgtaaccgcctactagctgctattaggggtgcacattgggtgggttttatcgaattttgggtgtatagaattagtaacccgaacccatccatttgtgtcattgggtttttggatttcgagtgcgagtgggttgtgtttgagttgaactaggttcgggtgggttttgactgggtttgggatgggctaaacttttttatttttgaaaaatgtcattttttatacatttttt

SEQ ID NO: 380366 - DNA, 1191 bp, Cannabis indica
acaaagactacaacaaaccaatctaaacataacaacatacctacaaaaccatggaggccgttcagacaagccaacacttatatcaaaatctggttgctgttttccatccttgtttggcttggcagctgatccgttcgtgcctttcccttgtccttgtcccttagggccatacttttcctgaaatggaaagcaaaaacgggcggtatccagcatggtaggattagctaaagcttagcaaccaatcttataagagaggaaatgaataataacaacagcactataaatacaagaaagacatataaagtcagtcaaatgagaataagatctctaaaatcaattggactagacaaactacaatctttgaacattgaagacttttgcattacaagaacaaaccaatgtatactactatctaaattgtcacttaccatctctgtcatgcattgcgtatggcctagaacactttcctgcccgaatacctttccgcaatcaatacaagataactgccgttttatcagaaccacaatagcaaccaagtcagttaatatatagaaaatacaataaaaacttttttgagagaaaaaaaggtacaagctcttggcataacgatcgaagaatgtattctcaaaattcataaatttcaagagaattcaaacatattgcgatgaaaatacagaataaaacaaaggaaaattaccttggtagcacagcaaaccctgaaatgactgggtaatttaggtttcttaaggttgtctccacaatcctcacactgaaaccacaccatctctagggtttgcaggatacaaaaactgagatagattgttgaggatgcaattacagtttctgcatccaaccaagacgatgaattggggggtttaagagcttgctagggttttgtacttctgttaaccaccaacccgaagttgcgatgggggaacttggcaaaaatataagcgtttacaaatataatatcaaaaataccacaaggaagggaaagtaattgcaaatatttttaattaatttcaaacattattacaatcatattttacacaaatgacacttttatttttgtatcattattttctacaaaagaccaaatatggttggacttgggaaacttcaaaaatactagaattttggttaacttttacaaaaatactagtcacacagaaatgttttcaaaaatactgt

SEQ ID NO: 380367 - DNA, 4020 bp, Cannabis indica
ctatttgcaaaaattacaagattagttaaaattacaagattagttatgtcaagagattgttgggctttgaagggagttatgttgttgaggctaggggtcatagtgggggcttagcaatgctatggaagaaagaagaagaaggtcagctccttagtttcagcaacaactatatcgacttggaggttcgaattgaagggtgcccgttgtttcgtgcgattgggatttatggagagccccagcgaagtttaagaggcaatacttggcgattaattcaccaactttcaggtcagtattctttgcctaggtgtttgtttggggatatgaataatactttgagtcatagtgataaaagagggggtagatcctacccgaattggcttctaaatgggttccaagatgtggtttctgaattccatcttattgacatggagctaagggggtatccttttacttgggaaaaagggaggggtacttctcaatgggttgaagtcagacttgatagggcattaattaatcatgattggcaattgttattccctttggcctctctggaaaatctggaaattacagtgtccgatcattgcccaatttgggttaatcttgcaatgtataaacccattgttttcaagaagaagtttcggtatgaaaatgcgtggtctcgggagcctatgtgtagacaaattgttcaagccaattgggatagtattcccaatagttctctcaacgtaaagcttcactcctgcagtgtgtctttggccgaatggggtagtgatatcactggctcttttaataaagaaataaagtcttgcaacaagattttgaagaagttgaaaggaaggagtgaccaactggctgtctcgaaatacaaggagactcaatctcagctttgtgaggctttaacgaagaaagaaattttttggagacaacggtcgaagcaattgtggttacgaccaaaataccaagtattttcatgcttgtgctagtaatcgacggtgaaacaaccagattgttaaacttaagaatagcaatggagtgtgggtggattgggatagtggccttcgggaggttatggtaactcactttactgatcttttcactgcttcgggttcgaatgggcaacgggttattggttgtatcccagtcaaagttactgctgatcaaaatcaagagttacttcttcaagttgaggatactgaggttcgtaaggctctctttcagatgcaccccgacaagtcccccggtctggatggttttaattccggttcttaccaaaaacactgggacattgtggaaaaggatatagttgatatggtccagcgtttcttcacttctggtgagttccctgagtatctagccgagaccaacatagtgcttataccgaaaaaatctcaaccagtaagtatgaatgatttgcggccgattgctttatgtaatgttatctacaagattgtttctaaagtgttggcgaatagactcaaaggggttctttcaaaagttatttcagagacacaaagtgcttttctaccagggcgtctaattacggataatattttggtttcgtatgagataatgcactatcttaaacggaagcaaaaaggaaaaaagggcttcatggctattaaactggatatgagcaaagcgtatgacagagtggaatggagttttttagaagctgtgttgagaaaattggggttccaggagcaggtgattcgtttaattatgaaatgtgttggcacagttagctataactttgtggcagggggacaagaagtggggccgattattcctagtagaggattaagacaaggtgaacctctatcaccttatctttttattctttgcactgaaggattttctgctctgttacaagactttgagaagagaggtagacttcatggttgcaaggttgctaggggagctcctatggtttcccacatgcttttcacggatgatagttatatctattgtcaggcttctgaggaaggtgctttgagtatgatggaattattggattgtttccaaatggcttcgggccaacaagtgaatcttcagaagtcttctttgttcttcagtccgaatacaactccaggagataaacacagaatttgtactattatggggattaatgaggctggagaaaatagtttttatctgggtcttcctaatactttggggcggaacaagacagctttgcttgggttcttgaaagacaagatgaggaagaaaaatccagagttgggagggaagatttctgtctaaggcgggtaaagaattgcttatcaaaaccgtggcacaatctctcccgagttatgccatgaatgtcttcttattaccaattgaaacttgtcaaaagatggagcaattaatgtgtaaattttggtggcaagcctccaccaaaaataacaaagtaatccattggaagagttgggatagattaactgagcataagtccaaaggaggaatgggctttcgtaaccttcgtgattttaatatcagtttgctgagcaaacaagggtggcgtctcttgtgtcagccacattctttggtgggcagaattttcaaagcccgttattacaagtctagtgactttctctcggctgaactaggaggtaacccaagttttgtctggcgtagtattcttaaagctcaagatgtggttcgagaaggggttagacgtcgaattggtaatgggtcttcggtgagtgttcttctcgatgcttggctgccggatgatgataatccaaaagtaacctctactcacccggccttgttgggtcaatgtgttaattcgttgatggtttatggggaatgttcatgggatgttgacttggttcttgatctgtttaataaccgggatgctagtttaatacttagtattcctttatcttcaagtcgaatagatgacacttggtattggtgtttggaaaaaactgggcatttcacagtaaaatcagagtacaagtcccttcaagttcgtaaagagacgagttctcaaccgaatagctctccggtttggaatggtatttggaaacttcgtgttcctcccaaggtcaaagatcttttatggcgtgcggcttcagaatgtctcccgactaaaactagattgcaatctagacatgtgcaagttgacaacctctgtcctaggtgtgttgcagcacctgaatctccctttcattgcttggttgactgtgtgtttgctcaaagctgctgggagcatgcaagtattgattggaatgttcaaggtgttgtttcttttgctggttggtgggaatgttcaagcattttcgtgacttgttgggccttatggaaaactagaaatgatttggtttggtctgataagagttctacagttgctaatgtaacttttcttgcacaaacaactcttgctaattggtctcaagcacaggataaggctttagttcctacccctggtttttttactgaggcagatggcttggataaatggcaaaagccgactgctcccaccattaaaatcaacacagacgctgcaatttttgacagcaatggtgtttacagcttcgtgtgtgtggcaagaaatgcagcaggggagatgctggaagctttaacaagctgtcgtgcagggatagtgcagcctgaactggcagaggccatgggagttcgagaggccctcagctggatcaaaaagaagggctagattggaacaattgttgaaaccgattgtctaactgttgtccaagcaattcggagtaatcttcccttactttcttattttaggagtattatatcggattgtaaagagtttctaaaataattgtgtggtgtttctgttaattttgttaaacggtctgctaatagtgtcgctcactcgtttgctcgagcttcctattttattgctgatagtacttttcaagcaatgatgtgtctattgagttgcttcatgtaatcatgaatgattgcaattaataatgttgatgacttttcttcaaaaaaaaaaaaagtattaggtctcatataatttatagtaataacttttatgga

SEQ ID NO: 380368 - DNA, 7861 bp, Cannabis indica
ttttttttttttttgatttttcgctctaacttttatggtatagttttgtgttcatggattcttttttccaataaaaattaatctctgcttcttttatttttccttccttcccagtgtctgggttttcaatttgtacctgttcttttcttgtgtcatttgccattcaatttgtttggattctgtttccaggtgctagaactgttagaagagcatttgaatttggacggacctatgtagtcagacccaaaggtagacatcaggcaactgtagtttggctacatggccttggtgataatggctctaggtattactctaactcatcaaccaaatgtttttttctttttccttattggttgcgcaacattggcgaagacagtaaagatattgaagaaacgaaaggagcctaaaccttgtttcgtttgtaatctctaaatccctccatccccttctttcccatcatacatttctaatgaatgtgcactatatgctgacttttttttgcggaccataaagaacgaagctacaaatttttattaaacctttgatttttcttcctggcagttggtcccagcttttggagacccttcctctttcaaatgtaaggattaagtagatctgaagtagctgttgcacttatatgcgcctcttttttgttttaattctaaggatatagaaattgattaatgctaaaaatatgtcacaaataacatggtgcagattaaatggatatgcccaactgctcctactcagccaatctctgtgttcggtggttttccttccactgcttgtaagtctattttgacagagaggcctgattataaccctctttacaaaaattcccctatggcaacacaatggcatattaaaagaagaaactttaagttaagatgtcacttttagttgcttcaaggaaagaaaaaaagatgtcacgtttagttggcagtcaaagaagtaactgtagtaataataatctcgggcgtatggacaaatcttgtcactggagtaggtttattggctgttggacctttattcacctttttggatgctgtttggacctttattcatctttttttggatgctgtccctttaacagggtttgatgtggaagacctttcagaagatgcttctgatgatttagagggtttggattctgctgcatcacatgttgcaaatttgctagcaaatgagcccgctgacagtgagtttcttctagcatttgtttcgcatcacattaaatatataatatattttgcaaacacaagctgtgttcaaggtggtcaacacataatagcttgtgcaattggctaaaattctgaatgcggataggttctgcatgtcattgtagcatagtgtaacattacaaatttacataataaagaaaaaaaaatcaaataattggtgtacatcacattacatatgtaatatattttgcaaccacaagctgtgttcaaggaggtcaacacataagcttgtgcaattggctgaaatgcggataggttttgcatgtcattgtagcatagtgtaatattaaaaatttacaaaaaagaaaaaaaatcaattaattggtgtatttaaaccatgtttgatgtaacagagctgttttttcatagcgttgcattttcactttcagttgatgaatgctaatgtgatatgattattgcaattttccgctaatataaacatacacacatatgtgtgtgtgtggatgaaagggtgagtgcccgtgtgtgtgtagagagaagttatgtttcctatactaatacccttctaatttttattttttttccaattattttattgtcttcatgatatagatataggcttaacagatgttctttattctacagttaaaattggagtagggggtttcagtatgggtgctgctgctgccctatactctgcaacctgctttatctcaggaaagtatggaaatgataatcctttcccagttaatataagtgcagttgttggattaagtggatggcttccatgcgccaagtatgatttcttatgcctacttttatagttgcccggttttattcattttgcatggatctgctcagtagttatgagttttttttttttaaatcaggatcttacgtaacaagatagaaggggtggcggaagccacaaggcgtgcttcatccttgcccattttgttgtgccatgggaaaggtatacacgcatttcttatatgctattataattaatgtttgtttgaattcttcattcaatagagcgatacaatctatgcttggcctgaacatattacaaccttgttatgcttaattttttgcagttctataatctatttgcttagagatgaagtaaattgagatgactgattttaactttagtaaaatggttatttcttttcgacaaaacttggaagctatgtgataatatagtcagccaacaaggtttaatctaagtgcttgatagttaatatatttttaggagatatcattttactgcatccacctctgatgaatggtgcttccactaagttaattatatatggcatgacacatgctatctcatatactaattcttagtgcttttcatactcatatgcatgatttatgatatgtacctttaccttgacggaagctgatttaattttgcagatgtataaacatatataaatatatatacatatatattttaactgaagattgtagaataaaattcattggaggtgcagtaagataggaaggacagtcatttgtttatgctgatttgtggaaaatgtctacaatcagtaccatgatgatgtcattgatttgtagcaggaactttaaacaaccttatggtgactagaccaaaaatataatagaaatgaaaagtataatttaatttgccatgatgtcattgtagtgggccatcgccatcccatataaaacgtatataatatgaatttgtatcccttaagcttcagccctggcatatttttgcagttgatgatgtggtcatctacaaatttggggagaaatcttcacaggtcttgagttcgactggatttcaggacgtcacattcaaatcgtattcagcgtatgttatacttctatctcagacaacatattacatgtactttgattagctaggagaagaatgtgaagccttctcatttaagaaatatatatatatatatgtatatataattttattactattattaagctctttcggattgtgtgtaatggaactctttctttgagcatgtagacttggccactatactattccagaagagatggatgcggtctgtgcttggctgaagtcaaagttgagccttgacgatacttcattggataacggtgtgtaaagcggaagacagagacacaagaatagtatgggcaaatatttggatggcaatggcaaggcaacaaatgaaatcactataagcagccttttttttttttttttgatggggacactataagtgctattggatgatggatgcaatgtggactttttcgcttttacatttcagatcagtgtaggtttttgtttttctttcactttggtgtatgtataacgtgatgttatttggctggttggtttgcagttggatagaaccatatttgatgatagtttgtactcatgaatccactcataagggggttgtttggatttcagtattgtgttgctaccaaaaagagaaacaaaacttacaatgctttgcagttttcaagtagagaaaatacttatactgcctttttgtcgatgaagtggtgagttttgcttagaaggttttgtctgtggcatatggagcttgggtaatttagaattgctgtaatgtaaaacatattttacgacactcacctattatgcacactaatgtgaagtaatcacttgttaatcctaacacgatttttgcaatagtatcacatataatggattatatgccaagttaaagtcataaataccatttggcaggtaggtaatttttactcattttccctttatgatcagtcgagataatttttactcattttcccttcatgatcagtcaaggtaaattttacttattttcccttcatgatcagtcaaattaatttttactcattttcccttcaagatagttacacttttcgttcatgagttattatatagtttaacaactataatcttacacaagctccaaaattacctgctacctacacaaatcaaataatttgaaatgcaaaggcagtggaatttgacaatttctataccataaataaataatgaagataatcacaaacctcacctctaattgctttggaatgccttccgcttcctttccaaaccagaattcatttcaaagaatgagaacacatgaatatttcatttgcactttcgataatttccacatacaagaacctcaacaacaatcaatgatacaatctagtccataattttcttggtaaaaaaaaaggggggcatgtgctggaaaaacatggatgccttgagattttttttcccagtaaaagtgaaaacaaaacaaaacaaaattacaacagatcaaacaattttgcacgctggtaacatatacaaattcatagagaagggttactttccaaaatgggggcaagcacaatttcatccatgcagtagccattaccctaaacaaagaggcatgaaaggacctaaagggatattgcatttcgggatagtttgtcattttcgatacaaacttccagaacaacattatatttcacctgtgaccctctttcacaaaagacacatccccagttccctccagaggtgatagcaggcgcttctcttgatcatcatcgatttctgtcgactcacgggtggtacttgatggagactcactaccatcatcttctaaaaataataaacccagaaaatcaacacattttggtacacgaggtaatgctagagctgtcattgaacttaatatctaactacatgagcgtgtgtaaacaaagtgaaaagatgaactcaccagacatttcgtggtattctggcaactgtttaactgtagttacttgaaggctttcaggcagcaggcaactacataaagcacctgagattttgaaaacaaaagaataaaagccagtcttagtagtagcctaatgaatctgatgaattcacatagaaacattacaagagtagaatctgcagagaaaatacaattgattataatatataaggttaattatgattattgccccccaaactttaatatataccaaattatgcccctaaactttaaggtcgttaaatttttcctgaaccattgaaattgttagatttaaagacttttgtcaaattttagtaagaaaagtctaatatgaatgaaagttcatgaatcatgatttagtacataaataatcaccaaattaataaaaatgaatgaaattggacaaaagtccttaaattcaacaatctcaatagtttagggacataatttggtacaagagcaaaaatcctaattagccaatatataaatatacaaatttttataaaatggtaggtggggaagtaagtcatcacaagagtggtccttcttattcttaaacattgcctcagagagagtaactagaagtataactaaatggatgcttataccaacattaaatcaaataaactattctcagggtttatttgattagattataacttttttcaccagcaaattattatttcttttagtaaataacaaacctacttattaatggctatagaagacaaaaaacttccactacaaaacatattattgttcagcatagaacaaaatctcccgttaatgaattaattatgatatatgagggataataaaagttcctatggtagatgaattatgaatgataagttcttacctagccgagcaagccgattcacccagcctgggatcctttttcctgtcaacctacatgaaatgtcatctgtgaaatggttgcagttcttggagatgagatgataggtatccccatgatactctgaagcaacaccctcaataaatgtccggaattcagagatttgaaggtttgtgtaacccagggagagagaatttcggtatataaaacctggacagctccttggttccacttcaaaaactccactagctgggtagtcatgggctccaaaaccatactccttaccatggactgtaagtgtaaacattcgaaagaaatgaaaagatggaatttcaaaggaatgaagtcaataaattcaaatgagtcagttcttaaaagaacagagcctagattatacttaaattgtattataactagatttcaagaaaaaaacaaactcgtatgacaacgcttattgaagggggaaaattattctgccgaatttcttaaaaaaaaaaaagaaaagccctctctatgatctaaatgcccttttttaatgatcaaggaccaaaatgcaaaccatatgaatatgaggccaaacctggttccgattatttgcaaattatatgcatacagtcacctcttgcacattaattaatgatttacctaactaaattcatctaaaattactatgggtttctcaaaaaactacttaagtagtaatctattaattgtaactgccctgatttataccatgtcctaactaaactcaaactgtgccataatgaaatggaaactttcacttctaaaagtacgctaactttaatgatataagaccaatagagatttggtagttcaattatttatcatccgtgtgttacagcaaggtacacaacaaaattttatacttcaaacgaatgaatagaaaagtttgattgattaaacgttaaaacacctaaaagaaaaacactttaagcatactaatcccagatacaaatgcatattcatgatttaccaagggcacacataaaagtaataataagagaggagaaacagattattcacaagagtacttatcaagaaacgcacaggaaaaattcaaagtaaaatacagcagaacccagatcagagaaactcataaaacatcaaaatacatttagagaaaacaatagaaagaatgataaaataaaatataattgtcacaaagagaaagtttgagagaccttgaatacccgagtggaaaattccaaaaccgaaccaataggtgtaactgttaacaggtgtaagatcgtagatattcaaaaccacttcggtgtcgacacaatttttggtgctatgaagaccaccgctgccggaggtgctttctgctcccatttctcacaacagtttggaattcgaaacaaaccccgaatgaaatacgagcctcacagatccacctccggctgtgggtgtcgctgtaggagaagaaggaaggctttgagccttttgaggaatgatatcaattttacctctttttcctttcttttatttatgtttgcctttaaattaaaaatcttcttttacttctttactttttgactaaaattagtttggaaaataaacttttaaacaaacaacaataaaatctgtttcaaaaaaacaacaataaaataaggggtaattagatcaccagttttttttttttttgagaaagaataaagcttaattagatcaccatttcaacaataaaaataataaccattattaaaaaaaaacaataaaaataatagtttgaagaaaaataggattaggattgctttccaattatgacctataggctaaattggctggtgacaaggtggcactatgaatatgataatatttatatgtgagacaactagtgtctctaattattcaaataattattgacatttaacatgcaaactcaaattataatattaaagttttcaaaaaaaaaaatataatattaaatacctttgcaaaaaaaaattataatatttaataaagaatactaaatactataccacatctattttttattatatattattagt

SEQ ID NO: 380369 - DNA, 1194 bp, Cannabis indica
atatatatatatatactttatattcattttctcttcttttgtcgttgcttttgtagagactgttctctttttaagggtgtggttcttttttcattttccattcttcagaaactttgtatactagaattactgaaacatatagtttactagacaaacaaatttgactttcccatgtgtcctaattagatttttgtcttcttatattactaatatttttgacaaagtcatcacctttggtaaaattaaggtaatacacctaaaacacatatttaacattctttggtggtatttttatgtgctataagccacacatctttttcctaatgtatttatactttatcaaaagtctatatatatgagaataatggaccaaagaattaagaatatgatttatattgtatggttttgtcaattgagttctagtacatatattcattgatcaaatctggatcccacaataagatgatttagatatgcacctgacgtactattgtttgtctatactagtagataatatattatcaaaagttgaaatttcaatctaattcagcatattaatttttgctttatcattttgttaacacattattagatgatgaagcttctgctagttttttgtggctgtggatttaaggaataaaatattatgaagcttcacagtcacgccatttattcattaattaggaaagtccaaataattctattagttaatgatagattatcattcacaaagatttttgttttttggtacggatgtaatttacaaagttaaacttaaatcaaagtaacattctcataaaaaaaataaagtaacattaataaatttagtaatatgttctattataatatgtgacaaaattactttacttgtatggtagttactagttagtttagatgggccactaaaataaaataatttaatattatatagatgtgtgtttgggtgtgaaaagtgtgtacatatcaaaatttaaaattttgtaattaatcaatgaaattttcgtgcacataatcacaaacgtgatgcgtcccctacagtgttttccttttgtttagtagaagatcctttcgttttgtaatagaacatatattattagtaaatgaatggtaatttctatagtacctcaaagagtcgatcttgtagatttctattttctttcttatccaagaaaaaaaaaaaaattaatctatttt

SEQ ID NO: 380370 - DNA, 3369 bp, Cannabis indica
agaatgtttgaggctggttttgaagtttgctgctatttggaagaacatgggttctcattaagtcttgcaactttcaatactttggtgcacgttgttcaaaagtctggccagagtactctagtttggaagatttatgagcatatgattacaaaaaggatataccctaatggaacaacgattcgaacattaattagctcgttgtgcaaggaagggaagctgcaaaaagtaattggaatgttggataggatccatggaaatagatgctctccgtctgtgatcatcaacactagtttgattttgaggattttagacgaaggtagagttgaagatggtgtggagatactgaaaagattgttgcaaaagaatatggtttttgacaccattgcttactctttgattgtttatgctaaagtgaagctaggaaatttaggctctgcctgggttgtttatgaagaaatgctgaagagaggttttcggccaaacccttttgttcttacgctgtttataggaggctactgtgaagagggaagaattgaagaagcaaattgcttgatgcaagatatggaagacattggtttgaagccttatgatgagactttcaattacctaattaagggctttgccaaggcaggaagattagaagaaagcttaagaagttgcgaaagaatggtggaacagagctttattccgagttgttctgctttcaatgaaatgattgagaagctttgtgaaaatggagatatggaaaaagctaatgcagcattaactcaattattagagaataaaggtttcaaaccaaatgaaatcacttatgctactctgattaatggctatgagaaaaaaggtgatgttgaagaagttgtcaagcttttttatgaaatggagaacatgctactatctccgggttcgtctgtttttgcagcattgataaagagcttctgccaatcaggtaaaatggaggaagcagagaagcattttcagattatgaaagaccgttcgctagctagagacgagtgcttgtacgagacaatgatcgttaactacattgagaagggagacaagaaaagggcccttagacttcacaatgaaatggttcatgaagggctaaggcctcattgccagatacttgatacatttccaagtactgctaactgtaaagcttcttgttcacttagtaagtttcagtcatcttccaaagtactttgaatttaatatgtcaaaaataaaataacagttatatttctgttcaatctctatataaatagtagtttagagcttttagtgattcattcatgaactcaacataataataatgtctataataaaatgcttgcatgtatatatgttcaacttagatttattatttataaaagctctactactaatgagagatcttttggccattaaagctcaatagggaatcaacacaacactcatttatttgaatcaaatatatagcttgacctaggtattaaggtattagctaggaacacatcatatatggcaattgtccacaataaaccatccattaactaattgaactacataacttaaaaatgaataaactacaagacaaaaaccaacctcaaaagctctcccgaaaccaataatatatagcatcaataaagcattttgaaatttcacttctaattacatacaacaacgttctatatgccatatatgccaaatatggatacgttatgaattattcattgttacaatctaaagagtcaataatcctctataaacagtttatattgaatagggataaatttatcattttacttttcaatgtatcttatccttaaaatacttagctaattgtaaatgatatttcagtaaactaatataattactgaaataagcgctctatcatttattgcgttaacccaagctttaagaaaagcatagttttacttctaatagaagttatagattttatatctgtgattaatgatcctactcaattgcactaccaaattctcaagatgtaagtatgggctagtcctacaggtaagctggtaacgaacaagtcaaagaacacgtatagtaaaattaagttagaatttaaccattttaggattgagattaattgaccaaagatcaattaagtgacattgacttagaaaagacataacggtaagtttatgatatctttttcactgtcaatatcagtccaatttgatgtatagtcgatatatctgatactagtttactttgctaatgacctggaaagaacattccacttatacaagtgtaagtaaactatatcattgattatcacacgtcaatataaattcagtgcactgataaatcgtgggactaaatagtttgaagtatataattatgttattttctattgtatagacaatattataatcatgaataactatatattcaggatataatagaatttatatattaaacatataattatgaaagtaattatattaaccatgtaacatatatttatgtccaacttagacatctaatttggaggaggtttctataatattatctttgcgggttctacatgtttttttttgggtaaaatatgtctttgatattatatttttactcattgttatataaacattgacaactttgtttgttaatttatagttgaaattgagaaatttatgtccatcttttaaggagaaaataatttatgatatagatagttttttccaaaagaaatataatatgttcatgataataattctttgcgagtcgctaatttagaagatgaaattttatagagaatcctcctaactgtgttgctgagagttcttcatcttctatgcctcctacacctcagtataattggaatgagttaatgtaggtaaaaataataaggaatcaagaacaatccttacaacaagtctaaaaaaaaatcaacaagagtaacccttacaaataataatagcaacccttttgagcaccatgtacaaaaactcaatgtaaaaataataaccaaactcatcaaacaatctcacaaacaaatttagcaaccctacaacttaatataaaaacaaccaaattgggcaacatgtgaagtacacccaacccaaacacaatgcaaaaacaggtaagaaccaatcaatcaaaatagagaaccaatttagatttacctataatctcaagaaccaaataatttataattttgaatgagatttttaagctttagatttaccttaagctgagatatgaatggttgtaataaacttctaattcgaaattccatagttaaagttgaatggctagaaataatattagcataaatccatagtttatacaaggcatacttacaaacttgaatagtttctcataatagtttggaattttgttcaaattttttttttttatttt

SEQ ID NO: 380371 - DNA, 4332 bp, Cannabis indica
ttttttttgttttttttaatgtttcgaccctttaggttgtaatggcattccatgagtatggaggaagtgaatctggtgacacaatgatcactcttcctcggtgggttctggagattggaaaggaaaatcaagacatattcttcactgatcgtgaagggaggaggaatactgagtgtttatcatgggggattgacaaagaacgggttttgcatggaagaactggtattgaggtattaaacaatcatttcttaattagattttatatttattatgcaaaactatgacaaattcctgcacatcatttggacgattgtcatttctctattttctccaaattataggtattgtagactttttccttcgtactttttcttttgttattgcatctatctcttattgaacttattctgtacacgctgttctccaacaaataaaaattagggcataatgcattttttcatggaagtgcttgcggggactttctttttctatggatgaggaaagtaaacaccttaaattaaacaatcatattcctgaaaactctcatctgcctcttcatgaatgtgggacttagactcttagtgtgttttgtttttgaaaaaataaaataagaggaatcaccctaataatttcactgtgtctcagtttgacaagctttatggtacctatttctcttttgcttaagagacattgattttttatgttgagtttccctgctttctctggaatttatttgattttttgtggagttgtactcagaccttttatgtaatgaggataaatttcactaaaaattaattattgattggtgataaaacccatgatcaggaaaggaatgaaatttgtatgttgggtatacgtctctaacattgactgagcctggttatacatcgtacacatacgtaggtttattttagctaagtgactggcattttatttgcaggtttattttgatctaatgagaagctttcgaactgagtttgatgacttgttttctgagggcatcatttgtgctttagaaattggacttggggcatctggggagcttaagtatccatcttttccagagagaatgggatggagatatcctggtgtcggtgagttccaggtatctgttagaatcccatttgtgtacatgacactcatcccatgctttttattgttggaagacaattgttgaacgttagtcatcacatttgcagatgaacataccatatatatgtgtgtacacgtttctcatggaaatattgaaaagtttgttgacaataggatttttgtatgcttgtattgctattcgtgcattaaaaatatatgttaattctttgcgtacagtgttatgataaatacctactacaaagtctgcggaaagcagctaaattgcgaggacattcattgtgggctaggggacctgataatgctggtcattataattctaggccacatgaaactggcttcttttgtgaaagaggtgactacgatagctattatggacgctttttcctcctttggtatggccaaatgttaatagaccacgtagacaatgttttgtctcttgccagccttgcatttgaggaaacaaacatcattgttaaggtatgcttgtcagatatatttttacctgcatcttgttttctctacaatctataattgtttgttcatgtcattaatcccttgtcatgcactgtagatatgtctttattcagttaaccaaattactccatggttagaatatttacttaaatatttttgtagcagttgatttgggagattcctggaactagtattctatagaattagagcctatatttctctttaaaacttgttcgttgtcaaactctacctttttaaaaagttattttgaaatctgtaaaactagcaacctcaacaatgatacaacagatttccttgcaaaactatgttgttccttgtaaggtggtctatctcttgtctaaaattattaatattattataaacaattctttgatataagattttcaatcggaacttccaattaggcaaacatgaattttaagccgaactggctatcacttgtgatcaacttgattttttaataagggatcttataggatcactgacatgccactgaaagtaattaaaagatgccattgtgtaggttcctgcagtttattggtggtacagaacaccaagtcatgcagcggagctaacttcgggatactataaccctacaaaccaggatggatactctccagtttttgaggttctgaagaaatattcagtgacagtgaagttcgtttgctccggtttgcatatgtctagccaagatattgatgaagccttcgctgatccagaaggtctgtgctggcaggtgatggtcctaatttctcatatttttttacctctaatgttaggtgttattttcttgacattcgtaggcctccattctaattgaatcgtggagggttattttatttatttatttattttgtgtgttcatttgcatgatattgattatctatttgttaatgcgtaggaggttaaaaagtagaagtttcactaaaaacaaaatccttaatatattataatgtggattgggtaattaggtttttaattctgcttgggatcgaggattggctatagctggagaaaatgcagagacttgtcacagagaagggcacatgaaattagttgagatggcaaaaccaagaaatgatcctgatcgtcgccagttcccgttctttgtatatcggcagccttctctagttcaaggaacaatgtgcttttcggagttggatgacttaatcaagtccatgcatggtaatgcctctttagtttcttattatacaaacaatacattatatagtttttcatatgcaggtttgactggttataccgttatagctataaatatattggcacaaatacaatacaacattgacatgctcacattggtttatttgatatgtgagtggatggtttttagtccccgttaataaaagtggttaaagatgataagagaagaggtgcaaatttctggatcttcattacccagatgaacatgaatgacaaaaagaatgtgtagagtaaacatgctaactattgttgctgttaactcttgtttcatgtattccgccaacaagaattttgtatcttgaagcttcaatgacacaagtactaggggcaatgtttgaaataataatttctgatgctcatttcaaacttttgcaggtgaaatagttggtgatctagtttcataatattggaaattttgtatttatgagaggacacatttatcactggtaactgcagattttgcggcccatcgccttcaatggagtcacatgaagacatttgagttttgcctgcaaaggagggttcatgaatatagtttccctatcattatggtcaaagctactttaatctttgtatgtcataaaccatctctcctttggaatgcgaggagttggtaagtttatgacgaaagtttctgtggtctaatttatatagaaggtatagataccatgagaactttcattatatctgtacagatcatgaaaaacgttttcttgtggaaaaattccaaatatgaagtaaaaatagtgttatttagtaattttatttagttgagattttattaaattaccatcaacctgagaaagaagagatgtctgaaaaattccaaattaagttctataaactttgaataacgagcacctttagcaaaaattggtacaatttgcattataagatgagtaatgctacagacgaaaattgcactcaattttcacacagtcatgtatatattatttatttattttttatttttgcttaactacagtgatgtatattttatttttactatagataattatatttgaggattttattatttttaattgtgttagttgtgtggttatgattaattatacattattttatatatatagtgtatataatttaagtgtaacacaattattattcgaaactaatataagacatttgaatcaaaagataacccaataatttgtccaaaaatatatatactaaatattaaaaaaaacaaataacctatattaaatctttcagcacaaattcttgatcaaaagaaaataatttttatttaattttaatatttagttgcatttaaaagtaatgttgaatatttgatctaatttaatatttttttatttatttgatccaattcaattagtaattgaatttgaaaaagcatcattcgatccaattttaattagacttcaaaattcaatctaatctatctgatcaaattactaattggattagatcgatttttttaagagatatttacacagggtacttttttttttttttttt

SEQ ID NO: 380372 - DNA, 1776 bp, Cannabis indica
aaaaaaaaaaaagcctaaaattatagaaaagtaattaattatgacattaataatgaaattaaaattgaattaattcttcaatcgctgcgattccatggaatcgaaacgcgaacccatcatcatcataagcttaaactcatcaaagctaatcataccgtcaccgtcgcaatcgacgccgttgatcatcttccgacactcagcgatggaacaatcatcaccgaggcttttcagaacctcaaaaagctcctccgcagaaatagagccgtttccgtcaatatcataaactgagaacgcaactttcagattctccaaaacctcatcagaatcgacacctttggtattaagctcaataaactcgcttaaatcaatgaatccatcgccatcagcatcaacctccttaatcatcttctgaagctcttcttcggtcgaagattcccctaagcttcccataatagcaccgagctcagcagaagagatctttccatcgccattaacgtcgaatttcttaaacacctgttcgagttcggcgatctgatcgcgtgcattgacagagtgagatcgagatccaagaggaatatccagcgtggtgtgatgatccacattgtgattttgaaccgaagaagaatctgatttcttgtttttccttgcgaagagagatttgaaacccattatttgatgaagaaaatggaagaacaagaattttcaggtacgaatgtgtatatataggaatatatattgatatatatatattaattaattaattaaaatttgggggaaaaacagaaagggaatcgtaattggatagttattaaaatttgtaacggaatgaatctgaaatctgagtaattttctgaaactctaaatataggtatagagagagagaaataggggaaataaacgcgtgattagcgatgtgggatttttttaaaagcgagtgatgcacgccacgttaataaaacgaaacccctattagtattaattccttcatttttctacctaatgttgctgctgcactgatgcgtgccacttattattattaaattaaattaaattaattagtttttttttatatatatatttattatatatttattaatattttttttaaggattttgtttatttattatctgggatgactctttagagatagaaatttatagcgtggggatggataaccgtggggacctactcttaatgaggtggagatttcttagcttcgcggttaatgaggtggtagtggaggataattttaatactcgaaacgggaaagaggtgggagtgggagcgggagcgggataatactatctatatcatatctgaccccgatatagatatatataatttctttattatttttaaggtgtatatatattatatatataattgataataaattttgattatcatccataattaaaattatatattatctgcttaaatcatgaagatctaatgacgatagtgaactattgatccttgtagattataagtgtgaagatattttatttttgattcttagtttcatctttatttactttctaatatgttcgcagacttaaaagttatgagactaaaatattatatttgagttatctttttatatttttaaaattttttttaaactttgagacagatttattttttatgttctattgagttatgcttttttcattgtttaataaactttaaggtaaatctaattagttaattggccgaccgtttctattggtgctacatagttttacaaattcataaagtttagtaatacaacatct

SEQ ID NO: 380373 - DNA, 2288 bp, Cannabis indica
ttttttagaaaaatataaatatttataattcgttcattaaaaagtaaaaaataaatgaagaaaattttaatagcactttcaactaaataaggtataagtcattatctaattctaataatttgagtaatatccttcaagagatttagacatgtgtaatgcttttgataatgtttcttttgtgtattttttcagagttgtggcatggttttctattgtgtattattaagcacctggttgagagagtagttggctttaaaatttagtaggtcatgagaaaaatagaaatttttggtccttatttagaaaaaaatatgttattttcaaaattaataaaagaaaaaacaaatgcgtaattttaaaagaatttttctttcggcccttaaattgggtggggcctaggcacagatctagccgcctatacctagggttgagcctgctaattgagattgagccctcttttaattaaatctcttaattaagtcgtctctttgaaatgacattccctttcaaaaaaaaataaataatgtgacgaatgttagatattcaatctgaataaacaagtgacaaatcacacagtgaaatatcttttaataaactttttttttgaataatcttttaataaactttgattaaataataatctcatcattcaaactagaataaataaaaataacaaagctatccttatcaagaacgatcctaatgaaagaacaaagaatatgagatgaatacaaatttagaatccctcagaatcgactacggagaaaaaatatctaatccctgacacaacaagacattaaaatacatattttttaaaagttaattaggatttttgtttcctgaactttgaaatgtactaaattatgctctttaaacttttcaggtcgttaaaaatttcctcaaactattgagattgttggatttaaggatttttgtttaatttcattcaattttgctaatatgacgattgtccatatactaaattgtgttcctgaaatttgatatttacaaattatgctccttaaactttaacatgtattgaattatgcccataaattttaatccacgttagacttttttttagtaaaattggacaatagtccttaaatccaacaatctcaatagtttgagaagaatttttaacgaacaaaaaaattcagggggcatgatttggtacatgtcaaagttcagaggaaaaaatgtccaaattagccttttttaaatagagtattgatattaggtatcagtagtgtctaggactacatacttaaatacgattagtaagtgatacttcataaaaaaatttcattaaattatttgtgatccgatacttaatttcattaatagcgatattagataacattttttcttttaaataaactaaaacttcatagaaaaacaccctcattttaaatgatataatacactatatctcattaaattattcaattattcattataataataatgttataaataatattcgtttttacatttatatattgagagaaggtatatatatgtgagagggttggattgtgtggtaaagaaagagagaattgttcaaagatctcaaaaatctttttcccaattaaggaatggaaaaaaaaaaagcatgtaagcttcttctatataagattattattattaattattattaagagacatgaccccacttttcacatctcaattttctttttaattaatttttctaatctttaatttaaaaaatttaaaataaagttaaattttcctttaggtttggaaaagacagcttaagtgatgacttgatgacaacaacaacaacattaacaaccacaaaccacaatccaattgtgccttttttttatttaaataaataaaattaaaattaaaaattggagaatcatacgtggcacacatgcaatgggttagattgtacacctaaagtggaccccaccacatagaatctttacagcctaacgtaagaagaatctctttgtgattctttttaaagagattaatggaaaaaataattataaagtcacattcaaataatttataccatttataatgttagaaagagtttttaaaagtaaaagtttaatttttttacttataaaataagaagaaaaataatgaattggacaacccaagttcctcaactaagagttccttaatggtagggctttagatgcacttagtctaaaaatataataataataattaaaatttagtctataaaatttcataagggtttttttatttttacacttcaaaatattttttttttgtatttgtacggaatt

SEQ ID NO: 380374 - DNA, 1638 bp, Cannabis indica
ttctcgaatctagtgactaataataaaaaaagaaattttttggagacttatgctataatttaattagatatgtacaaaactaatgagaattttaaacttagggttagattaaagacttattaacattaaagtgaaccttttaaggacacatgccgcaatttaatatcaacatatgcgtaatattttttgagcaactaacagatctattaaatgaggaccaataaatttataagaatcttgaacttgtagattattattgctattttttgaaattaagaactaattaatttatttcaaagtaaattttttaaggacttttactgcaattttcactaataataataatgataagtagtacatgttctagttagtaagtgattaagcataattttaactaataatagaattttaatggggacaaaaggcagattgtttgaaataagaaggtatagaaatgagtgagagtgtcgggtgggcaaaatgattaatgggtcatataaatataaatatataatatatatataatatatgcttttagcattgacagtcatgcatgcctaattaccatgttttcataatcagatcccaaaatattctctataacactactattactatatactatattactacctctattcattagagaaatgctaaagggcactattggtgcctaacaccctcctacgtgttaatatcgctattggtacaattaagtatcggatctcatatagtttaatataataattttatagagtatcgctaaccaattgcaaggcgatacatctaaaaagtattaggcaccactggtacctaataacaatactctattcattattatcactaattaaactcattaatcccattttgtcacataagtaaatgaataaataaaaactcattaatcccattctcaaattcccaactcagctcaatttgttttataattataagaattaggtcatttcggaatccaatgcaacaatttcggctttcattcaaaagtggggtcaaaaatcttcattattattttactatttaattacattattttgcacattcaaattaatgttggtactatcaactatgtataatagaaaagataaaaagtgagaaatgaaaatttgtgttatttggtagggaaaaggaagttgatctccacatattttgaatttaaagaagatggaattattttcctttgaataaataataaaaaaaatatatgaaattattgtttatatataattcccattaattaattctacaaaataatatttattatgttttgctaaattatttcatcaaattgatatttctgtctccatctttattaatagatctctttttcttaccttacatagtctttggtgtaattccaagatatataaaagtataaagtagggctcttaaatttgttagctagtgataattataatcttctattataattttttattagtcaatttttacgctcgaaacacatgttgaaatattttttttgaatttttttatattggcattcgttataatattattctcgtaaattttttaaaaattataaatagtttatagcactgaaaatagagttcctaatattttagtttaccatacgtgttcaaaaaatttcaaatatatttt

SEQ ID NO: 380375 - DNA, 3558 bp, Cannabis indica
acgtatatacttagttgtatgttatatttttttctaataattattaaagtttaaaataagtatatataataattgtattcatacaaattgtttcgatatgcatactttttacgtgtaaagaaagtttttaaaaatttctaaatccaaactaagtaaaatttaaataaacaggaaaaaaaactttacaaaaaacttatgctaacgaaatgtaattgttgccgcatatagctattttattacaaatcagtcgatacatttattttgtaagtgattcattctcatccattaataactttttcataacttataaattcactatctgaaatctcattagttttttttttttttttttctacttttcttaagacttgtttagtttaataatccaacaataaagataatgaaaaatcagttgcaaacaatcatcaaacttgtgattttagaactaaattttgatatgttattccaatatatttttattcctttagacttttattcactctatctttatccaatcgaaaagcaaatttagctaagccataagcgaattgattaacatctcttttaatatgagatacttttattctaggagaaaagaataagagataattaatgttgtctctatgaattgtatttgtagttgatgctccaaggcccattgcacattataaaacgtggcagtagcctccatttcctttggggaatagcaaccttgaataggcttagaataacctgctataatcgcacctttatggatacgaataagagcacctatgccaataaatgcacaagtaggatcacgagcagcatctatattcattttatacaatccaacattgggttgctgccattgtgagtggggcatcagagatgattgtggaacatggtgggtgctgcaagtcttaacaacatgattatgtcgaattgcagcaggttgtgtggccttttgatattgattgaggtaggcaacagagaagctgcatattatatatgctggtttatgcttggtaccgtgcaattccttgtttctttcacaccaaatacaccacataaggcaaacaatcttctctaactcaacatcattatgtgtagcagcaatgtgggaaaaaatatcataacctttcaaattactgatgttgggcataaacacattgaggtgagattttttccataccgctttagcacgaacacaacgaaagattgcatgtccaacgaattcccaagcacacacacagagagaacaagtagttgaagtagatatctacctatgcgccaggttcaccgatgttggaagagcatcattgttaaattgccaagcaaacattttcacttttttaggtaactttaaagaccagaaatgattccaccattggcaatgtgaacttgacgatgagtgaacattcatagattccaaactctttgctaaatggtagcccaatttaacagtgtataaacctgtgtccaagtggtgctaaataagcatatcctctataggaataagagcaagaggaataggtaaaatacgatcaatatcaatagtcccaaaatgattcttcaaaatcctagtgtcccattttctatcagtggagatatagtgagccaccgtaaagagaggatcaccacgataggagtaaggggtgaaggtaatgttacccgacagccatggatccgtaggacatctaacattttgtccattaccaattttctatcttagacctttcaacaaaagctatttaccatcacaaatactttgccaagtgagggaaggtaagattccttttttggccgaaagaaagtcaccattcttatagtatcaggctttaagaactctagccaacaaagaggaaggatcatccagtattctccaagattgcttatcgaggagagtctgattgaaatgtataaaatagagaaatcccaaaccactattagcttttgaagagcacagaaacttccatttcttccaatgaatcttggaattattagtattcgagccccaccagaaattagccatcatcgactccacttgattgcaaatttttttagggaggctaaagcaactcatggcgtatgtcggtatggattgaacaacaacttttaagagtacctcacgacccccaatagaaaaaagtttagcatgccatgtattcgtaagtttctaaattcgatctttgataccactaaaaagttattttttttatcttttcctttcatacaagggaagcccaaaatatttttcatctaaagcacaaataggcatacccaacacatgattaaaacagtcttttgttgcttgagaagtatttggtgaaaaggagatgtctgttttatctgtgttgaggagttgacctgatactcgatggtaaagatcaagaactctatgaacacaatgacaagaggcttcaatagtatggcaaaataacaaactatcatcaacaaataaaaggtgagacacagaaggggcacctcgagcaattgataagccttttaaatttcttgaattttcctcattcttccacaaagatgagagtcccttagaacaaataagaaataaatacagtgagaatggatcaccttggcgaagacccatttgaggcaccattgaaccttttatcgccccattgatattgaaagagagttttactgatgttacacatctcatgaccagattcacccatgttatatcaaagcccatcttgatcattaccatacgtagaaaaaaatattccactctatcaaaggctttgctcatatctaatttaagtgtagtataacccaagcaaccacattttttattcttcaaataatgaaccagttcgaaagctagaagaacattgttagtgataagacggtttggaagaaaagcactctggttttgtgaaattactagaggtagagcatctttgaatctggcagcaatggttttagagaccattttataaatcactgtgcacaaactaataggtatgaagtcactcacaagttttggttgttcaatcttaggaattaaagtgatcaaagcagaatttattgaaccgatatcacctccctcattcaaaatttgaagaacactttgcgtcactaaaggcccaacaatatcccaatggttttgaaaaaatattgcagacattccatccaccccattagacttatctagtttcatagaatggagagcattttctacatcagcagtagtaaaaggctagagcaaaatgttggaaatattttaccaggatctagatttactaccaagtatgtttcattaacatcctaatatgaattctaaaaaaataaaataaacacatataaagtttaggaaaccttatattgggtgcagcgaaatataatgactccttccgttcagatctctagcccttgattcctttctgtagcaaagcatcaccaagatctgaacctggatctctttctctccttctttgatggttgattctcattcttgttgtttggaatctcctacagtcttacacactatgattgagataccactttatgtgtgtggccactactctatcactcaaggatttcgaaatggaagaa

SEQ ID NO: 380376 - DNA, 1631 bp, Cannabis indica
ttctgtaattaattgttaaaatatatattctgaccattaatatacttatggcgcatctcatctataaatatagggtctcggtccctgagcttactactcattctctgcaaactaaaaaatccatctaaaatagagtagagagagcttggaagcccggatactcacactaactagtttctttttcttttgtagatccgaagttcgcgtgggattgaaactcaaaagatcaatggctagaggtatttcgatctctttcgtcgtatttgtatatgatcgattttctttatttgtttgtattataaatcgagcatatatactttatattgttcatatattaatgtcttatataattgtgatcctgcaatctttttgtttgactttattttagttttttattaaaacaattcaagaattaggtagccgattagttggcttgtttttacgattctaatcctagttgtatttccaacgggggagatatcctgattggactgcaaattgctattaaaagaactgcatttcaaaaaaaaaagttaaatatttctttcaaaactttattttggtaatcaaaagcatcaaaatataactttaattgtaatccaaaatcaatatataaaatcgatgggtttgttttgatggaaaagtgatagtttcggtatgtgcttaaataattattaaaaaagacaaaacagagatgatgaataagaaatgagattataatcacaaataactttattaataaagactacacatggtgttccaccatagataataggtcattgaatcaattataaacaacaaacaaatgaaagaaatgaatgaataaaatgtgatcatgagttaattgaaagcagtgcaaagccttcgaatttcaccgtcactgccagttttgacaccaatgttgctcatcttgaccatagattttccaaactcaacattgaagttcaagctcctcaatcctctctcccccaagaaccgttggacgaagggcttggtggaaggatcagtccacagcttctgatccgactcaactactccacgaccatttctcaagtttctgaagaaagtagcatcaaaattggctgcgctgcccgtgtccatatcaacccgcttggccccatcgccgttgtccgggcaaagagctctgagttgaggaaggaaagaagggttgattgtgggatcggcgccatttccggtggtggtgaagttgtagagtctgtatctgaagagttggcatgcagtggtgccaatggtgtgtccaccaactagggtgaccaaatcttgagtgttgagccccttggctaaaaacttgcctttctgtaaatcaatggactccctaaacccgggcaagttgttagtgtcgcttgctgatgaaacgagcccatctctacgcccagtaggcactttccagctgaacccttttgtctgtaacaaaattaagcataacattatcaaatcatgttcttattttttgccaaacattttggagcctagaaataataacgtaatatgagcaatattatcgctatttggcaccatattaaagacaaaaaaaaatgcatccatgcacttttatgaggtggtatatacaggttccgccctaaattgaaatgggtcataggcaaaaaaaa

SEQ ID NO: 380377 - DNA, 3406 bp, Cannabis indica
taaaatcaacacccaaaacaaaccctaaactcagtctaaacatacaactctgaaactctaggaaattcaatcaaacttacttgaaacttaagtaacttcaaggacaaagttttaaaatcttaccttaatgcttagacaagcttctatcccttccaaattggtccaagagttgaagaattagcagaaaatcaaccctggttgcagcctcttagggtttgagtaagaaaaagaaaaaggaagaaggagtttttgtgacttattctaattttttcctcacttggtaatctaataataataaatatactttattaatatcaatcctaattcagtcatagtctataaaatacaaaaccctcattacacactcaattgaccattttaccctttctgaaacctttaaacttaaaaatcaatcctaggggtattttggtaattctaactaatttgtcaaaccgaaaacctaaaattctaaactagtccggaatacttccaatacaattcatcctttattgtcatgatatttctgacctctccatcaagttcccacgatcgccgggcccgaaaatattttatttgaaatatggtatctacgatacccacataatctaataaaatctttgtaattaataaattatttatcaaattcaaactaattaacttaactaagatcataatcttacttcattactaaaataattacatatttaataaaatatgtcaaattaaataccatattattttccgaaatattacagttaacctcttcttttaaagcattttttctcttcgaatcgaagaggcatctcttctgctaccttgaaggataaagttgatcaatattgaggtgatgaatataacattcgagttaatctcgactgtgtctaagtggctctaggtaaattgatcttggtttacctttaaaaataaattaattgttattttaattcttccccaaccctttgccaatctttacgatcttggtagggttgttgggatccaatatcacctcttctgattattccataggcccaagttaagattgttcatcaataatccttggatctaaattttcaatttccttgtaattaatatcctcgttataatcaccattacttgatgagtcattgctctttccttcaaatctatactatagcattgtcttgttgttaacttatctcctttaacagtgcctattccagattgagatggaatttcaaagataaatgctttatagagcttattgcccctattccggttagagcaaggcatcctattatcatgttatatactgaaggcaggtctaccaccaaaaactcttgcatttgtgttgttgacaatggtggctctcccattgttaatagaagttctattgctccgaagctcacgatacagtcccctatgattccacacaagtttaccatgcatggctttaatttgacatcatccaatcccatttttcttaagatttctttgtacaagatattgattgagcttccattatcaaccaagatttattttattcttttgtttgtgatttgtagtattattatgagtggatcaatatgtgggtattagacatgtgatgcgtcctcctcagtgaaaataatagaaggttcttcaagttttgcgcatttaagcagtttaggagcaaacaccaagctctaattctttatttgatttatgtaccgcttttgggcattattaatggttcttgtgagatgaggtcctccagaaattactagaatatcttcaccatcaactggtggtggctggatgtcctggttttgatcttatttgttgggtggattttgttcatttttcctatttcgcacatattttcagaagtaacctcgagaaatgaggctttcaatctcatccttgagttactgacactcctcggtagtatcactgaatctttatggaaacaacaatattttttatcatgtttactcctcagatttctcatgggtttaggttttctaaaggtaaccctgtattcattctcaaggaacatactttcttgtgtttcattcaactatgtatggacagagtatatcagcacatattttttgtgctttttttttgtttcttcttatccttagatgaatcctttgtttcatcttttctcattccatgtaactcatttcctttgctcgaatttatatttgttgttgcaacgttggatcttgtgttgctcgagcctggtttattttttgagtcaccctttaacaatttgagttatgtccaagcttcctctttctgaacgtatataaattctctattattgaactcgtttattgttcttacaggacaaccttgtatgtcatcccattgttctcctcctactataattctagcttgcaaaacagttaattgaatgttgtcattcaaattcctaactttggctgcggttgtttaatgttcattagggaggaggcctcgagtctcttgtttcttgcggccgagaatttctttttaaaatcccgcgataactgttcccaagatgtaatggaatattaggtgaatttatcgaactaacagctcgctgcccctgtaagggatgttgggaacaagatacaccgcaaattatttcctatgttgttggctcacattattgtattgaaactattcaagtgtgccactgagtcggtggtcccatcataaggcggaacatgaggatttttaaatccctttggaaagtgggaatttagtatattaggatgaaaaggttcgggttccttgtctgaattatacccgggcaattgtccatactctttttcttgataccttctaaacttgtcttctaattgaatgacacttcgttgtattgagtcattaattggttgattaacttgctcagatgctcgtggtgcattttggtttagtctttctcagagatttggtgtgttcctatttaattgctcacataagttagggcatcttcgattcaattatgctcgaaggtcaggtctatcacacacatcttgaaactgcttgtcctttgtcataaatgctccaccaatcaacttgacaaaatatttttctgattgatcaatctgcaagttgctgacgctttcttattcattgaaatattcatgatgaggatttcttttccctcacggtggatttatcgaggcttgttgagaagaatgagttacaaaaacgtgatctcctcgacaagatctcccaaatcttgttgtgaatcttcgcatgcctttccggtgatggtggacgaccaccgtgcgcgatggagcttaggtgagctcgagcggtggctgttgtggaggttacgagctgttgtgtgaggtttaaatttggttttatatctgtttgatctttttttattattattattttgtgtcatttgaatctgatctgaatattagagagagagagatagagagag

SEQ ID NO: 380378 - DNA, 10197 bp, Cannabis indica
atagtaagactccatggtgcttcgaagttgattgtttcaaatcgtgatcctaaattcattaccaaattctaggaaagtttacaaaaacctataggaaccaagttgagatttagtatgacttttcatcatcgaacagacagtcagtctgagataactactcagatactaaaagacatgatacgagcatgtgttattgatattgaagaatcttggggtatatttctatccttgattgaattttcatataataacagttatcagagaacaatcgatatggcaccatacgagatgttatacgataggaaatgttgatcacctatttactgtgatgagaccagttagagacattaccttagacctaaattggttcaaaggatcgatgaagccattgaaaagatttggtcccgtatgctcgcttcacaaagtggatagaaaagctatgttgatctgaagcgtagggacattgaattcaagtgggagacttgatgttactcagagtatcacctatgaaagggttgcatagacttgggaataaagggaagttgagtcctagatttatcggtcattttgagatactagagcaaataggccaggtcacctatcggttagctttaccacccccgtggtttggggtgcataatgtcttttatatctctatgttgagaaagtacgtgtcagattcgacacatattttgagttatgatgatattgagctccagacagacttatcttaggaggaacagcctgttcagattctagaccgaaaggagaaagtactccaaagtaaaatatccctttcgttaaagtactatggaggaacaataaagttgaggaataaacttaggaaatagagtcgcagatgtgggagctgtatcccgaattatttaggtaaattttaaggatgaaatttctattaggtgggaatggttgtaatatcccaataagcttaatggtgaattattagggtttaatatatattttgggataatcaggtaattagtgggattatgatcctactaatctatttcagcataaatcttaaattttgtcataagtgcataaataagcgtaatttattaattacagagatttatgtaacatgtgtgaatataatatgagatattttttttaaaaaaaatatttttaagtttggcaaccttccagactcgatcgagggccaaaaatatcattacatatttaattagtaactttaacaggaatatttaatagtatacttattaaggtaattagaagtacttgaaatttgacctaatacgctaaaagtagaaatttattagtagctaaaaaaataataaataacttttattaaagtttcattattattactatcataactattattattattaaattttaaacttatcagaatataaatacatatattaaaattctcttaaaaacaaagaacaaaaatgaacccatactcttttagtgcgacaaaaccctcaccccctctatccattctcttcgatttccaactaaaaacctagtgattcaagccccagtagtagctggatatttattcattgaagaaggagagcttaaggtaaggatcaatttcacttttaaatttaaaacattggttttatatgttgacattttattttgagtagttgtgggatttgtgacttcatgaaactatttttgggttgttatgggattagttttgatgtttacttgttgaattgaggtggttttgaggtagaaattgagtttaagtttttaaagctaaaatctcaagctttaatggaattttcatttaaagacttgtttttaaattttgttatgctaggactattgtatggatgttatatatgtgtcatgtgaagtttagaatgatttggataagttttggtggtatttttgagagtgcgaaacatgggacatacgtttcctgcggaaaatagtctgccatttgggggaaaacaactagccatttcttgtcaggaaacctatagaaaatggttagtcatttcctaaaacgacatgccatttctaatggcatttttgaaccccgtttgttgtattttcctggaattttaagtagggataccctagcgacctatagagaatctttggaaatgattttttggacatggaataaggttagattacttggttaatcgttcttttattgttatgacatagggcctgagatcgtcaatcattctccaaccaagtcggccaatatacctgaaccgaaacttgaggtaagaaaagtataatgtaccacataacatgataaatttcttgattatcgattgtgttattaggaaatggcaatgtaatacacaggctcacttgattaggtgatgcgatatattggttccaagttagtgcacaggctcgcatgattaggtgatgcgatacattggtgccagattatggaacaggctcaattgattgggtgatgcgatatattggtgcgaggttaggacacgagcttgtttgattaggcgatgcgatatatgggtgtcaggttatcgcacgaactcatttgattaggtgatgcggtgatgttatatatagtgtcacactacggcacaggcttgcctaattagaaaatgcaatgtacagttacttcttattttctatacatatgattttttatattatataatcgttggaatattattgttcaattattttatgatggtaaaatggataataaatcattacatttacttcctttattactttcttgttgagtctttttgattaacgggtgctctgtggtgtaggtaagggcaaggaaaagttagaacagccatgaggcgatggtcttctctggcgaatgttcatattgactctaccggcttgtgtgccgtgttgccaggagttgttttggactttatctgctgtgtattttgacttgttattgtatatagtcattttgtaaacttttataacaaggatccccgaaaaaaaaacttagtatcgttatgttgtttattacaaggattttattttagtgaagtttttataacagttgttaataattaattaatctattattactaaactagtttataaaatcacacatgtgacatacttatagattaatgcattacaatatatatttccaccgagatccataacatttatgtaaaagatataaatataaatatatatggatttttcttaattgtttactaatcacagtgctacttggctacatttagttgaagttttatatattgattggatatgctctaatttattatttgacttaaagaattatccaataaaatcaataatgtgatttgtgtttgtgtaaggaatttaccatcaatatagtattcaaaatatttttttttgaaaaatatgacaatttatagtgtcattttttgtgggattatgttggaaataaaaagaatattagagagaataatatataagaggctatattttataactcaatttgtgtgtttttttacttggtacaaaattgtggtattacatttctatttatagaaatccctggactattctagaaacattattaaatgaataggttctacacttttttacctaatttctactactaacacaagtaaaggagaattctagaaattttaagagtactcaaacaaactagtaaacacaagaatattctagaaagtttcgtaaatgtagaaatactctagaaactctagcaacaacaagaaaattctaaaaattaactatattaaatcaagtttaatatttcaacacctcccttaaacttgatttactccaagaatgcttcataatttgatgaatatttctctcttgagtgaactcataaaagtgtttgcggcttaattttgagatttgacatatttcactcttatttcttttccccaatgcattctcgaatgtaatgataatgggtgtcgatgtgcttagcttgttttgtgaaagactggattatttgctagtgcaagtgctgatttgctatcaacatgaatctcaatcggctcctcttgtggcacattcaaatcctttagcaagtttcttagccaaatatcatgacaaacacatgaagttgcaccaacatagtccgcttgacatgtttataggattgtttctttgacatccaagtaaagcttgtatttgtcatgaagaacacaaatccagtggtgctctttttatcatccaagtatccactcccatcgctatcactatatccaacaatctcataattgttaaaggatgaataaaatagcccataaatggtcgtaccattgatgtaccgaagtattctctttctattcttcaaatgagttattgttggagctttcatatagcgactaacgattccaagatcatagagaatatccgttcttgtacaagttaggtaccgcagacatccaacaaggcttttgaagaaagttggatctactttttctccttcatcatgctttgacaatttcactccacattctatttgtgtgctaattggattagaataatccatcttaaacttcttaagtacttcattagcataactttcttgagtggtgaaaattcatttgtcttcttgcaacacttcaatgccaaggtaatatgacatgagcctaatatctataatctcaaattcttttgccatatgtttcatgaactcttcaaacatactcgagctactaccaatgaagatcaagtcatcctcatacaagtatacaatcaaaatttcttaattttttatagagtgcatgctcatatggacacttggtaaaatccttgtctagaaattacttgttaatttgagtattctaagatctcgacacttgctttaggccatataaagccttcttaacttcagaacttttctttcgtgcccttttatttcatagcccaatgattgctagatgtagacttttttctcgaggaaacaatttaggaaagcagactttacatccagttggtggatcttccatctattttgggctgctaaaaaaattattaatctaatagtttcaagacaagcaactaaagcaaatatctcatcataatcgatgccttctctttgactgtagccttttccaatcttgcttcatatctctccacatatcatttagcattcttttttcttgtacacccactttactccaattgacttgtatccttgtggacatgtgttgttttttgtaattgaattaattatttcatccattgcatctctccagttcttgcttcccactgcttcttagtagtatagaggttcataatcaccaaatatacacataagagaaatgtcattttgatttttagttacctcataaagttcttgcgagcttctaaagcatggcgtctttccatttgagatttcacttgaatcttcttgtacgtttctagttggcgagaccagtggagtagtaggctcttgaagttcttcttccatcattggtttctctgtacatcttcctcttcaaattaggctagaaaatcgtactcgccttcttctgtgttcttattccaagaatcttctttacgaaactctatgtctcgactgatgatagtcttgtcggtaattgggttgtataacttatagcctttggatcttgaatcataccagatgaaggtgtacttttcacttttgtcatcaagcttggttatcttatgatcaggaacatgaacataagaaaaaatttcaaagactttgaggtgagaaattctatgttttcttccactccatgcttcttgaggtgtcttctcatgcacacttcttgttagagagggattctccaagtaaactacacaagctatcggttccgcccaaaactcatttgacattcttttgcttttgaacatgttgcgagccatgtcgagtatggttcgattctttctctctgccactccattttattagggggatcatcactgttaatgtaatgataacttagctttattatgtgatttagtagataataagggcttaatttaagaattagacttttaattattatttatgcaattatggagatatatttgaattctagattaattaaatatgataaatgtaaatttttatatttttgttatatttttatgcccagtaacagtggagtgcggcatttggcctatagagtcactcagacaaggtttaatatccttgttttagtggggcaatatttttaaatacttggaatgttaggagtatccggggttatgattttggaccatattgcccctacattataggttacttcttagtgaaacaaatagaaattagtaattttatcatagtttgttttttattagaagttgattttatagtaaatcttaagattaatttgttcagattaagttaaataaaagataagtatttcactattatctcttatctaaaaatcaaagagaaaaatcattcaaaaaaaaaatcaaggagaaaattaattctctctgttctctcttcacatttggacctaaagaacgctaatggggaaactaaatttttacaccaaaatcttgggtgttggcagcatggatttaagtagttagcacatgattaacttaaggtaagcatctccttccttttttctttgtaattcatattaaaacagttaggttttcatagtttttatgaatttagcttttatatgtttgggttgcatagaattgttttttaaggctgttttgaggttattaaaggtttttttaagtaggtttcgtttggttatgggtaagtttaagcttgatttgagttattgaactaaagcttagaccttccatggtggattttgttatagattcttgttgttcattttttcagctggtttatgattattatggcttaattaggtagtctagagagtttggtttgattgggggtaaaattgagttgatggtgaagttttttggattttcttacagagaaccgattaaccaattctcgcagtcctgtagaaccgattaaccatttcccaaggtagaaccctaggaactgattttccattttcggaatctgatttactggttctaacaattgtaggacactttgtgttttagcaatgttagggtattgccacgatatctatcgatagcgatacttttagttttaaaagtcccgaagaattcatttagagtatcacttatcagttttacgaatgttgtgacttaaaggcatgtaaatcgtcgagtaacaatttctactcaagttgaccagcacacaaaaattcagaatcaaggtaagattaatataataattacatatatgattacatgtttagtgtgtatatttatgaatgactgttagagaacatatcagtaatggcggtattagtgtacatagacttgagctaaataccgatgaatatatgtttggcaaagtactgattaatgctatcacattggtgaaactaatgtaccaagcatatgctgatattatgctcaataattctgttgcatgaacgttctagactcagtacgcgtaggacacgggatagagttataattgggtgtatgggcgcctaattataatccaatatatatttatgttatgattatgcttttcttactgagtgttgactcacagttattgtttatatatgtaggtaaagacaaagctaagactgaacaatacttagtacgagcagatgaagattgtacatattggggttgttagacctggagtgttcgatcttcaaagtagcaggttttatttagtagtcgttaggcgacaacttttatagttacatattttatattacaattgtaaattttaaagaccggatcctaaattatataaagcttttgtttatttaatttaaaagattaatcaagaaggttttaactatccacatttttccataaaccctcttattagcaaaggaatgcatagcattaagaaatcacgataacatgcctaatctagtgtggtgttacgatttggtatgagaggcattaggttgtcttttgtagattatcacgatatgtacaatcatcatcaaagataagcttgactcacggttcattaagcctttttacgctttagtagtttgttttgttagtaagttacatgttagtagcctaataacttaataggtacatttattattttatcatgtaaggggtaatttgaatttaatactgattgcaatctgacaagactagctcattgtttcctaggttgttttaatagaatggatgccaggccgaacatgagaagccaatgtaatttggttagatctagtggcgattagggagttcagttttccctaaatatttgtggctgagatagaggcccaagaggtagggcacgcggtcagggtgatgctaaccgaccacaggctacctaggattgggaaaataggtttgttaaaatacgtgccaggatcaatgaacaagatgatgaaatctagcgtataagacagcgggctgctcctgtaatgcctactcttgaggtgaaggttgctcctgcccttactatgcaagtggggccagttatcgttactaactgaatggaaccactttatgaaaggttttgtaagcaagcacctccattctttctgagaggtccggatgttatgaaagtcgagcaatggctaactattattatcgggattctgaattttataggagtcactggcaacaatagggttgcttgtgcaacgttctaattccatgaagatgctctggtctagtgggacatggtatccctcacctgagatgtcactagaataacgtgagaggaatttcaagagttattcaatgcgaagtactataatgagacagttcgtagtgccgagagaaaagagttcacgtagttgacttagaaaggaaatatgacagtcacggagcataccacattgtttaatagattagctaggttggctttgggaattgtgccaactcactttagtaagaaagagaagtatcaggatgggttgaatctcaagattaaacacgacctgataattacaacagaggataccactacttatgtagagatggtaggaattcactatgagctgagggtgcaattaagtgtatctaagagtcccgagggacttagattgttggtggagacactgctcctattgcctctagttatggtaggggtggtagtgactcaaccactaaatagaagagaaaattttcatctgtgaggttttaagggaaccaagatcgtggtaaccattagggtgggtttgaaagcccatacacttaccgagaatgccccaactgtaagaagcatcattttgaatgagtgtgtcgaggttgagaatgtttctagtgttgtataattagacattagaaaagagactgcccataggtaaagaaagaagagcagaagacagaggtgaagcccgctctagtaagggtgtttgctcttactaaggctaatgctgaacctagccattcagttgttataggttagctctcggtcaaaatttcttattactctcatttgtttaactttggggccactcattcttatatggcagcctaattaattaatagatttagtaggcaatatgataaagagtttggaatcttactgcttggtgcaaaattagttatctccaaaaggtgagttaggtctatgccgattaggattgaggatagagagttgagtgctgatctagtggaattggctttagtagattttaatattatacttggaatgaatttcttgtccaagtatactatttgtattgattgtaagcagaagacaacaaactttcaattcgagggtgaggaactatttctttttatgggatcagtctaggattcccaaatttcggtgatctcagtgttgaaagccaaagacttgttacaagaggggtgtctatggtttctggcagtggtgtttgataccactcaacctgatttagtttggcttgaagacatcaaagtggtttaagaattttaagatgtgtttctagaagaacttcttggactgccaccacaacgagaaatagattttgtaattgacttagcacccggagggacactagtttctaaggcaccatatagaatggctcctaccaaaaccaagtaattaaagatgcaacttcaggggatgcttgatttagagtttttgtggcccactgtgtcaccctggggagctccggtgttgtttgttaagaaggaggatggatcactttgcatgtgtattgactacagataattaaacaagttgacaatcaaaaataagtaccctctgtctaggatcgatgacttgttcgatca

SEQ ID NO: 380379 - DNA, 2626 bp, Cannabis indica
caatagtcatttcataacactctttactcacaccatactcattatattgaccattgtggataatatcaagctcctcaataaaaaaaactttcctaagaggaccacccatcaaatagcactgtacaatacaactaacttgaccaagctcatcattgttcccaaagtacctacctttgaatgcaacttgaatataattttttgtaattttatcgttgcccttcaaacactgttctacaagagtatttctctcctgcctaaacctcaaaatatttgactcaatatgacaatccagaccagtcacgaaagaaaactcctcaacactgaacctaattactttctgcataacattactcacttttgcgttccatgtggcatgtggccttttcgaaactttacattcatgtcctatgtggcctgagacctttttagaacacttgctttcatgtcctatgtggcctgagacctttttagaacacttgctttcatgtcttatgtggcctgaggccttttttagaatattactttattttcagctccagagccttcatgttcgtatctttagccataagtcctgtgtttttttaacactactagtatttggccttgttgcttttttatatcatggattgtgtgaatgtccaggcggtgtttaatcctagctttcttcttatggccttaacaagtaagagtctggatttacttttctaagctgaaatatgtctgcacgacttagagacaagtttagtagcttatactaagcgttaaaatttctctacataaattctttgtactagttcgatgcaaggtacaaaatgggtgccccccaagtgacaatgtagacaatttggtcacttgctattcatcaagtttcacaaactttgcatgggttctatcttgtggggtaccatagtacgcatgtaaaactaagagaataattttaaaaagttaatccgtggacaatggtcacacaataaacagaatataaatattattcagtaattggtctttgttgtgcaacttatataaattgaatctacaagcctatattatacaaatttagcttctagatatagctttatagaatctttatgctattagtaaatatgtgtgggttattactaccaagaaggacaacttttggttaaaattggttaacgatgtgtatcttaaaaaataagattactgggactactaattaagtccctttggagggtaattggtattggaaaagaatagttcaaaccaaggaaaagataaaacaagtcttgtcccaaaaagaatttagcaataattatcagtttctatagctaatatgtacgccaagatgcctcatgaaagtattgttagatggcgttatgatggcatttgggatagattttgcactcctaaacacaggatcataagttggctagccttgaagagccatttgtctacctcagacagacttagtcgatttaattataccaactctttcttgtgtttgttatgttgaagtggagtggagagtcattctcacctcttttataattgtatttacaacaatttgatggttcattaagtgtggttttggattggtatttttagttggaaaaaaaagttccatgaagtcctaattaagtggattcggaaggttacttttaaatgtattgctaatagtatttgtgctagaataaactctgtaaaagctaagaatttaattacaataaataaagagtgagtggaagctttaacaaaaactttgtatgtaccatcatcttataagtaaaaagattatgtatttccattttgaacaagtggcaattattgcatgtgtgcgtattcagtgacgtaggcttaagttattttgcatgtggggtccgtgagtgtacgtgaaaattttttatgtaaatatatatatatatatgtatatattcatgtgagagtaaaagcatatatggttaactttagtgttgtaaataatgccgagttttaatttttacacagacacataataatttagtaatggtaaaaaaaattataaaaaagtaaaatatgaattcgagtttgaatatgaaatgggttagtttttttaaaaaaaaatacagattaacactggcaaagtattacatgaatccgaatacggtacaactatattgggcttatagactttacatgcctacctttaaaaatattaacataacaccacataactcatattttacagtaacacagcaccaaaaaaatcatatttaagaagttacaaataaatatgagtgaaaacgcacgaatatataagcactagtactaataatcattataaataacagcattataaattttacaacagcattgctattaggcacccgtggtacctttagcctttcttattttacaaatacatttgtgtatatgtaatcaatgatgcaattaatgtaaatatatccacacgtaggattaaataaagaccacagaagtaatatcagatctagtcccacatcaaaatcctacaattatcatcatatatatctcccatatgaattagatctcaaaaattaccaaatactcttctctccccccaaaaaaaacttaaaaagctttccaatattcaaaaatggaacaagaacaactctacacagctctgatcggc

SEQ ID NO: 380380 - DNA, 1258 bp, Cannabis indica
cattattttataagtaatctcaaaactatttgtacacttgtgtttgaaaatcctcctgccaatgtatagtggcgaattggcatttagctgtaaaatgtaggcaacatttgcttaaccagtgtggtcaaattcattaatattagcacattttacttgagtggacgttaatctaagtgaggatttctttgttgctaacaaactcctccaacaacaaaatatataaataaataagaaagcactcttagaaatagtctaagtcattattttcaactctttcgggtcccaacagtaaacagttgtggccttccatctcttgttcaaactaagaaaacagactatacaatatagaacctcaagcactggtaggagggtactagtactggacagagtagataccagtaaatatagataccagtaaagtccaccttctttgtccatacttgtttgcactactagtcacctttcagagcatatttctattagggaaaaaaaaaaaagaacaaaaaactgtacaaacagagaagtcttgaagtatttgcttgagggcttgtgttattttcagacttggacccctatcctttcagcaacctgcaacagaaaatggtattgagaaaacttgtgccatagccactaaagatactcaacaacatgtcaacaaggaacaaagtgatacagaattgaacaagaagaggaaggacatggtgtaggagaattagtatgtatgactaggaggacaatgaatattcagagtttaactaagtcaatagtaatcgaaatttggaaacaaatcaatttctttgagaacttgtacatttagtgatccgcttaatgagagtcgaccattcattattctaaacttgactagccaaatgcgaaacttagtggagttctcaataaaacaaacttataattttcaatttagaataccagagaaattatctaacactaaatacatgccaccaactagctgtatctactctacaagttaccacagaagaaaacattacttacaggtgctataactgatacttgttgaatatctcctaattttaaagttcatcaaagattttacaaaggctaattagaatttttgctccccgaactttgacatacaccaaatcatgcccctcgaacttttaaagccgttaaaaatctcacctaaactattgaaattgttggatttaaagacttttgtccaattttagtaaaaaaagtctaacatagataaaagttccaaagacatgatttggtacatgtc

SEQ ID NO: 380381 - DNA, 1239 bp, Cannabis indica
tttttttttttttttgtgaagggtttttgtaccaatttgaacttgactatattggtactactgttgtatcttttaggaattaatgtcctgtgtttgtgtaatatagccagttgtaataggaaatgttgttgtgaatcactactgtatgaagtttttaatttctttcgttgctatattgttgtttgattattattatagttgttgaatattcttcttctctacatcgccaaacagtacacacatgttttttttacacaatagatgaatattgattgatttttgtagttcttaaaattgagtctatagagagagagagagagagaatcttcaagtgaggttgtcttaggggtatagcgcatgcatgggaccttaattctgggttgaatgctcaagagtacgcttaggtaggctgttacaatgtttgaaacttaattatgaaaacattattattattcttgttgatggcaaatatatcgattaaagaataaagattatgcatcattgcccgttagtttacgatttaattaggccatcttatacaggacttgtaaagatgataatttaagttttttattcgaacaatgtgtggaataatgctgttatattatctcgtagagatctcattcatttcacatacttcaatcgtttgcgatctcattcttgttagctcattcttgttaggttgtttatttatttattattattctttggataattacataaaatattattttttttgtaaaattttaatttttcttttttgataaatcagcagctgtatgctattacaaacaattataccactcgatatcttttggactaactttcttaggccatatgctcaatattctagtttttacatcattctttgctctatgtattgtaacttctatatttacattttcttcttaccaaattcttccatttctagctctccatatattgtacaacagagaagctagagctgaccttctttttgaatcgagacatcttcgctctttctattcattttgtcaccttctctaaagaaatagaggatgattgccagccgaaccaactcttcatctggtgaagacacatttggctaaaagaaaactgaaagaacaagtgttccatggtttccttctttgttgagaaagcacacaatcagtatcttcaattacattttaaagattttttttatatttttactatattttataaaaataacacgaaaaataataaaaaaaaattataaat

SEQ ID NO: 380382 - DNA, 4249 bp, Cannabis indica
acaaaaacaatcaaaaaacattaaaacataatgaaaagcatcggaattacatattttgtagatatgctgacaaaaactttatgcaatgactagtttgcacgtgtgatcgaattcaaaattgaaaagaccataagaagaaacttttatcacacaaagcgggctcttgatgggccaaggctccatatgagagccatgagcaatggaaaaaatttatatatagagccaggaacctcacaagcttgaaggggctgtactaggccatgcgcctctagcaactcaaggcagccgaaaaaaacattgattttcacttagcatattattggaacaaattttacctggctctctagcaccggaagtatgaccaagagaggaacaactgctatatcctgtaaatttcaagcagtacagagtaagaaacgttattgacatctaatagaattatgcccccctaccaaaatactgagtcattaagtcggctctctatgaatgtataagcgtatttaaatttcaagtgaagataataaccaaatgtagctgtataagtagagattatatagaacctgtaatagtagtattccaagagttgctgagccgaatcttgttggaagctcacctttctctgcaagtaactatagaaaatgcacataagctctatgaaatgagaagactaatcttttgggtttctgcttatttctaatttgaagacagtaaatagtaataattatttgttatctttgtaatgttgtttaaatgttttttttttcttgttttgctgatatatgtacatgtataagaattttttatttatataatcattaatatttctgttctatatatgtaaaaaaatagaggaagaaaaagaaaattcaactaatataagggaatcccattagcatatacaggacatgccacaattacctgcagaacaaaagctgatgaagacaaagaaagagcagcaccaatcacaatagcctcgtcaacacttcttatattgacctgccatggtaacattctaatcagagttccatagaaaatttggaagaaaaaatatcgttgtttacatattaccttttggagaatgaaattttcaatcaagtgaaaaaaatactatcccttgtctaatgatgaagacgagaaaatttaaacaagattaatgaaagtattatgcaaatctacttagtttactgaacaaatcagacattataaattcatgctataaactagagaagaaataggactatacaaaagcaattcgtaagtgaaagaaatgttgatgacttgccacaatgattaaagttgcatacagaagaaaattctcaccaaatcagacctcgagtggaaaaggaactccaggattcttgttccaatagcattgttaggaggaagttcaaacgccgtgaaagcaagagtagacaagatgaccttcaagaaggaaacaagaatggggaccatatggtcaaatgtccattcagcattcatagaggactagtccatatcatgtctgaaccagagaaaatggtccattaagactaaatatatgaccaaaccaagttcaataccataaatttcatagactaatattggtactgcacttgccacttataaacaaagaaatcatatattccccttggaataggaaccgcccagtttttaattcctcaaaagaacaatttgaataacaaggattacaaggtattatactgttgttttcagatttcagcattatacctgagtcaatcccaaaccgaaggcaaatttcgcaagagcttttagacgtgcaaatgaaagctccaaacccatctcaaacagctgaaacggaaaaataaataaagtaaaataaaattgagagtccaaagtaaataaggtgtgatttacacaatatattgcaataaatgattaaatggttaatatggtctctactcaaactacactaaacaaatgatcctagatataattctttgttgatttaaagcattgatcctcaaaattctatactacatttcatttctcttcactagtctccatatgacctttgcaaattttgatatgattgaactaataaagtaccaagtaaaattgtcattcacagtatagcctgcatcaaaaatataatgaagaaaagaaaataaaagatgaaagagttgtttcgaggaacaatattcttagcataatttactaacactataattcatttaaataatctaccttcaaatttatgaatggaaattccagcattgtttcaaaattaagtttaaaactcgaaatgagaccaactctgaagttggaatacattcatagtacacaccttttgaatgagtaaaggatttatgagaacatcaagaacattgacaagacagttcccaaaccagaggaagtggaaaagaaaatgctatttcttagtaatatgtgagaaggcttaccaagaaaagaattccccattcagacagtactttgacatctgttagatttctaatcaagccaaattgattgagtataacaccggcgaagaaaaaaccaagaatctgaccaaaatatcaaataagcttgttggcatgaattcaaattctacaaaagataactaaatgtgtgaatagaggtatcaaggataaaaattaatactaaggattgtgaaaacattgttattcttacagggctagctttaatgatcttgaatgcaggaacaacaatgacagtcacagctaaaaatgtcaaagtatccaatcctagatcattaatgacatcaacagcagcggcaacatcaatagttgcataaatatgtgatttcactctacgagctgatcttttgtttgctacatataatcctcctagatcacataacaaagaggaccgcaaaggagttcgctcaaagaagtttcttgagacattagagctataacttgtgctataattgatggcaaatggtaacaaacagctttgtggattactagaacatataacattaggccgatgtccacttgatcgtgaagcatcatgggagcaggatgtccataaggggcgatgtttcttggtaacctcacatccctgcaaagtacacaattagcattaccatgacaagtttttcaccaagatttccataatgacacacgcatttacacacgactacacacgttttattaataggtaattgtagacttttgctataattggtgaactgccttatgagttatgataaatatcaacaacctcagacagcatctcatgtttttcatgaaaattagtgaagtcattaccaacaaactaacaataacaataacaccagcaactcaaagtatttgtattaatatagaccacaagggatgaagaagcaatgacactaagaccaaaacaatccattacttttcaatgtgttaaactactagagttagagttttctcccatctcaatgatacaaattattaaacaacaatgggccaaacaaattctagtctgaaaatttttactcaatagttatcaattatggcattcagaaatgaggtgaaaagcaaaagaggcacaagaaattttccagtcattgacaagccaatctatacattgatgatcaagtaaagtcacttcacaaatgaataaagtagaatgaataatcaaactgtgagataatttccataatgagagtgcatatttcatttcaataaccaactatcaacttgggcacattctacaaagcctcctgggaagcaaaaataagttctttggttccaaattatgacatggtttgccataattatgctgacacagttaccaattagcatcaactgatttaccactaaaggcatattaattatagcaactctatccaatccatgctatctaaaatagatgagtaaaacaaattctcttctcataaacacaacaaaaatttaaatcaaatgaaaaaccataccttagaagctttgaaatatgttgtagaagttgaagaacccaacataatgctatgatgagtgatgaaacaagaacaacccattaaagaaacagaaaagcattctctgttttgcaattataagatatgggttttgcagataatcaccaaaaaatgaagggtttttgaatttggaaatgttcttccttcccccaatgttcttgggggactttaatcaaatattgtttaagctataacaacaacacaaaaaaaaaatagtaaaacaattagaacaagtaacaaaaggtgaggagtataactgaacacgtttaagctctgtttgttaagaactttgagagagagagagagaga

SEQ ID NO: 380383 - DNA, 2549 bp, Cannabis indica
aaaaaaaaaaaaactattttagtaagattactgaagaactaaatgagtggtacaaataaaatttgaataacaaattaagaaggaaatacatgagatattcatctatttacttagtaaatgaataaaattgtgcagctatacaaacaaaatttgactcaaaacaagaacattaatcaaattaataaacctcacatttaggagaattattattagcaatccaaactccattatctgcagaacccacaaatcgaacatccaaatgctcacaaaacaccttcatatacgcatgtctagtccaccaagaactcgacttgaacgtagcaaacacagccaatctcacgttcaaactcaacaacccatgctctctttcccgccgcatctcatccaccacccaccctccaatcaaatcctccttattctccttgctcaccactctcaacctcattgtgccacgtgtctccgtctccaagaatatcgggtcaacctccgaagacgacaacgacctctccctgaagaaaacgtaacccttgatttcatggaagttgattttcagctttttgtttgggttctctaccgtcaagttggcctgtattgtggccgagaaattagtcttcgataagttgaggtcgttcacctcaagtctgtccacgtggaaggtggggatttgaggacgtaggatgatccatgttatgatggtggagacgcaaatcaggagaattataagtattaatgtgacgaaaaagcccttgatgaaagaggaggagccgccgctgttggtgttggcggcgtaagggtatgtttggttggtgtaataatggggtggcggaggttgagtgtagggattatatggatggtggtggtagccattattgttggaataggattgggggtaccccatcaccggagggtacccgggtacaaccgaagccggtggttgatgttgatcggacggtggtggtggtgctggtgggtttgtctgggctgctgcggtggaacggaccacgtgtcgttcatcttctttatcagaatcattatcagatgaagacgatgatgacgatgaatgacgaggcatattggtttcaaagttttctctctcaatcggtagagaccaaaagagagagaaaatttgagatttgatttggattattattattagaatatttggaaaaaagaaaacaaaatatagtgttattattttggatttaataggagaggcaatatagccttattattaggtgcttaattagctaggactaaaaaggaattaatcaaaacgcgtaatgcggattgttttgttacagtccaattatcctaatgatgatgattattgcccttatttgttatatatggttatataaatttagtctatattttgttgttatcacataataacggtgtttactaggaagtctttgtagatttttagtgttgtttgtttcaatctattttgggattaagctacaaaaagtaaaacaaatatattgccaacctcctacgaatagttaacatatctattggagactttgaagtcaaggaaatattttccaaaaagaaagaaaggagatttttagatattgtggtttgaaattgaatcaaatcgtccctattatttcatgttggctaggattttaagatgactattagcattgatgaaaaacaatatttattagttgttatcatgattataaatttttttatatattaaaaaatttaaatataatattagctccctaataaggagccaaattttatgtaaatatgtcttgattcatgccccaaccacttatatgtgacaactcaattaaaatgtcatatgttgcatttaatacacttttttattgagattaaagggcattagtggtgtcatgcgtccatatcgctattggtcaattaagtatcgggtcttatatagttttgttaccttaaattttttccaaaatacgtggcagcggccgagggtgacacgtggacctaaaaaaggatccactcacgaaaatcaattaagtgcatctcatggagtgagcctcccggaggaagagcataagacacgcctttactctccgagaggctagaactataacaaggcgtctccgggaaggaaagagattgttcgaacagtcactccgcatttaatgccgcatggagaaaaacgtatcaaaacctccataaaaagatgtgacacatggcgtaagctcctttttacggcgatgacacaacaatcgacgagtctagtgacaactacattatgaggaatcacatcaatcaagggaggataaaagattatatccacctaaccctaagatacctgcgatataggtcatgtatttcctattttgtatctgctaggaatttgtgcccctaagaggctaacacaaaaggacaagtgatccctttctagggatcccccgaaaaacactataataccccatagacagaattgaaaaggggtcgatcgattaattaaggaatcgaagagagtaaagaagaaagagagattcaccaagaacattctctgtaaaaatactctcataaataacaaagactcgtgg

SEQ ID NO: 380384 - DNA, 2332 bp, Cannabis indica
aagatgaaatcccctactcaaatataccaatcaatatatgatagtattgggcattagtggttgttaacttggttaggcacacgaacacattttgtgacatacttttgacactttattagataataaattgaaattattaattcgaactataaaaataatatattttagtgatgattgaaaaagtagcccaataatacatgtaatagataatattgttaatgaattgatgagttattatgtttgttggacaagtgaagcattggatatgacctgctgcaccagttttgtttttcgtatggtattttccatgtattattggataaggtttatttgggttgtaatggaaaatgctactttattttagtatcattctcatatttttggtaatttattataactataattgttatattatttatattaaataagtgacaaataacatacatgtttataaatgttgaatgatgatctaaaagaagttataaatcatttacattgatgctcataaaaagttgtaactcgtctcccactacaataaatttaagttttagagacgaaaaatttagaggcggcataaagtcgattctaataataagggtattaggagtgataatacaatatcgcccctaaaagaatttgattatttttttttaatttgtacatagttaagtcgcttctaaaaattttagggacaatcttttaattaatagaggcgacattgtcacccctaataaaattaaaatttaaacgttgtgctttggcaggattttcccgctaataaaattaggtgttgcccctaaaagtgtgatctaacaagagatgtttattaggggcgacttttcgaggcgagaaagtcacccccctaaaagtctgctataattataaaaccctactatcccctttgacctacattcttctcctctttccttctttctttgtttcaaccatctatttcacaccaagaaaaaaaattgaagaaccacgaccgacggccccccattctaatcggtcgtcatccaaccccactcacaattgtcccatccccaccggccgagccccatccccatcctctgtcgtcctctttattttttacaccccaaccccctttccggtgtttatacaacctctccatcctgatctcattttcagacactgttcctctccaccccctctaaaatttacaagaacgtgtcttcttttagtgagatttatatatttaaaaaataatttgtgtattttttttttaaaaaaaaatcttatttgttttgtattttaactatagaatattatttggtttaaattttgaacaacataaatgtatttttttttctttttgtagaataattatttttgtgttatatatattgaaatttgttttgaaataaaagtgcatagataaaaaattaaacttcacgctcattacaaaagatgtaagccgggatagaagaaacaagcaaacaaccataccgcttgtgggtacaggcctactttaccacattatggactacaaaattacaagttctactaacataagtaaaattacaactaacaaaataaagagagtgtctattacaaaaaaaagaaaactagttcacaagctcccaatgagaatcctttccattgagcgtattgataaccacccttgaatcaccctccacaataataaagttgcaaccttttcctttagccacttccaaagccaagcagcaggcagacgcttcctcgcacagagcatcagaaaactccaaccttgccgcatgcacccaagtcacctcaccatggaggtttctagtcacaactagaatacacatactttctatccctactttaatattacagtttagcttaaactaatcttggggggtggccgccaactatccaacaagattggagtaggagtaaggaatagagaagctttataatctgtattagagtaatgaatagagtcaatgtaatgtttcacattatttagaatattattgtgtaccttgtcattccgaacctgccatataatatcgactgttggttttatggtattaaatcaggtacacaacgaaaaaagtcgtattatttgattatcattgtaccatatcccaatagaactccaaatatgtgtacattaaatcaaaataataaaatagtaagtttagagtatatctctcgaagcctatgagggtatcctcgaaacttctcgcaaattgtatcattaacccagttgataagaaaattacaattggactcacactagtgtcttccaaatcgattcactacatacaaaaaatagtgtgggctattaggataaaatgtataatgatgttcttgttgagttctc

SEQ ID NO: 380385 - DNA, 1244 bp, Cannabis indica
ggtaaatatcttagttaaatactaacatgaacgactgatatttatactcttatacatgtagcacatttatattaatacacttaaatataattgtttaataattataaaaattatttcaaaattcatttaaattttttaaaatagttataaaattcatattcttcttttttttttttaaaaaaaaatataattacaataaaaagagaaaacctaaaaatcaacaatcttatttattattttttttaaataaaactattgtcgacatttcctgcaattgtttctccaaaccattctctaaaatcagcaaagatattggatttgatgctgatgatggaccggttccagcaagctgttgaaaagtgcagcttactaaaacatggaggattgtttcgacctcagtatgacagaaaggacatagtagatcgacatcgatgtgtttcgtttgcagctgcactttagtgggaagacaccttgtgattgccctccacccaaaatgaagaactttagatggaactttggctttccaaaacattttctagaactccccactcgcttgaatatctccacttgactgttgaaggaaacgacatgcactcttaacagggtatatgccaaaggtttctaacatccaactccaacaatcttcacgatttgattgactaagagggatccccataataagagatcgatccttttcgccaaacaaatcttctaagatctcagcatcccatttaaactcgtcaatgcacgtgagactagccactttgttgtcccttaacccagggtgagaagagtttacaaatgggttatgtagatcatgaagccaagggtcagtagcgatgtccgtttttaagtcattaccaatatgaattatagcccttgccttaataagtgccttagcttcaaacagactttttcatatgaaactagggttatttccatatgagaagctgagaaaaaagagccatgagggaaatatctagctttataaacttttgagactattgatgactcattcagtaacaatctccaagcttgtttaccaggaattgctaaattatagtctcttaagtctctaaagcccaaaccacaaacatttttgtgtttccaaagcttcatccaactagcccaactaacgccttgcttttgcttggaagatttccaccaaaatttgcctcataatgccctcaagaccacgaaaaagtctccattggcagcaaaaaaactgacatagcaaagcttgg

SEQ ID NO: 380386 - DNA, 1828 bp, Cannabis indica
cacgcgcgtagctcagccacgtgccgccgccgccgcctcatccgtcggcctgcatcaaagacctgctcttccgccgtatacggttccctcgccgtacaatcgcgttccggcgggtacgttgccgtcggcacatgggcggaagcgtgctctgatatgcggcgtttcgtataagaacacgaagcaagagcttaaggggtgtattaacgatgctaagtgcatgaagtatttgctgatcaacaagttcagcttccctgagtcctcgattgtcatgcttactggtataaagatagaaaaaatttctctgatttcttttattctaaagttatttttatttattgctgttgattatgtataacttgaccattgatgaagttgaaaactcatggaacttattttgctactgtaatgatatggttaaattttaattatatcatattttaccaattatttatctctatatcaattccacaaaatttagaaaacaaatttggtgtgataggaagagttcaaagtggcttagtttgtaaattttacactttcatgttagtttggcgaatttctggtattgatattggcctgttgttgcaagtaattttgtagaagaagaaactgatccgtacaaacgtccaaccaaacagaacatgagaatggccctgtattggcttgtgaaaggttgtcaaccaggagactctttggtattccatttctctggtcatggatcccaacagaaggactacaacggagatgagatcgacggttatgatgagacgctttgtcccatggattatgcatctcaagggatgatagttgatgatgaaatcaatgccacaattgtcaagcctcttcctgctggtgtcaagcttcatgccattatagacgcttgtcatagtggaactgtgcttgatttgccctttctatgtagaatggacaggtttgtgggatggtttagcttgtgaagtcttagatagattgtgcacatttctcctacagagctactcaactttttgtttttgcttatacttcattctgatctgtaaatgtagaagtgggaagtatgcttgggaggatcatcggcctagaacaggtgtttggaagggaacgaacggcggggaagtcatttccttcagtggctgtgatgataatcaaacctcagctgatacctcagtaagttagaagttaggacatttttcatgtctattcatctaaagaatgaaagaaaaggctttcttttcttttggtttaagttggaaaaagacacaaaagccttattgttcttcttatttatgtgcacaggctatgtccaagattacctcaactggtgccatgacttattctttcatccaagccatcgagcgtggacatgcaactacgtatgggaatatgctaaactcaatgcgatctacaattagaaacacagctaatgatcttgggggtggtattgtgacatccctactcaccatgctcttatctgggggaagcctttcaggcggaatgagacaggtactaccttagttatttcatcattttagttgaattgagagctataattgactaactaaaagaagacaatatgtctctaatgataatcctgaatttgaattggttttattgttttatgttgcaggagccgcagttgactgccaatgtacctttcgacgtgtattcaaagactttctctatttagtagtcacagtcaaagtaaaatatctctgttctttaatcattacaattgtcttggttaaaatttcacacactaaattctttgagtttatgtacagttctggagaaaactcaattcattgaaatcatgtagttgtatattaaattt

SEQ ID NO: 380387 - DNA, 3482 bp, Cannabis indica
tttggtgaggatgtcaacagtttgttcttttgtgggtacataacagatttcaaactctttattttcactgtctttgatgaagtgaacgtccatttcattgtacttgcttctcgcatggaatacattattgctagctagttgttcagcccttgcattgtcacactacaatgtagtgtattttgaattttttccctgagttcaatataacttcaaccaagctaaacatagttggcaatatgccaatgcgtacctttgtgcttgactgtgcaatgactttttgattctttgaccttgaagagattaagtttccaccaacatatatagatccaattgttgatttttttatcatctagagaaccatcccaatttgaataacaattagcctcaacttttagttatttgttggtgtaaacactagcccatgtccaataattccctttacgtgttttgtatttatttgcgagctgaccaatagttttcagttggagcatgattaaattgactcaatatgtttcactacaaatgctctggcaaaatagctaagggcgtgtttgtaaaatcattgtgtaactataattgagtaattcagagttattacaagatttaatgtgtttgttcaactatataattataaagtaaccgtgtaatttaaagtaactgaaggatctcaattacacttttcaattcttatgatccccatgaaaattgtgagtaattacacaaaattaccatttttatataattaatattattaaaatgtgtaatactaactcatttaccaaacatgaaaataaggattcatatacaattattacttgacatctaaacacacttgtattttaaaataaagtgtaagtgctctcatgtataattactaccttaataattacactacctaataattacacaattgcttccaaacgcacttaggtggtgtttggttggaggtaatgaaatagaatgaaataaagtttcattttattcttttgtttggttgtattttaaagtattgaaatgccattctactagaatgatttttccactattttggtggaatgaccattccattttgaaattgaaggaaaaactattttaatataagatgagaaaacatttaagaattattttttatgcattttaaatttgcttctattcttattcctattctcattctcactctttttcttatgttttcattcctttcaaccaaacgccaccaagtgtcaaatatttcactcccttcaaatgtgcgaataatgtaagattctcaaatggattgctatcttaatggcatcattttgaccttagtacagttgtgtggctgaagattatcaattcaccatgttactcctctcgagtaaatcaagtttatatttggtttgagagagatgaagacatcgatgcacactcactatcttaaagccaagaaagtaagtaatagaactgagagactcgggagcatatttttctgactaagttttttgatagtcctatcgagaggatgctgtcaacatatatgaggaggtagagaacaaaacgggaagtattagctagagaatttacaaaaccaagggtgagtaaggtgtgtcattaagtagcaaactaggtgtgaggaatctgttttaggccatagagagcacaattcaacttgcaaggaacactcaaattagaagagtcaatgtatccttctgatcgacacatgtaagaagagtgccattgaggaaggcgttattgatgctgacttgttggataacccaattgttgcaacaacaagagtgaaaatcagtcgaatggtaaaaggctcaatgacagaactaaatgtttcaaaaaaaatcaattccatgagcttgttgaaatcatttcgcaacaagttgagctttgtaccaatgtatgaaaccatcatagctttaatccacttgttgggaacaatattcatcgcatcacttgggacacaaatgtccaaatgtttttgttttattttatgagagaatgatattcatcatctgttgctttccttttgggaatgatcaaggcttgagtagcgaaatgaggttcaacttcctctattatgattgatgagttgacaacaagtgtatactttgggtataaagataccaattttggatttagttatcatgggatgtatggatgtagtgcagatgagttgatgagtgggggcagggagatcaacatgaagcggtgtcgtggccgggaaatcagaagaaaaattgttttaaaaaggaggaaaagaactttgatgtcctatttcagagaaataagcaactcacaaactttgactaaaggctacgtacgtgataagcgcaagtgaattatctccattcaatccaaagagagggatttagttatagagaaggaaatgggggtgagaacgtaccggtttcttgaggatgagaattatttgaatgaagtactacctcatgggacattgaattgtgagttggagtggtgaaatcaatacctgaattatcaacaaatatgggacaacaaactaggatggagcattagtgggagtagaagacagagagccagaacaagtgagaaaggaccttgtggagaaaggaaagacactttcatggaaggtgacatactctaccaaaagaatgaagacataaataacccttgtggttagggctacctaataatgcacatgaaacaaacctgaagtcaagcttgatttgatgtttaatatatgaagaaaacacagagccaagcactcttataattaatatagtttggaatgaaattgaacatggcttaacatggagatttgttgaatagaacaagagtggaaaggaggttgatgagatggaaacagtggaaaagaaagaagttgacatatgtacctgagactagagagtaagcccaattgaacctagtatagtgaccgttaccaataatgagacttgttacctttgtaatctagtttttgggaaatggaggaaccatcgttaatggcatagggtgaggtgccattgtccaagtaccaagcatgtcatgactgggtttgggagaggcaataatagcttgtttagtggagttggtgggagcttgaacactatcacgggacaagtggacatagatgatggtgtaggagcatagccttggaaggacaaattaaagtgatgatagcatttgaaatgctacatgtcctgggcgactacacaactgatattatggttgatgtgaggagtgacgacaaccgtgagatgaggtgttagaacacctagagtcagaagatccttgttgcggatacaaacgacaagcattgatagccatgtttgcaaggggttgctaagctcagaagtgggagcattaagctggtcaaggcaaagctcctggaagcattgatattcatgatcaaggtctgcatggttatacgacaataactcttcaccaaaatatactgaatgttgtgcttagccttgtttagaatgtggaagtgtggtggagaaagtagaata

SEQ ID NO: 380388 - DNA, 3242 bp, Cannabis indica
gaatatctattaataaatgaatgtggaaaagtttatagaagcttatatgatagggagcgtaaaggcaattactgaagtgaattatggtataaaattttagttagaattattattacaaggaatatcaattaatctttttatctgctcccaaccctcaccccttaaacaaaacaaaaacaaagcaagtctttctataatctgttttttcattttaatctacttgctttgttgcatttgtacctttgtcaagtactgagctactttcttgtggccatcaggtagagccaggagcttgtgatcaaagttttggtattcatgttgccgaatttgcaaattttcctgagactgtagtggcacttgctagagaaaaggcttctgaattggaagacttctcacccacttcagttgtttcaaatggttctacacttgaggtaccgtctatggagctatttgcaacattgctataatgaccaacgtatttttaacctcgcattagtatttgccaattcttaacatagatagtcaccatattcccgttcaaagaactaataaatgaagaaaggctgataaactccaaatgaatttgcaattttcacttacgattaatcatatcactcatatcttagattacaaattcaatattctcttggtacattgttggaagatcacttgctcataagtaggtggtgaatcaacactagtatgttacttttccttcatacaaaaatgggggtgcataattgtctttctgtacctgtacatgattggtagacataaaataagatagctttaactggagtaaatttttactataaatctgaattcaaacacatactaattctatataggaaggtaataatcttctcccatctgatgctttgtaactttcaaagaaaaagttaacaaacaagccttccattaagatcttgtaaaacaaagctctattttacattagctacattgttgctctacatctgtagatgcttcaaaatattttttttatcgagtttttattaatttttctcttctttactttttaaacaaaattatatgaactaaataaagatattaaaagcaatataatattgaaatgaaagttaaaaaaatatggagaatgatgcacacatagtcacctccctataagctcaaatcagaaatagccaagccatagagtagaagttgaaaatttggtattattgatgaatgaaagacaattacaaaatctctttcctagcttttcgagacagtcaggtaaacacttcctttgactagggttgccacatcagcagttatatgtacacagtttttttatgtttttatttcttctagaatacaatttaagtggcagtggtggtggtgtaacagagaacctgatttatggtatattttatagagaaaacgtagttttggacctttggtaatgtgttttgaaggacagagtaagtaattggtgtgtgtgcaatatgatttataggtgggatcaaagcgcaagagagagtgtgattccgatgatgtctctcaaggtgctgctcgtgctcaccagtttctgaaggaattctatgatttgccaatggagaaaatgaatgtaaggcaggttttagagaaaatcagcaagatgaaagatgacttgaaaaaggatgcggtgaactctaaatggctccaacagctaatctagatgtgatcttgaattatatgtaaacctgtggtcttgaagcataggtagccattattctctgattttgacctttttgtaaagcttatcctgtaaatgagtcatttccatggaagtgcatccagtctctaccccagttttgtggctatatggagtcccagttgaaacatgagactgcagcctactttagctgactggatttcttactttagaaagctagctagttaaatgtgctgaggctgacactatagcctatgtctttcttcttctttgtcttcttatatgaaaaagggagcttccggggagagtttaatgtgcccattatggctatggtttttcgtggaagtaaattatacttttcctaagagtattagtgataattgtgtccttttacttgtgttatttcctcttctaaacctatcattcttatcttgttgactgaaagttattttaagtcaggattattatagtgtgattcagctttcttattatatcataggatcaaaatgtttaatattatctctttattacaagttttcaagtgtcaattattaacaacaaacttcgaaatgttgaacaaacagaaggaattcttttaggtagtaatagaaagctgatacaactaatatggtagaactcactctagtttaagagaaaagggtggtatatactgttattccatacttcaatgtgggatcctaacaatacactcctcttttagagccggtgtctatggcggctcatactatagtggcctactatggacccaatacataggtcgcccttttctcaagttgcctttaatatagatagctccttttgcgatgtcaatctcacttaatggtgcatgacactgatactacttgatgttaggagtgttggaattttatgcttcaaataaaatatattctaatataattagatttactaattaataaaagatcaaaaaacattttatattgcatgatttacatgattatatgtttaatatatagattctattaaatcctaaacatatagttattcacgattatagtgttgtctacactttggaatataatgattatatgcttcaaaatatttagttacactatttatcaaagtactggatttacactgacgtgataatcaacgatgtggtttacttacacttgtataagtggaatgttctttctaaggcgttagtaaaataaactagtattggatgtatcagttatacatcgagctggaccaatattgaagtagaaaagatatcataaacttactgttatgtcttttctgagttaatgtcacttagttgatcttaggtcaattgatctcaatcttgagataattaagttctagcttaattgtactatacaggttctttgacttgttcgttatcagcttacctataggactagctgttgggttttgtgccctaaataaaacccatttcaatataatcagatttactaattaataaagatcaaaaatcattttatgttgcatggttcacatgatttatttcatgattgtatttaatgtataaattctattaaattcataacatatgtatttgttcgtgatt

SEQ ID NO: 380389 - DNA, 1813 bp, Cannabis indica
cttagcctcctttctttccagatcatagagcataaagcttctttattgtcctggtacaaaaagaatttgatgggccttctcgaaatacttaagaggcattatagatgtaaaatgacccagtcacatttgatggtaccactgtacatagcttagtccaggactctttaaccccgtattccttcataacccagaactcaacatactgtgctttctcactatgtcccccgtatttcactacctcacaaagccagccacccagttctgtgatagtcgagtaataggctttgcccttagtatctgtgtcagcacgtggaatttgcctgtatttttcagtgactagatcaaacgcaaggataacggtggaaattttagtaccaagctgtagccccaacaaccaatggaaagaactccccactagaaggcttttcccacaatgcttacccaagtaaggaaaatcagcaacccttttccaagtgttagtgtttaggctataaacattcacctccgaacgcaatgacctaacagggttatttccacagtaatgtaacattcttaaaaatttatggtcgtcgttcacagggtcgtacccaaaaccagctataccaatatcataaaaaatactgccaggaagctgattaagatcagacatgggtacctttctacactgtttggtggctgggttccaaataaccgtgtcataacgcggaccagtctccataaggactaccagtccattacagaaacccaaaatctcgaccccgtgcccggtgaatattgggggatcaactcgtacggaagactccagagcgctgagttcgcggtcgagttcgacagagtgaaactcatgacccgtattgaggataacacagaggtttgagctggtttccatggagtgactgaggtgcctcttgacgaaagaacggctttggattaggccgcaccacccctttgagacgcacttgtagcggagcaaatcttcaaccggtagtcggagtaggatgtcgacgatcgtgccccatggtaggttggccattgctgttactgctgtactgagaattagggtaacgcaagggtttcgtctctctctcagctctctcgatactttgtttttgctttttgcatgaatgaagatggtgcctctctatagcctgtagtgtactatattatatattttacacatgctgtttgtgattccaaaattgcccttcttgtaacgacaaaatacttgaaaaggcgagggtattttcgtcacttcagggacacctggattttgattcttgtctgtgccggtatattactcccattggataaacattgttttactggctcgtgtcttagctagaaatatcgcaaagtaattaggtgtgtgctgtgcggaagttctttcaaaaaaaaaaattaggtgtgagtgagcggtgcaactctaaccatatttttcatgttttttaataacttaattaacatttttggtcctgaattttcatacatattaaattatgtcttttgattttttttaattaattttcttgaattattgaaatattattaaattaaaatttttttatctaattttattcaattttacaaattcggtgattgtccatgaactaaattatactcctcgaatttgatataccaaatcatatccttcgaactttgatatgtgacaaattatgtctcctacatttttatccatgttagactttttttattaaaactagacaaaaatctttaaattcaacaatctcaatagttcatggagaatttctcacggtctttaaaattcaagggacataattagtacatgtcaaag

SEQ ID NO: 380390 - DNA, 1229 bp, Cannabis indica
attttattagatacaaatagtcatatatagtaggattatttacataaataacacaaaaacaataacaaattacaaaatacagttgtacaaaattttaatatttttacgaaatttatgattttatttacagaaatacggtcttttaatgtattttatattgtacttcttgttaattaatttgtaattgattttttgttattttttgttgctgtttagatattattttcctattaaatttcttattgttttcgtgttgttttatagaacactataaaaatatagaaaaataaatatttgaatgtaaaatataaaaaattacaaaaagtaatgttttatgtaattatccatacagaatatatatatatatatattaagtatttattataaacgatccggtctgatgtagtcgttaactatttattacgaattacaatcaaatcattacgaggtgaacaatctaaattaaccaaaccacccaaaacagtcttgtcaattacgggctacaacagttcggattgtcgtagtttgacggtttatataaataacattaatgacccaaggctgaccctaggtatagacgggctaagcacgcgcttaaagttcactcattttagggacccaaataaaacaatattttttaaaaaatacatattttttaataatttttaaaaatatcatttatctttatagtaactatagtaagaggacctaattttttttattttttttatgacctatttcaactaaagactgaccacatatattatctttcagaacttgttttactgataaatataataaattctgcttcaaaaaataacataatttgtaattactaatgttgattaccattcattctttatcgaagttgtaatttataaattgctttataaaagttgtaatttaaattaaggaaatttagtgggaataccataccattatatagtttactttaatggaatggatgagagtgagacttgagctcagcttactttagtgaaagtggtaccaaaagaagaaaacattattaaacacgtgggaaactaagtgaaaagaaataagaaaattacttatataacttttatgtataaataagtgaaaattacatgaaatatgagatttcataacaaagttagaaaaatatggcatttttaggtttgccactcttctatggcattttttcacatttaagattttttatggtatttgatatgccatatttttataaa

SEQ ID NO: 380391 - DNA, 4033 bp, Cannabis indica
attataagaatttttaacatattgtgttttctttacctagtctctttatacttatgtgtttgtgccttcaagcttaagcctattatttttcgtgacatgccttgccaatttgtgcccaaattcataatttttcatgtccaattatgctcatgcctcctctcaaactcgtgccattcaaaaaccgtagcctgtatttacagctcccgtgcgtacaatcacatgcaacggaataattttgaagggcacagagtagaattaacgaaatacattatatatatatatataagtacaactgatattgaccctaatatatccaatggcatacatatgaatttaaaataaaataactactcatgccattggattaaacatcttcaggttgagaaagaagagggggggagaacaaggaagaaaaccgaagagcaagaaagaaacaaaaccttaatttacattacatgaaagacaacgtacgtcctcatctagaaaaaacaactcccaaccagacagtccaatacaatatgaaactgtagaagcaacagtgatagtctcaacaaataaaaccgccattgagtgatccgagatgaggcagctgaaggtttggagggagctcgtccagcaacggctggagcaactgcaatgtcaccagggttgctctgctgttcatttgtcggtaatggatttgctggtgtcccctttgggggaggtgtaagattcatgcccttggcatcactgagatcttgacctgaaagtgcaagttggtggattatattaggtggattaagaaaaaaaaaaaaaaaaacgttgcatttctgattgttaacatctgtatctcgactaattagtcaagctcattaaccgaattttatcaaactaatgatcacgaggactggcatacttatactgattgtaatttagctgaagccatcacatgtacatatgcaaccagcttctaagccacactactagtgactgtctagaaacacaaaacatatgcatctgaaactcggaaaactcacaatttgatcttgaccagcctaactttaaagcttccctatcaaacaccattcggtatcccgtcatgaagttctctgcacaaggaaatcactcaaatacaataaaaataataaacagcagggaatataaactgttgaaaaattcattgttggatgcttacgtccgagtattccaatctcatctccctgttgtatggctaaacaaaatccaataactccctgtagcacagagaataggtacaaatatattttcattaatatctgaaaatccaatactaaacatatcaagcaagagatattatacaattttacttgtaatatgctttaaaagtcagtaaagctaataatttagatgtaactttactaacccaatgtttcagatagtagatttaaatacagaattattttagccaaccatttaacaggtttatacatcagacaaacatataataccaaataggccttacttctgcaatattttcaaaattcacatcaaaggcaactcatctttccaatcacaattatcaagctttaattcttcccattttagatgtgattgcaggtctcattccccaggcataaataaaaccgcaggtcagttaagactagattctttaagcccacaggttttgttggatccagaatttcaatgaaacaagttacaagtaggtataactgtataatggattccaatttacagctttgatgaactttgtcagctattcttgtgaaaaaacacaagcacaaacacaaacataaacacatgtatacactatagaaaaccctcaaagataaataacatacctcattgctattaactggaaaaacaggatcatagaccacaaagctgttgtttgcaggaaacactagtgtaactgatggaattttgactgacacttgagagctgcttgataatacgcattaaaatgtcagcttatgatagtaagaacatggagggcttgttagttgtttggattatatataatcacctggttttgtagcaatacttccaaggatacccatcaaaactagtttttgtagcattcactcgcttgtcgaactgttaggaagacagttatgagagcatgcttatggctttttgaaatgtgttcaagggcagaataagacctccaagaaacttttcgtacacatcttctggaagaaaagtaaatgatgtcccagtatcaaccagtgctttaaagttggtttccttgatacaagaattcccaatacaaaatgcttgcaccccaacaatgtatgtgtacactggacaaaaaagaatgggagcatttcagcatccaatgctaaaactcggctctcgcaagtgttaatttacttacaaaaaataaaactaagagagtaaagaggaaagaataaacagtacgtactagttgccatttgaaggtgaaggaaggaatgatgtagaatgttgattgataggtcccaggtcaccaaagaatattcggccagaatcattttcatcaaagcacaatgagaaagaattcctcacaattcctgctttggcaaggaaactaggaactgaaatctctcctagtcctaaacccatgagaccatcaggggcaattccatccaagtaactgccactttgcttcatgccacaactgtatgtatgaagaatgatagcagatacaatcaactattacgaaatgaactcatccataaataccaaaatcagtgtgatgggttggttaacgagcaatcttcttacattaagctcaaaattacgaggataataataatgataatatgagtacccgacaataacaggtgacctgaacagaattgtttgtgtttgatgtgccgtttttccatgccgcaagatgtaagatgtcctcaacaagcaacccagaagttgatgtattctctgtgccgtaattaactacgtaagggcatggttgcttgggatttttgcagtttggacccaattcacataactggtgactacatgataaatgcttgctggtgtttgaaccagatggagtgtactcattcaagtctctatcctgcataatagatgccccaaatatggaggagcacctgccaatcaatcactggaaataagtgctaaacctgttaccaagtcttgagagagactttgatgaaacatatgcacccaaagttattaaaggtgcattgacacatgagtcttgacttcactgtttaacatacgttcacatgtattaatcatctccatctaagacttggcataactagtaatactttcaaaccttctcatagacttcattctgttaaaggaattacctcagcctcctgtcttgtaaatattagaaaccccattggataattccatataccgtatgcttgcttataaagtgcaaaaatatatatacattatattatatacagctgttattgtctcaaaacctcctggcttacattctaaaatttaacatctctaagaatttaacagctcagtaagtggtcttagtgaaaacactatgcctacagcgcataaatcatatgttgtcaaaagctattaattaatttgccgcattgcttacataaaccttaacttggctatatacgtcaacaactatagagtcgcttgcccaaagttatttacagggtctagttattgattcttagcaaataaccaccccaataaaatcatcatttcacctatctcaaataggaacatcctctaactaagaactgaaaaaaagaacatttgtctaatcacccaaatgattgtcatgcgagttatcacaatcataaatagatataacacaagtagggaacgcttccttaccaaactactatagtaactggatgataatggtgcacactgaacacagtcacatggaacccaaagcagatcacttcccacatccaatgcaaccagaaaagagacattcggcgttcctatatcaatccaagtgtaatgcaacctacaaacacgcaactgcaatttcagaacaccccatagtgaaaagcatactaattaatatatgatcatgaacctggatttttcacttaaa

SEQ ID NO: 380392 - DNA, 3124 bp, Cannabis indica
agaaattttctaaacttctcaatcagcattgcattaagactgaagagaagctttccaaattgtctctggcatcgacgaaagttacatttgagccaggatcaccgggtatgatggagcgcacgggaacggagacaggaggttccagcgggcctcgtgcaaattgggggtcggaatccagggaggtaaatgcgataatcaaaactctccgtgtgaaggtagctagatttgatggatctaatgtggaagaatggttgtacaagatcaataagttttttgatcttcatcaagtggaacctatgctgagattggcggtgattccgtttcatcttgaagggatcccatctacatggtttcaatggatggaaaagagcggcacatttacggattgggatgctttcgtccgagcagtgcagttgcattttggggcatcgatatatgatgatccattggggaggattttgaaactggttcaagtgggttgggtggagcaatatcgagctgaatttaaggaactcatgactcgcatatctggcgtttcagaacatctgtttctgaatttctttgtttggggtcttaaaatggagattcaaagggaattgttgatggcaaaacctactgacttagcggatgcgatggcgaaggcgcaactctttgaggacagacatgacgatctatttggacagactcgtggtggaagcacgcatacgagctggtcacctagatcaatcgtaacgcacagatcggcaactcagggaccacctctatccttgggtaatatgtcaccaccattttctggagagggagcgactaagacagctaaaataggtaactctcctttacctataaagagattgtcaccaacggagttgaaagataagcgggataaggggttgtgttttacatgtgacgaaaagtttcaccatggccacaagtgtaagaataagatgatgttgtactgtggatatgacgacgacctcggtgaagaagagacaccactggaagaaggagatgggggagatggtgaggattctccagtagatgaagttagtttgaactcacttgcaaactcggccaaaccgaggatctttcgtttgatggcaaaacacaaggcgaagtgcttggaggtgctcattgacacgggtagcaacataatttcatacaggagtcgttggcggggcatttgggactgctatgtgaggatacaaagcgattcaaggtttacatgggaaatggtaattctctactgtgctctaaaatttgtagagatgtggaattaattttacagggacatcagtttgttgtggatctctatgtgctgcctatttggggtttggatgtggtgttggggatgcagtggttgcagacgttgggatcgtgtattcatgatcatcgggctttgacaatggagtttaattggcaagggaatgtggtgaaactggcaagttcttcaaactcgacccaacaaattacttaccaccaattccacactattattcatgaaggaggagtccatgaattgtataagatgtgtactctgttgagtgaccaagaaacgcacagtgacaaaattagtaagattgaagagggactgccaatggagggaaaaggaattgccatggaatttagagaggtgtttatggagcctacacaactaccacaacaaagaagtgtggaccatcgaatatttctgcaaccgggatcttcaccgatcaatgttcgtccatatcgatacccatacttctagaaagatgtcatagaaaaactggtgcgtgaaatgactgcttgcgggttcattcggccaagcaaaagtccctactcttccccagtcttattggtcaaaaagaaagatggttcatggaggttttgcgtggattatagagctttgaatggaatcactatcaaagatcattttcccattccaacgattgatgaattacttgatgaattgggggaggccgtggtgttttcaaagttggatttaagggctgggtaccatcagattcgaatggaccaccgagacattcacaagacagcttttagaactcatgaggggcattatgagttcaaggtgatgccctttggccttacaaacgcaccttcaagctatgaatcagttatttcaaccatttttgaggcagtttgtgatagttttttttgacgacattctcatattcagtcggtcccgccaggagcacagccatcatttgcgaaaggtactccagctactcaaagaaaatagtttttatgttaaaggaagcaagtgccagttttttcaagaggcaatcgaatatttgggtcacatagtttctgctcaaggtgttcaagtggacccaacaaaaatttcaacaatggtagattggccctgattacgctcaaacttgtcttcacaaagcgatcgttgtagtgtagtatgacaatataccttttgtttggcaataatgcaataagagattaatcataaaattataatattaatatatatttatcctaatcatattcacatagaaaaagcatgactatttctatataatactaaatagataaatatattgatattgagatagagaaaatagaagaaaattatattactcaaatgtataaactttaagcatttggtgaatcaaaacacaagtaaatattacctcacatataagatcatcatttaccttatctaggaaactagccaaaaatgctagtcattctcacaataatctaaaaagaaaatatgagaagagatagataaaataaaactaaaatttactatagtttttgccaatgaaaaattacacactccaaggtaaagctcccctcaatatatagcattttgacatgctataaccgttcaataaaaaaaaatcctaattaattgagtttgattcttacattaattaatttgaataaataaaaatggacaactaatgataggaaattgatttccctcatttagtcaaatgtgatggaaatgttgaggccttggattgtggataaatgaagaagttgataacctttccttccctttggttcacacaagagataaaacaaaatcaattatcattatgttgatgaagagtatctctagctggctgccaactttgatgcataaaattgattatacatatcctct

SEQ ID NO: 380393 - DNA, 4073 bp, Cannabis indica
tgggtttggagacgatgaattattaaggagaaccgtgagcagtcttgcaggtggggttttcgaagaaaggaagggcaagacaatgcaagtgctggctcagaggctatcccaattctctaacccatctaatcgcaaagaggaaatcaacttgaacagagcgatcatagaagcacccactgcggaccaagtgttggagcttacttgggaggtcatgtcggccgttgagaaaggcctcagcccctcaccgctcactcctctcaacattgccactgcccttcatagaatcgctaagaacatggaaaaagtctcgttgatggaaactcggaggttggctttcgctcgtcagagagacatgtccatgcttgttggtttggcaatgacagtgttgcccgagtgctcctctcagggcgtttccaacatttcatgggcattgtccaagattgggggtgatcttctttacttgtccgaaatggatagagttgcggaggtggccttgaccaaagttggggacttcaattcccagaatgtggccaacgttgcaggggcttttgcttccatgaggcattccgctcctgctcttttctcccaattgtcaaagcgggcatcccaaataatccacacctttcaggagcaagagcttgctcagctgctctgggcctttgctgctttgttcgagcctgctgatcatctgttgggatctctagatagtattagtattggcgacctgagttttagccgggatcagcttggaagcattgcctggtcgtatgctgttttggggcaaatggaaaggagtttcttttcgtcggtttggacaagcttggcccggtttgaggagcaaaggatatcagaacagtatagggaggatatgatgtttgcttctcaggttcaacttgtgaaccaatgcttgaagatggagtgccctcatcttgagttgtctctggggacaaaactggaggagaaaatcattggtgctggaaagactaaaaggtttaatcaaaaagtaacttcatcttttcaaaaagaggttgctcgccttctcaccagcacaggcctggaatggtcgaaagagtacgatgtggatggctacactttggatgctgttttggccgataagaagattgctttggagattgatggtccaactcacttctcaaggaatacatgtgagtttagattctactttgctttcttctctattgatattcaaaattctattctctatgatgagtgatgacagcaatcattctagaattaaaatggtacgtttctttctattttgattctgctttctctgcagtggtaccattgggacacaccatgctcaaacgccgctacataactgctgccggatggaaagtggtatcattgtctcatcaagaggtgagtttcaaattctaccaacatatacatattgaatgatgtatacaatatgcacacactttatgggtctatttttgttctgtctcacaaactaaacaactactgcttatgcagtgggaagaacttgaaggggaattcgaaatgctagactacctaagaaaaatccttcaacactatttggttgattgatttcaataccccagcatctacttcaattggaggagaagagaaagcacgtcataccatattctgcaactaccctaggactagtaggatagtatttttgtccatttttccaaatgcgatgttaattatatatttgtggttactagtgataacaagcattatttatttactcccataatcgtaggactcctagaatgaatgaaagaagatttttagatttgtaacaaaataatgtacactacactattacattctccacttgaaaatttctttttataatatgagtaaacatagcaacaaagagcttcaaaagatacttcaaaaagtgacaaccattgtcacaaattagcagcgttgatatttcaaacattgagcgcaatcaaacacgaatgcaaagacagaaatcagacataggtatcgatcaaagattttctcatttcatcgacaatagcgctaggtcgtgactccctcaacttgaagacgctctctataacagagagttcagtagcagtggtgtctgagccacagaaggctgtccaatcattaacgatcatgccagccgcaatcacttcactccccctattgactgtcccagcaaccaaaggaacctgaagaagtgttgaaagttcgtccaagtcttcaacagatgtgtgggggtgaacctgtcgtgtaagcattttaagtaattaattttaatggacgaaagtcttcaaatacaaatagcaaaagctggaaaaagagtgtacgatttgtcattaccaagccacctgtattggagaaggtacagtagctgccaacaagaatattccccgcaatcgtctgcctaaaaacttctactccaagaacatctgctatcatctcttcagtttcctgacaacaaaagtaatagtagtgttagacaaaaaggaaaagggtacacttgtgagagtagttagttgtggaaactggaaacaatacattccaataattatggatatggatagtaccttgtcaagatcagtgtgtgtgagagccacgtggtcattgcatgctatacaattcccaagagcagatagtttctcttctatgcgctgaacaacaacttgatcaggtagactgtttctcaggtgctgaagctctattgtgcatacagtatttatacgacattggttaagattgtatatacatacataatcattgttattgttgacttctttttgttgattacgttatgaatttcgcatttgcatatataaagtacagtatttatacaacattagttaagattgtatatacatacataattattgttattgttgttgttgattacgttaagaatttcgcatttgcatatataaagtaccttggtcggtggtattgtgaggcaccagaagcccatttttgttacctgaatgtttgttttgtacaaggcaaaattaaagatgcaatccatgagataaacaaacacacaactttttcattagtaaggagtaaggagttataattaaggaaccaaccagcgcaaaggcgaccaatgatgcgagtgcctgagatggaggtctttaccacaggaatataatcagccagctccgactcgaacgtgctgttgattgttgtcaataattttaacaaacaaacaaaaaaaaaaaagacaaaaataactcaaggaatctcctgtagaaatttaatttatacctgtagaaattctcagaacctcctatggcaaccaaacagtaggcattggtgagcttggagaacaccccaatttcacaagagttctcgaattgaagaccttcaagttcaacatttgttagttagcttaatgaaatcttagccttacaaataaagaaaaagaaaaacttacggacggccatgctcagattcagttgctatgctcgatcacgccaactgaaactgaaactgaaacatcaattattaagaaagcaaaaattaaacaatcctgtgtaatctaagatgatattacacatataatatacacaattcctgagatattaaatctttagataaactaatatatcataagctcaactaaaaaaaactaagaaaatggtaaaacttaattgggggcttttgtttgatcaggtatttaagtgttaaattattcagctgagaaatacaatacctactgacaagctacttagaatacggtggagtttgtggcgtggggtgtggtccgtagtggcggaagacggcggattggctgcagagaatggtggtggcggctttgcctttgagacttgagagagtggaagaaaaggaagaatgaaatggagaaatgatattttaggttggtttgggctgggctgggctgggcccgttccacaaaaattacgctctatactttttttatattgtcctcttttatttttactctcttttttaaagtctatcattcttacctcttttttaaaacattataccaattttgctcctgctacttcaagatactctccatgtgactctcttatctcagggtattttgggtacaatacatataaaaagag

SEQ ID NO: 380394 - DNA, 2606 bp, Cannabis indica
ttggtgatttcgggttggcaaaactctttccggataatattactcacatcagcacaaaaattgctggaacaacgtaagttcgccttttcttgttgacttttgaattgttctctagacagatcgaaaaatagggtctttatgtgtagtttttagtggatgttctaatcgaaaaggcttagtaagacattgttaggatctcacattgactaagtacgagattataagttagtcttttgggagttttaccctctaagatattgtattgaatggtataagagtcaccggtctctagggggacccgaagcctgaatccccgtctcgtgcaagatcaaactcataaagtttgggtctttaatgttttttcattagtcttttgctgcttacaattctacattgttatgtttgtgattcccaaaagggagttgtttcaagtattcttataaagttgtgaaatttagctcaaacccagaaacgtgtgttgtatcgaaatggtctaaagagtcaatggtctctagtggaactcgaagcctgaatccccgtcttgtgaaagatcaaactcataaagttttggtctttaatgttgtttcattagtcttttgctgtttacaattctacattgttatgtttgtgattatgaacagggagttgtttcgagtattcttataaagttgcgaaatttagctaaaacccgaaaatgtgtgctgtatcgaaatggtctaagattcagcggtctctagtgagacccgaagcccgatgtgatcaaactcataaatttttggtctttaatgctctttcattagtcttttgctgttaacaattctaaattgttatgtttgtggttccgaaaaaggaggagttgtttcgagtattcttataaagttgcgaaatttagctaaaacccggaaatgtgtgttgtaaagtttgcattttttcgcgttttgtgaatgcaaattaaaattgtttactctaaattgcagaggctatttggcaccggaatatgcattgggcggtcagttaacgttgaaggccgacgtgtacagtttcggtgttctaatactcgaaattgttagtggcagaaacaattccaataattggggagggtctcagccaaagcttcttgtggaatgggtatgtatttatgtatgtaacttaagtttaatttccgcttacagatggatatttaagtttaatttttgacagtaataatatttaaatttaatttttaacggtaataatacttaaattatatttctaaaactttcataattacttaacaaatgtcaagttaataaccatatgatatgaaagtttttgattggtccaagttattaaatttttattttttatttaaaaattaatttaaatatactaataaaaatatgacatgtacctatgaaaattttaaaaatataatttcaatattattatcgttaaaaattaattttaggtagttatctacaatataattccgtattattattactgtcaaaaattaaatttaaatatttatctgtaatcgagaattaaacttaagtatttatgttgaaaattactttataatttatagtatgcattagttttttaatttttttgaataatagtcaattacacatttatatatatataatacatgtatataattaattgttttaaaatttattttcgatactgtaaattatttaaaatatttcataaatataatatataaaatcatataaaaagattttttttttttatttgaactagaattatatattttaaaatataaacttccaagatcaatttgcaatagttataagaaaataaattattatgcaaagtaactattttatttttcttaatcaattttgttgtactttcattaggcatggcaacttcatgaggaggggaaactgttagagatagtagattccgagttaaccgatttttcggaggaagaagtcacccgatacatgaaggtagcattcttctgtactcaagcagctgcaaaccgaagaccgctaatgagccaggttgtcgacatgctgtcgagaaacatccgaatcaacgacaaacaactcacggccccgggttcctttcaagactcgaaacttagaggatcttcttcgaaaaatacggcttcgactagtcaagagatgagttctgtaccagttactataactcaagtgacccctagatagaaaaagaagaaaaaaatacctaccaattcatttttatggaaaacagaaattttagtgtgaaaaaaaataattcttgaatagcttttttttttaggttctttagagtagtgtgttttgagcaaaaggtatattgtaccatttatatataaatataatattatttcactattgaaatgatgaaataatggaaatttatacaaaattaaaaatgtttatatttttatgtttatatatttatatatattttatatttttagttttttaaaaaaaaaataatatgaaatttacatgataaaaaaaaatgtacaattaacaacaaaataattaagatttcatttagatcgtttagagcggttcttcttcttcgcaatccaaattcgtagtattggagtaatttttatttttataatttttaaattaaaaaaa

SEQ ID NO: 380395 - DNA, 1282 bp, Cannabis indica
ctctctctctctctctctaggctctctctctccatctcctttgatctctctctttttctcttcgatttttctttgcaagcggtataaacgtgtggtgttgtacgatgggatggtggtggttcaatgtgatgcttttgttgattctatgggttgttgtggtagtccgatggggtgtggtagcagtatttgtttgatggagtgtggtggcagagcaaaaatcttttggcgtcagttcattactatttgcttccgttatgaattgaagcaaaaaattttggcgtcagttaatgagtgaagcaaaaatatcaatatttgcgtctaaggctatagtgtcagtttaaccaaccgaggaaaatctttaatctttatgtgtcacttcaaaaccgacgctaaatgagatttttgtagtagtattttctaaataataaaataaaaaattaattaaaaaatgttacagtatgcacccttagtaatttaaaaagagagcactggataagatcatctcaacttagttgttgatcatagtgggtcttatatatcattgcgatccaattcagttataatgatactagtatatatatatgtgtgtaatggagtgctaaaagtggtgtatatatgtattgttttagtttatcttcataaaatttaactctaatagatataatattgtaaagagtatttttgatggagatacaaagctacaatatagatcacttatgataaaatatgttgtaagaatgagtcaaaaagtgatgaaaatttggcacgtagcaaatattatgcaaaaacatttgctatgatgcaaaatttacaatactataaataaactaatttttatgccattttaattattattatattagtatatttagctataacataaaattgtatttatatttttttattgttttatataataaaaaaattgagaaaataatatatttatatttttaatataaaacattaaattttgcttcatataattttgcaattatgcactggtagcaatgctataaattgttgaagtaaggaattacactgatttaccaaaaaaaaatgctataaattgatagaaatacatcacaaagttatttgggataattcaaaaaaacacaaaagaaattcaagaatgcagtctgtactaaattattaatatttttacggtgttttatattttatttacataaaatacggtcttttgatatattttatgttgaactcttagtattttgtatggattttttgttttttttttatattatttttatgttgttttgatgtt

SEQ ID NO: 380396 - DNA, 2778 bp, Cannabis indica
tgtttccaataccaactacttgtgataggagcttcatagtctctccaatttgcttctcctaagtacactgtgtgtacccatttaacccacaaggtatcttgtttagattctatcgcccaaacatacttcccaatggcagcctcattccattctaatattctccttagaccaagaccaccctcattctttgctttgcataattcatcccaagctaccaatccaggaccacatgaatcgagccctttccaaaggaagcttctacaaattgagtttactttttgtagaactttcttaggaataatcattagctgggaccagtaagtatggatagccattagaacatagtctatcaatgtaattctacctgcataagacaaattcctggagctccagtctttgatgcgttgcaccatcttctcaattagagtatcacattcagagctgggaattttttttgcacaaatcggaagcccaaggtatctaaacggcaaatgacttcttcgaaagtcaaatgtttctactactctttgaacttcattctcatccatattgctgcagaaaatttcagactttgcttcacttggttgcaatctagaagtttgagaaaacaatttgagtccttgaagcattctgtaaatggatacatagtcaccatggcaaaagagcaacacatcatctgcgaaacataaatggtttagcttaagactagcacacctttcatggtatttaaagtctccatactccccaactttcatcaacactcttgatagatattccatgcccaaaataaaaagtaagggagacatcggatctccttggcggagacctcttttcgcttcaaagaatccatgtgaagaacaattgatcataagactatatctcgaggttctaacacataccatgactagttctataaatttctttgggaattggaaagcattcaaaatttctttaatgaagtcccactcaatcgtatcataagctttcctgaggtccagcttgatcatgaatttttctcttgaagagtgcctcccatagtttcttaccaaatcctgacataccattatattgtatgcaataaacctgccttttatgaatccgctttgattttgagcaatgatatcaagaagaatcattctcaatctcgagcagataagtttagttgcaaccttataaattacattacagcaagctatccaagacagattttgggcatttacctttgggaatcaaggtcagagtatggtgttgatctcttttagcgatttgcccgagtgtagcaaagatagcaccgcttcacttacttctgaaccaaccacatcccagttatcttgaaaaaagaaactgctgaaaccatctaggcctggagatttgttacttggaatttcaaacattgcatttttaacctcctctgggttataatcagctagtaagaatcttgcctggttttcatttatacactgccctctgaccattatttttttacaaattgatcttcttctttccaacttgctccccaatagaactttgtaaaattgcaaaaaagcctttattacctcgtcagatcttgtaacccaattaccttgctggtcttggattgaatagatcctgttggttgtacgccttgcccttaatcttgcatggaacagtgtcgagttatcatcaccttcctttagccaagaaacttttgctttctgttggagaaaagaaataaagctctgatggagatctgagtattgagcctgaatcaaattttctttagcaattaaatccgggtccaaaggattttcctttaagttgctcttgacattctagcaattcttgaatttcagagactcagctgcttgtatatctccaaactctatcttgtttagactcttcaaaaaactcttgaattctttcaacttttgaactagcttgtacattgaagtacctgctattttttgttgccaaatctctagcagcttcttcctaaattaaggtgctttttgccacattcggaagtatccaaaaggctttttgccttgtttcacatctggatagacagttactagtgctgggcaatgatcgaattccctttcagataagaataccacttcagccattgagaatttgtctaacaataattgattgcccaagactatcaatcttcgaataaatccttttaccagcctcttgtttgttattccatgtaaaatagctccccgtaaacttcccatcttccatttaacaagtagcaacagaatcttgaaagtcttttgaatcaagctgccttttcttccccctattctttcttccacactaaagatatcgttaaaatcccccataactatctaaggatttttcacctccttagctagatctttcaagtcagcccatagtttccttctaccctcctcatcattgaaggcatagacaaaagttgccaagaaaaactcttgaccagcttttgaggatacctccaaatgcattagttggctagttcattttttaatgttaatagcaaacatgtttggattccaacttatcattatttttccacctttctgacaagcattattagtagagaagcaccaacccgagaagatatttatatatacagaccccaatttagggacctgtatttttgtttcaaggagaccaactaagccaaccttcatagagtaaattaaacactttacatcctcttgcttatggcgtttgttgatcccctcgacattccaacataaaattactatccattctcggtaggaggctccccctcccttcctttcttac

SEQ ID NO: 380397 - DNA, 5519 bp, Cannabis indica
gtaactaaatgtacttttagttataatagttgttgtgattaaaaataaattagtgacaatttgtatttaaatataatattttagtcacaagtaatattttgtcgtgactaaaagtcatatttagtcacaaaaaatctatgttgttactaaaaaatttcactaaaagtagcaattttttatagtaacatgttaaaaattgatgtaaatatgtagtggaaagtaaaaataaaaatagtagaggttcaaaaagtaaaatgcaaatactaaatatgcttatgttggattagaactcatgatgtccattatgtgtaaaaattaacttttatcattataccaaaacttgttttatgtttataaatattaattttatttaaaaatatatgttataactaactaaaatatacatatattttttccaattttttgttcaaaagacgactgtcccatctcgcctctttgttggtccgcgctaagctacatattctcatctcatgcataactatatgcattcattaattgaatttcctacaatttagtttcacttaattatataaaattgaaaatatataatggccgacactcgacattaagaatgaatgcccctcaccattttgggagaaaaaaaaacgcgtatgcttcaatttatggatatatctacaaataatattaggaaaccaccgactcttattattcttgatgtttctatttttatttctaccttcatttaatttaattgatttgatgtgtgagtgaaaattaaatcttccaataatttagttttcaaaagtttatttgttgtttaactcataaattaaaacattacttgtttagttaagcttttgattttgcttatgtataagtatgagtatgagagaggatgtacaccgattagaatctggtctgaacgggttcgtgagttatgggtccgtgctcaaccccattaaaaaatttacacttgtacccctgaacatatatattacaggtttgaatgggtattgttaatttcaaaaaatagtcaaccgacagcaggagtgtatgaatctaatatttgtttgaatctaatatttattacatgttacataattagaataagaatgtaaaaaacacacataattattatagaagcttggtctcctttaataacaggtaatgacctacttctcttttagttatattaatactaagggataatactattcagatcactttaggtgagatctgatataacttccttgaagatacaaagtaggaatcaaagctagcattctatgggcgtgtaagagagagagttatcagacttaggcttagaactttatcacttggaggctagaatgagacttagagacttcgcctttctaggttagagttgagacctttatataggaaagcctaaaccctaatttacaactaaaatccttagatatttgtatattaaattagttaattacaaaagatcaaaaatacccttaaacatagatattctccagctgttttatattggactattagggcccaatttgtagcccaactcgcagcccacgtgtagaattatacaaaaaatcctatgaggtcttctcctggccagccagacacctacagggagcaagctggtcggcgttggtgttgtccagaggctaacagaccatagggccagccaggggtggcctgtcagcttttgtgaggaagctggtctttcacttgatgtctcgtttgactgtcggggtccccgttggctgaggtactgacttagactttttgttagtgagttgtactaccacgtggcgttgattttgtctatgtaagcaatgccacgtcaggtgggaaaaaatcgagataacattttccccctgagtctctgtgtgaaaatctgtatggatagggactttttagttagattggtgcggttggaactgatgtagcctttgttgaataaaagttgctgcatttttagccttttgaaatactttaccttgactgtctgatctcatttattgtagcaaattgtctgctttttttgtctttttgttatgtaggtgaagcaagtgaaggaaaggggtctcatatgtactatataagtgattttggggggaaaactcttttcactttttacttttacttcttttagaaatttacatttgaagaagctcatccttctcgatagagggtcgaacccaagtgtcattctccttagatttttgtgtcatttcaacaatccaagcttctcaatcttcgtcttcaacgatttcttattgtgggtaagctttcaatttctgctatttcatttgatttgattgattttttcatgaatacatgaacattattctttacttcacatatcttttgattcctatgttagatcgttgtccttttagtattttgatttgcatcatagccttaggatacataatgtgtgatttctaaacgaaaaagatatgaatctgacctttattgtgattcttggctctttgagtcacgaagaacacgaaaaacgtgtttgagtttttgaaaaaacacgttcgaatccatataggtcctagccgaccaatgaggtcttgtttgagacctggccgaccaagggtggctattagggggtgtgccccatgggctggccagcctatacctggaaaatggattcttgaccggccctagcctgggtcatggggtctggtcggccactgagacttggaaccctggccgtccaaggccaaggctccaagcgggtagccaattttataccctctgatgacctcaactagggtcccgtgacagccttggaggcatatacagatgtagttctatgtgtggttccccttgaaaactctgtataaggcttggtagtgagtctattattgtcaactgtataatttaagacttaccatatgtctaagtttgtgtacttaggacgatacttggtcgataattgacgttgtacattgtgatttacctaaaaagtacccttgggtactgttaaatagaatgtgtttgtagctttgtcaagttgctcacctccccccttaacacttttatgcaggttttgggtgttggataggggaggtgacagtcgcgtaggtccctcagtcatcttgtgattatggctagaatgaaacaggcttttcgtagagcgcctccatgtgacccccatgtagccaggggtggctacaaggggtcgagtcaggattgtagaggaggctactcagcctcatgttgatgttgatccagaggttgaccaggcggaagtgcctgaggttgactaaaaggctgagagccctgatattgagtctgatcttgaggaggtcacaccagtcaggacaaggagatacagaacttgtattgtcctctccaattgccctttggatcgttacgatgccaatggcgattcgctgaacaagctttgtgagccttcagtgttaggcttagatcatgtcctgattcagtctttggagcctgagattctagatgcaacgtcacagggagacagttggtctctcttgcttttaccctttctaatgatgcttttagcaaggtacttgctagtggtttagtaatgagtgtccattgtgagatacctcttagagattaccgtgtgcaccgggttccccttggttggttgcttggtcagaacatcatattgagtagggagcagtgttgtcgcttcatccatacttctgagacattattgcttacttcggtatatgtccaacacaaatcactccaaaaagtatcaagtacctttcggcgatgtttattttatatagggagctaggctggcctcagcctacttcttatgagatcggatattattttgatttgaagtctactcctaagcaaaataggactgggtacttctactttagtcaggtcagccaccagtggttaggtgataccaatagcgtagccatgtcaaaagttggtgggtacgccaagaagtactttattgcttgggggcatttagaggatagaacactacaagttctagtgggtaccattcttcaaacactctatccccatattgcagatgagggagaggcgaaggacatcttgtctctttcggtggagaatataaacatactcaggttaaccaatgtggctaacttccaaaagtatggtttgtaccctcctgctcctagagttgtgggatccctatttgtagagggagcttgtcctagagatgggcaagttcctgacttggacgatgatgtacctttttctcgtatagctcaaaatttggagaggagagagagggccttctaccgacgcttggcagtgggggtttagttggtgatgcttctctctggatcagggctggaggccagacttctgagggttctactcacccctacctaagtctagaggcaagggcaaggtggtttttgagcattctgatagttcctcttttgaggatgatggtatttgatagttgatagcaccatctttcacattcttgtttgcattgaatatttatgacttgctttctgactttgcttatttttttttttttgcagatatgtcttttaggttgaaaggccttgttgggggaccttttgatgagccttcgggttgactgagggcaaaggtggcccgaacctctcgtggcggagatgctgttaaatcctctctgcctcctcctccactagggcctacaccagccgggcagtccatgatagatggtgctcctgctaggaggggatggcctacgagctagggtgctcagaggcccagccaaggattaggttcaggtgctgggcagagggctatggaagtagcccatagacgcctagagagagctttttctttcatggatgaggaactcaaggagcttggtgatgtcaagccagacatgctccactccactggccttcatgatctttctttggtaagttataattttagctttgttcattttctggcacttttgtaagctagtcgaccagggaatttattgcatagggctaaccggccatggatgtatctttgaggggctagatggccatggaagcctcaaggagaggttggccggccgatgttgtactttgatactgatttgcttctattctcttggcattgactatgaaaccaaggaatttatctaagcctacttcgaaagaatatttgagggggttaagcttcatgttgtagttgtggaggatttttgaagcatttgtctaagtccaccacgtgcccccagcctttttggacttgacaagttggtcgttcacatacacctccatgttgcggccaataagatctttgaacattttgttcacaagcctctaatatgtggcccctatatttttttaacccaaagggcatgactatgtagcagtacagtcctaaggctgtcatgaagcttgtgtgctcccgatttggcgaatgcatctttatttggttgtaacctcaatacgcgtccatgaaactcaagatttcatggcatctacaagctggtcaattttgggaagcaacaaagcaatccttggacatgctttgttcaggttggtgaattcgatgcactctttcttttt

SEQ ID NO: 380398 - DNA, 1409 bp, Cannabis indica
ccatgcatgctcatactcatatgacttccttgtgactaaatcacatgctataatatatatatatatatatatataatttaacaaaaaaataaaaaaaaaaattgcctctcattttcccattacctaagttaagtcaactagggatagagttaatttggttccaatcgttgttggagaaagcgatagaaatctcagttaatgaagacttaattggataatgtatataaattcaatgactcactaaaaaaatgaaagaaataattattatatatactaattatattgatcaatagttttctccaaattaataacatatatgaactacttatacgtattgatagagattgttccagagaagtagttggctatatatctatatcataattaatcacgaccaagtctagtataaataatgttaaattgacctattctagtgtagtcatcattaattataacttaatttgaccaatatgaaggacacacattataagttgacataatatctatgataatatatagatttttaatactaatcaggacaaaattttgatttgtatttttcaattaaatatctctaataatttatatttgaaaatggtcatgaatatattagtgaccttcttgaatattgtcatgttttgttgagaagcttttatacttagtgtacttttatttatatttgaatctctcaatactaattaattaaactcactttaatgttttattagttggatgaagagaagaggagtatggcagacggtcactatgaaaaatagggtacttgtagtaataattttatagtcataatataattttttttttaattaaatataatttttaatcacagtaaaaaattacttttaactaaaatatagtaattaaatacaaattatcactaatttagttttagtcataatacctattataattaaaaacatatttagtcataacaaattgtaattttaatttgtgactaatatgtgtagtcacaaaccttttattaacaatataaaaatgataattgataattagttacaattttttcgattttagtcgcaaattttatagtaactaaaagtaagatcttttgtaataggtttattgtttagttgctttacaacaattaacatttcagttcaattttaatggttttagtaaaagtgagatgctttttcgataatatgtattaaattagaagttctattaggaaaattaaatagccatgcagcgtattaattagaatgtggagtacacaagaaatttatcttttgcttttattggtctcaaattatttgtttcaaacttgcagctgctaaaattagagaatgcaatttgttgtgatttcttttagtgggaaagatgagatgtggtatgtaacaccctaactagcataggcgtattacgtgatt

SEQ ID NO: 380399 - DNA, 3088 bp, Cannabis indica
caacaaacggagctacttgatacaaaatctgttaaatatattggtaaaactttagttaagtggcaaaatgtaattggttgggacagaaaatgagataggaatccggacagaagatttgaatccatagtactacgaagtgatgtaatgaattaatatggtaataattaaatatatattgtagagtgctatttcaaagcatatatatacataatatctaaacatagactagtttgtttttgaaagcaaattataaccgtacgttgtgtgtctaaaagtggctgaccactttctctgcctcacacatctccagcccaatgatttgtacgtattggccatgcatgatacgttgatggagtttaatttgtcctgaaattattatataaacaaagccttgtccttaccattgaagacctccccagtaataaacattgatccatatatatatgcatgcagtttctgccatatataagtgatcctaatcaggttatttttataataacctgttggatcgaactggggtttgctaggtctcgctcgcggattattcaaaatccatatctacagcgatctaattaatagtcttcttcaacctcattcaccagatcgaggggggccattaatttctatataaatatatttatattaaaacaacaacaacaacatggttaacacaactaaattctatgtgttgttctttttcttaacttttgctacaatattggttcaatcaaaaatccccgagtacgacgattattggaaaaatagagctgaggaatcccagaaatacgccattgaagcttacacttcaaatccagaggaagtaactgaacaattgaactcccatgtcgagcagtgagttcccccaccgcgccctttatacacacatatatatatatatatatttatatatagatattgttttttaactcatgatcccatcatgcatgcatattgttatgttggtgttaattattcatatacaaagataaacgtgctgtttacggtaaaagccatgggtccatgctatccatccaaactaattaattggccataagtaataaaatagtctatatataatattataaacatcaatgtaaagtctctaattaataatatcaaatggattgggccttaattaattagcatatattctgttttgttttatatatatgtacgcaatgcagggctctaacgaagtcgtcgaacagcagcagaagaagagaattgagaggcagaaggaacaggaagacaggtccatgcagagccacaaacccaatagacagatgttggagatgtgaccccaactgggcgagtaaccgtaagaagttagccgactgtgtccttggctttggccgcaacacagtgggtggtaagaacggttcctactacatagtcacggacccttcagacaacaacctcgttgaccccttacccggcacactccgccatgcagtcactcggaaaaaacccctttggatcatcttcgctcgtagcatgattatcaggctcaacgaagagctcatcatcactagtgataagaccatcgacgctcgaggagccaatgttcgcattgccttcggtgctggcattactatccagttcgtcaagaacgttatcatccataatcttcacatacacgatatcgtttcaagtggtggtggaaacatcagggactcttcggaccacgttggttttaggacaaagagtgatggtgatggtatctccatctttggctctacaaatatttggattgatcacgtctctatgtctaactgtcaagatggcctcatcgatgccatcatgggttccactgccattaccatctccaactgccacttcacccatcacaacgaggttatatatatctactaaattaaattatatatatgtatatatgtgaaactcaatatgatattaatattaaattgttggtactaattaataattataagttttggtcatgttgatttgatttgattgattattatatacaggtgatgttgttcggtgcgagtgatagttactcggctgaccagatgatgcaagtgacagttgctttcaatcattttggacaaggattggtgcaaagaatgccaaggtgcagatggggattcttccatgtggtcaacaatgactacactcactggctcatgtacgccattggaggtagccaacaccctactatcatcagccagggaaataggttcattgctcctcctaatttgaatgcaaaagaggtatttgatgattaatatttctaaacaatcatgacatattttaaaggtttggaacattttttgatgttaatttggtgatatatattaattattaggtgacgaagagggagtacgcagaagggagtgaatggaagcaatggcaatggaaatctcagggagacctaatgatgaatggggcattctttgttgagtcaggaagtcgtttcaataaaaaacagttctcaaggcatgatatgattaagtacaagcctggcacctttgtcacgagactcactcgcaatgctggcacactcatctgtcgctacggcaaaccatgctaacatgcatgcatgcatgcatatcatcaaaccaattcaaatatataatatatcccaattcttttttaatacgtatcaaacaaagaaaaggtgttttagcaatgctgaagctattgatcttaaattgtggctgtatacattgtacgcattttatttttcgtggttttttttagtgctttttatttttgcttttttaaattttgttttgggtttctttggcttgtttatttggggagggaaaggaatacaaaggatatataactttggtctgtcgaatatcatgagaaaagaatatgatggattggaaaggaaaggaaacaagaagttagataaaaatctcagactgtacctgtgacttgtttcattaaaatgcgtttcttcaatctccatgtgtgtatgtgtgtgtttataattaaaatgatataatattgtgtgtttgtgtccagtactttattatatatctttatatattaaaagtgcctatctaacggcatttcttggtttaacagaatatacttaaaaataaaagaatat

SEQ ID NO: 380400 - DNA, 1090 bp, Cannabis indica
aaacaaaaaaaaaaacgaaaaaatggacatagcaaattatttatttatttttgccttttattcttagtacaagaacccagaagccataagctaatcacattaactaccagacccttaatatacggatttttcttacattaaaacctctgttttgagggtccggtcaacaggagtggacagcctgaaacaggaaattgctatgtcttaaaatgtaatgtggtttccagttacagtcaataaagaatacacatccatatatggccctatatataaataaccaataataataatactgctgaacacagtgggtctccctctcccctacactatatgcccttaaggtaaatattcattcaatgtcttttactgactcacactaacactaagtgtagcaatatctaaatgttatagttatttttctttcgtagtagtactcgtacaaacgcagaagtgaattgtgatctttggtgggattttatggtgaaaaattgtgaggtgcacagaaaatttcagtgcaagttcgaagatgagggaggggtctactttttttagcttcagaaaggggagcagggtttagctttagcttattatttcttcacttcatgaaaaaccagaggatacaatgatttgactggttttccatgtagaattattttggaggaatttatagtgagaggaagaaaaagagataaaaagaaaaggggtgtgtccccacacttctgtagtctctgtggtaacaatttatcaaacacctaaaagtgtcacatcaagaaatgtacagttttgcaaataaggtatagataaagtgtaataactgaggatcccacctcttctatgcatattaaagggtaacgattaatgcacgtgaatttgttggaggggagtcactagcccttctcctatcctatatttgctaccaggctttaacatattttcaggaaaattacttcaaattttatggtggcgtttgggaacacttttttaatcagttttctgtttttaaaagtgaaaaagtgaaaatatttttaaaaaacatgttctataaaactgtttttacttttcaattttataattaaaaatcaaaatttta

SEQ ID NO: 380401 - DNA, 2779 bp, Cannabis indica
agagagagagagagattagagtagagtcttcttgtcactaaacaaattgtaatttcagtaactctgcatattgacctgaagatttttctttgaaggcagcttgatattaaatgtgaagtcctcattccattttggctcttttgtcctgacacgatttaatcatttgtacatacatcaaaacctttaagttgtaccacatccctgagatttgtgttatgacataccatatttaaaacttgtataatatagttgtaaaattagatcatcttccatcattaatggaaaaaacccagcttttaccaattaccttacaaacacaatattaatattcttgaggaaaacactgaaaagaaactcatttcataattataaacttgtatatatgtatattatacatctatgagtgggactgaaaattaaagaagaaaaaaaaaaactcattccattgtccatagttcataaaagtacaaatcaactactcaggtcaggaaggaaaagaaaaaaaaagaaccctttatatatactaataagctatacggaataataagattttctagttactaagaagtattagaataacattttagtatagtcatcacatcacttcagaaggtttacaataatgtgattattcaaaaagaaatgaggagagcaaacaaagcaaaaaataggaagagaagttatctaaaataagtgttaaggaaatgtgaaacaacaagagtatacccccatttaatcttgctcttgacaacttgaccattcaattccattatcacatatggatcacttgtcccctgatacaaacacaaagtaggttgtcattataagaaagtagattacttaacattatatgataaaaatggcataaaagaaatacatacccagggatccatggcaggaagatcaacaccctttttcaatttcacaaataactgcccatcgtatatttcttgtacaaatgttctgcactcagaaaaacaaaacagtacaagctaacattggtaatcctaatcatgactactcagtcacaatgattcattcatgatatttgaactgaaatcaagcaagtaaacaaagagttatctttcctaaaccaatgtagaacacaaaagagcttaaattgaagaaattgcatactctgatagatacactgtcttacaatctgctgcgtcaatttcctgtctaccaacattgtcctggacaaaaacagagtaagttaaacaaaagcattgattatcttcggtttctttctcaatctgtttggttaccgagaaaatggagcaaaacaacataattatcacacagcctcaaagttccaaacgttctttcaatccaatatattgatcgaaccctaactccaaaacaagaacaaaaagatacaaattcaattgagaaacacttacaggagggctagtataagcttcaaaagcgaaaccagcgagaataacagcgagattaatatcaaacggaggcctttcaatttcctcatcgaccggaaccctagtgacctcggtaccagctttgcagaagcagcagagagagtaaactttgtctctgcgcgtaagattttggcgggaagcaaagagatgaaatttgcgggaaagcgaaaagtgagggttggaaaggatagagagagttggggaaagtgaggaagagaagcattggcggtgaagatgaagagtgtagtgggttgggagagaagccatggatgaagttgaaggtgaggctgaggagagtggcaggggcattaatgtaattttgaaagaatggtaagggtataaatgagaaaataaataaggaaaggagtgggatataaaaggtgaaatgaaggtttgagaaagtagtagagcagttaagagaggtcctgtatctatagacacaggataattgtcgttactctccgaccgttgatcttgttgaccttaattttgcagtcttttttaaagagaaaaatgctaaagatacaagtgatagtagactattagccttatgaccaaattaaggttggatgtgctagtaaaagagggggaaggaatttgcaccacataattcctttttaattagcaagaaaaacaaagatagtagactataacgtcccgcttcaaattttcattggacacttacactcacagaataattgtgaggttttttcataacggtctaccagaaaataaaatgcaccttgttgatataaataatatcaatcaatctatttaagtcatcttcaaatgtatagtctcgtacctgcacaatcttagaatcatcatatttgactattattagacttaatctcgattaagttagttatacttggataagttagttaggttactattcttaggttgttagaactacagttagtttttctaaccaaccgtgatctatctctttgactatatattcatggcactgtataatagctttagtagaacaagcacaataataataaaaaaaaatcttcttactttattctctgtttctcatatggtatcaaaagttattttgcccactactttcatgataaaattttacacacgacctcacgacgatgttcctctgtctacgattgaacctcctatcgcagaaactagccttgagacggttagcattactcataatttacgaataatccttgaagtaagattgagggattgtttgcattaaaaataattaaaaaaaaattagagggattgaacttttttctttctttgggtgagattgtggaattgatcattattttaatgcaaaagagattgtggaattgatcataccaagagtg

SEQ ID NO: 380402 - DNA, 3347 bp, Cannabis indica
tgtctgaggtttgagtccctcttagatacttatagttattgttgtagttactgtctccaaataatgttgggataatcggtaaaaaggaagttggattctaacaaatattttattttattagaatatagaaaatatggctgtgttttagtaggctggctttgtaacttgatcatttgaggaaagcttgaaagtgggggttttgttcttttctgtcctttcttcctgtcaagttcacaagatgctgcaggttagaaaatgattgagaaatgggataattatgtgtgaaatactggattggaaatgccttgattgcttgagcaactatgataaattgacccatgtaaggctgaactgcatagtattttggctcaatggataattttgtatgggaagatataaatttcattgccaattcttatcatatggtcatcattgattagagttttttctgtataatatttgtcaactcactaaagtttccatctacatatgtgtatgcgtaaggctcaactttgagttctgcttatttgcatccatgccagtgttaatctgtatttggtctcgacattattaaaattgtttatgttgatgttgatctattcttatctatgcttttcattattaattatgtcagctttgctagtatttcttagtttctttgcagtttaattaattttgatttattgattatgacggtacattttgtaaacaattttgaattaccttctgatgcaatgcaggaagaaggcacatcagaatttcaagagcatgaaatgggtgatcatcatccaagtcatgtagatgaatttcataaggtgacctcctcagctaagctttaattatttgcacatgttttattgatttattgattattatttgcacatgttttattgaagataacagagttttatttttctatgcaggatgatgaacaggagataggtaattctgaagagatccccattgaacgtgaacaaaacatagcagagacagaagtagaatacagtcagagagacttcgaattgaaagagcaacagaatgtacagcgcaggccctatcagaaccaaaggggaggtcgcggaggtggtggtgggggtggccgcagaggttacccaaacagccgtggagctcggggcagcagtagaggtgggggaccctaccaaaacggtagaggcggaggaccctaccaaaatggtagaaaccagtattatgagcagcagcagcccggaggttattatcccaggaattactataataatagaggtggaaggggtggaagaggaggtgggccatcttacaacaatcatggctcagtggttgaaggcggtagtgttggggttgggtcatgatgttaatagaatttgttgatagggaccatttttagtagcatctttttgtgttggtacttggtgaatcttttgtttctttacctttgaaagatgatctgaatgcggggttgcctataatgaactcaccatccaggtctctttgtagttgggttaaattaaggatttcaataagaaacggtgcaaaatgaaatagatttttgatgtttctttctggtcctattcttttgctcttttaatatatgttttagcttggtttgttcataagaagaaccgatacatttaatatatatatttggtttatatgttatcagctcccccaatttttacgaaggaatcacacaacttaccaaattatattatgcgtcattcaaattgtttaacttgctagatatactcgttctctttttgaatcaccattttatgtaaagttattatttttaatgtgttattgtttctttttatattcttatttaatattattttttatacataattatttgtcaaaaatactattatttttcttgccactttcttttttgttcttttacttctctctaaaaattctaaaaagttgcttttcagaggactcaattgtaactaaaactaagggttgatattttcttttaaaagaaaaacagaggttgagactcaaaaattctctaatgacgaagtcaaagaacaatgcacaaaaagtttttgtacgtctctcctctgagatcatatccacaaaataaaaacttttttgtattgttctttaactttgccattagggaactattgagtctcaatctctatttttcttttgaaaagaaatatcaaagccatttcttttttgttacagttttgggtccttttaggagcaacttttaagaacttttagagacaaagagagaagaagaaaagagaagtgacaaaaagaatgatagtgttttttttttttatatatataattataaaattaaataaataaagaaataacattaaatatggacataaaatgaagcaatggcacattaaaaaaataactttacataaaattgtttttaatacctctactgaagcattatcctatatatatattgaaattaaatgaatcgatgaaaaatttcaagtcaattcacccttcactttaggtgcatatacaattaatttatgagtcagtttatcaattgtacaactaacatgaattaaggatgtttcataataattggaacacaaactattaatatcgtcaaataatgatctaactatggatgaaccacactggagcatgatattgacttttgcattttctttcgaattagagttcgagaattttaagtgctccacccccaatgattttgactgtattgccagcggaaattgtaaacttggatattaattctaaattcgactcgctcatcaaccaagccaacatcattgcagtgaggcttgatcaacttgaaggtttgttggttaagaaaattttcttacgaccttctttcgacgttagtgtgtattctcccaagccaaacattcatccgagttcagagtcatcacctacttcatcaccaggtaaatttcctcatcaaataattttgaactgtatggtacgtataaatatgagttttgcatgcaacttagttgctacctggaaactgtagctttaagtttgtggttgagattctgttgctagcagaaataggatacccaaaataattacttgaataacttttggacacaataggaattgaatcttttgttgttttgctatggaaaaccccatttttcttttggaatgctcacaaaattttattttcttttttggaaccctaatggtttttgacaatacacgaacttttcttgttcctttttattcttgtgttcccgattctgcaacttggaactgttggaaattattttaccaggatcttagatctactcacaagtatgttgattaacaccctaagtatgaactttctaaaacgatgaaatcaacacatataaagtttaggaaac

SEQ ID NO: 380403 - DNA, 3710 bp, Cannabis indica
aaaggatttgctgttcttcctgcacatccccagaacaggaggacggacatattttcactggtattttccatattttcgttatacaattagcacaatccgcgctgatacatgtactaaaatatgcagctgactataatattttgatgcagttttttgagaaagttgtatcctaactctttggaatgcccccgatcttatgataagctgcgatttgatccaaggtaacagctcgctcgttctctctgcattaatgctaaacattgatagagtattgtcagcattgtttatcttgttgatcccaaaatgacgattttggcttttatatagctatctttactcgactatgttgcttaactttctatttggaattgtacttcatagtaattttcttcatttgcagaaagcgtaaatgtaggttgttggttactcatgatgactacagcatgatatctaaacttccaaagcagagcacgtcggtagtgacaatactcagggatccagttgaccgtgtctttagtacttatgaattttcaatagaagtagcagctaggttcttggtgcatcctaatttaacttctgcaacacaaatggctaaacgattgcgtgctaaaacaactggtgtaagcacactggatatctggccctggaaatatctggttccgtggatgagggaagacctttttgctcgtgtatgttctctttgtttttccttcgtacttgctttacttagcttttggggttagtttagtactatgaaaacgaattcttgttgtgcaactaccagtggatgtcatatctttcttagatttttttcgctattatatttcttgagattcagcattcttaccctcagcttggatataccgatgtatgtatgtgtgtataaatgaacagagagatactaggaagcacaagggcttaaacaacatcatgagcggtgatccatatgacatgtcgcggatcgctatgccattgcaagagtacattcatgatcctattgctcatgacatagttcacaatggagcaacatttcaggtagatagtcacaatgcctttataattatttggtaaattgaatatttggtatattgacgatacatttcaggtatatttgggcaatgtaacatggaagtacttcataaaagctttcaattaaaactcactgtttttctgacatttgttaaaattcttttacctgtctggtgttcattgaagctcaactacctgacctcttatcttaaaggttgcaggtttgacaaacaactcctatactccggaatcacattttgtccgccattgcgtgcaaaagtataatgttctcggtcatcatgtgcttcaagtagcaaaggtgatataaattaatgtattctgcactgaacttttgttgtgaattatctaccatcaagtacctgttaataaaaagtaattaattgttaagtaatgaaattttttcggttatatgttctcttttctcatcttcaaatttgctaaaatctgcagagaagattagatgatatgttatatgttggtcttactgaagaacacagagaatctgcaaccatgtttgcaaatgtagtcggttcgcaagtgatttcccagctcagagcatcaagcccaaaatcaaaaataactgctggcaagaaatcaggttggtatagtgaccactttaatcacagaactcgagtttgtttttattcgaactttgattgaatgagtttatacctctacagaaaggagctctttgacttcggattccaagcccgataatgataatattgatcaggtaatcgataaacttttctcattgtaaatgaaaattcggtaatatctctacaattccctcactgcttttttgcctgtatgacagaacagcacttcaaatcaaaatagaagtgaaattggttcgcctgaaaatgatgaagctgtaaatgaaaatgtaagccactttatatgattctaagctcttttcacttagacataataatccaatgtgatctggtccttcacatttcaaaattatagctttgaccctatctaactccactctagatgactgtgggagaactcatggattcttatgaggtgtgcatatctagtttacgcaaatcccaaacacaacgacgcacttcttctttgaagagaatctcaccagcaaacttcaccaaagaggtattttaaatgctactctaaatgttagacgatattcagttgttggtttgatatatggtattataagaatggcattgctggtagcaatgctgagttctgtgttatagattttcggtttgcatgtggtttacttgtgcatgttcagtttagcccatattatttgcttatacttagacatttactataatatatatagggataagttcaatgagcaaaattgtacactaaacttacaccgaaatcgcacctttagatgaagaaagattcaacggtcatgattggagcaccatagtaataattaaacagtcaagtgtttcccatgcatactcttgccttattttctaaacttcaaaaaattctacaggcgcgccaacacatctctgatgaggtccttcgacagataagatcacttaaccaccttgatatggaactctacaaatatgcccaaggccttttcgcaaagcagcacaaacgcacaatgcagagttttgttggaatagtaagtctccacctcaatttcttttgacttgttttttatggtgcttataattttcttaagcgaaatgtgttgttatattcatagtggtctctgaagacactactggcatattataaatcagaacttttatgaggtagcgccttgcaaatgactaatgatattctataatggttgttaattctactaatagtgatatgacacttcgggtagtgctagcaatattctattgtaaacactcaatcatgttgctgcactcaaaatcatttctttttcggtctaataagaggacactggtagttttaagcttcttcctattttgtgtacatcttgataattgcttcaaagaagcatcatatgcttaagttgtttcattgaaattctatttgtaatatctaaatttgcaggagggattagaaaccttgttcatcaattcatatgacatctcgggttggaagctcctttcgataggcacagttgttgtctcacttcttatcatctttatacttgtaaatgctcgacgaagaacgttgaaactcaagatatgattaatcgtgaattgtaattactatttaccttttttcaaaagaaaaattaggaaacagatgaaagaaaaagtaccccccacatttttgtatcccatgcacagtttatattgactatggatttttggtggtcaactctcatcttgtgtcttgtctctcttgctcttaaagttaaaaaagctcaatttcaatttagggacttataatttccatatgggtggaaattttggcagtttcttaggcatgtgacatagccctattcattggaaaaatgttgagaagtgagattttctagtgcctcatttgatgttccaacacactagaatacattttgatcctagacaatcaaattactcgacaatgaaacccttcgtggaagagaaaaatgtggggcgccccacttgaattgtcggatttcttacatgagtttgtgttaggggtgttcattaaaccgtctgcattgcaccataccgcataaaaaatgcgagttaaaatctttt

SEQ ID NO: 380404 - DNA, 4207 bp, Cannabis indica
gggcaaaaatcctaattaaccttgtatcttatattcaaactcataaacatgatacattgtagaagcatctaatataattattatttttttttgaataagtgatttaaattacgaaaaaacaaaggttgacgcaaagagactttcagccaacaagccaattgtctagccaaaatgtatacaaagtcagaatatgaatcgctacaaaacaaagcgacttatatataaccaaattacctcaaaaatttgaacaaaactacttgaaactatcccaaataagacacctaatctaaatgaacaatttttataaacctacaaaataaatagaaaattgattagcacactaaacaaatgaaatgtttagaagatttatatagagaaataaccaactattttccttttatgacaaaattataattaatcaagaaaatttatctttcaaaacttcctgaatatagtgtcataagtttagttttaacttttagatttctcttctaaggcagaaaaaattcaataatagaatgcctacaaccacaacaatgtcaatacaaagtgaaaattgcatctaatattattttattagtataaaaagagaaaaaaaagccatagaatattattttattggtattaaaaaaaagaagaaaaaaaactatagagagagcatatgattatatgattatgatgattgtgttggttggcataatcgaatcggcgaagctaagatgtgtatagcggcgtttctatggcagacccatccactctaccccttctttctcttgctcaacagagatgaatatcacacccggtaagttaagtatatttgatttgagcttttctgatcagaccattcgatatatcaatttttctgaattgggtttttgtttttgaaggccgactgagccactggcatggtggaatggagacgaaatcttgggtgggaaagatggactagcaggggggacatggttggcttgtgctagagatggtaagatagcttttctaacaaacgttcgagaacttacttcgcttccacaatccaaaaccagaggagatcttccacttcgtttcttacaggtcacaacaatttttcaattttccacatatatagataggaccccattaatctactttgggtattcatcatatatgtcttgtcaagattgtttttttttaattatggctgaagattttgttttaattgaggttgtttagagagtctcatgggttaaaattatggcagagcaagaagaacccagtggagtttggggaggaacttgtgaaagaggcagatcactataatggatttaaccttattttagctgatatatgttcaaagaccatggtttatgtgaccaatagactcaaaaacgatcaaaagtatgtgaccattgtcttgcctgggattcatgtgttgtccaatgcaagtctagacactccatggccaaaggtaagaaggtaacgttactctcttttctttttatctttagacataatttgcattaccatttcccttaatttgtttctacaaattatgaggtttgaagtcttttctgggtaataattactatctcaaatggtgttcaaatatgtattttgttcctcctagaagttgagattggagccctttatggtccctattacaatggtttgttgtgttcatcaaatgctttagagcaagggagaagtttcaaaatattaataaatcttctaacaattatatgagaaggtttctttgctcctatatcatcaaacactcatggaaaagcttgcccaattccctaattctatcataattgattaatgtcttccacaaaaccagttatggtgtatgtgaactaccattgcatgagaatttctgggtcataatctgataagattctgttgccaaattactcaaacttgtagccaaacaataggcaaaaacagttggaaattaatgaaagagtagtggagcaatggagtagaatatggaaactgatattgaatatttcagaaagctaattacaagtaatggaagcccttaagcccctttgatgcagagaaaagatttactcaattcattgcatacccccttctctcttactcacctatatatgtatatatatagtaaaaacaaagactgatttaacagaatcatattggtggttttctttttcaggctcaacgactaggtgacaacttcaaagagctgttaaacacgtatagtgatggtgaactaccaccaaaagaaatagtggagaagttaatgaccaacactattaaagatgattatagcttattgcctggcctttatcctcgagaaaaagagtaccacttaagttccatatttgttgatgtagtcagtccattagtaagtcaaatattgttagtcagttattgtcaaatttgcttttcacactgaaattctcaactttgtctttttatcaaattcatagggacgttatggcactagaagcacttcagcattagctgtaaagtcaaatgaggaagtcagcttttatgagaagtcttttgactcggaaaatgaagagtggaatgaaagaacagtaactttccatatcaatagaggagaaaaatcaaacaacagtaaggtatattataaagattgaagaaagcaaaagaccccatgaacatatttgctttatttagtttttattacaacataacataaaaagccttatacatatattatatctacatatgttatgtctatgcatgactatatatatatatatatatcatgtatatgattattcatgaggtgcaggtgacacaagtgcaaccttcaccgcacttgcagtaggccttgccaactccagtggagacaacactcctagcacaagtgcaagggttgcaaccacagtgctgaccgcacgagcacttaatatggtcatctccactactcccactacttactttctctcctggtgtacacctgttctcacaaagatataattatgattatatatatatatatatatgttagtttagtttcttactttttgttgttcaaatagttctactttcccatataaattgttaaaataaaaggagacttgaactgacctgcaagccaggccaccggggcatggcacggtacagccacactggtcgttgcagactttcatatttcccgcagtgtcactcattttcaggcctccttgaagaaacttctgggatgattctagcttggtatttcatgtaaatatatatatttatatatatatacgatgatgatgatgatgaagataatactgacttgaattgttgatataaatatttcagaggtggcaattttttttccatgcaattgttttggtatcaccacgtaaggagtgtttgagcaaagtccagaatgtgttagttgcataagccaaaatcttatttggtcaaaattcaaacttcaccgactaatactttttatctataaatcaaatggatatatttagttcatctaagaatgaagacttttgagaatttttttacattttgcggtagcatttagtgctggggctggagtttttgacacggtatgaaacccgcacgagctcgagaggtacgagtatgattcggcatgaaaaaatatatttaagcacaacacgaaaatatatgagtttaaacacgacactacatgataagttcgaaaacacgacatgtaaacacgaataaattaataataataataaatatttatttatttattaaaatgatactaatattcaaattatgataattataattatttattatataattgagtgtaactattattaaaaaaagtaactaaaattataaaatacaaatatattttaatacttaagtcattaattgtaataaaaatataaaaatatagaacatgaatttaagcttttataaaaaaaataagttagtctatttaagaaagacagattatcctaattaaagtactatacgaatccgagcacagtacaaaattatcgaacttgcagactatatcagacctattctataaaatgtttgcacgatatgttacaattttaattttttttatagcccaatgtaacataatccatattttaaaaagcacgaaaaatatggattagattaacacaacacagttatttacatctattagcatctatctattggatgtgtacacttgaatctctaaggaggcgtttggttgggaggaatgaaaatataggaatagaaatgggaataggaataggaa

SEQ ID NO: 380405 - DNA, 2283 bp, Cannabis indica
aaaaaaaaaatgaaaaattctctgttgtgtttctttttatattttttgagtaatttatggatattgattgaattggttatttaggcctcatactgatgaatgttctgggagtgatttggatggagacatttactttgtttgttgggacaatgagcttattcctcctcagcaatttgaagccatggattatactcctgcaccaactatacaattggatcatgatgttacaataaaggtatatattattacatttataatagagttgatttctatttcaattcagtaaatttatcaaggctatagtgattaatgcattgagttcagatagagctgactatgtgctaagacaaatcaagtctgagtctagagtctaccccattaaaatttttgaaaaataatttgcttaaagtatacataattttgtagtattttttagaaactaccacacaaatttttaaatatttttatggactatgattaactatcttacattactttttttttaattttttaatttacatttttttattaagagtaacataaaaacaacataaatataaaaatagcatgaaacaacataatgtaaatattttgtgataataaatatttttgtaaaaaaaaaaattataatccataaaaatatttaaaaaactataactttgtatatatgtaatattttttttgttaattatgattttttttttcaagtgttattcttattctaatatttttactttttagagctttaactctgtttagaaaagaattaaaaaaactttctagttatgaatcaagaatagaaccaatcagaaatgcttggttataattttgaatcttttattatatgtttactctagtttttgatgttttttgatgttgaaactaagtacaaattttctattttgtcaataaaaacctcaatttctcactaacttaatcaaatactatatggtgttataggaaattcaagagtatttcacagactacattgtgaatgacagcttaggcataattgcaaatgcacatacagtctttgctgacaaagagcccaaaaaagccaagagtaaccaatgcatagagctagcaaagctattctcaattgcagtagattttcccaaaacaggtgtgcctgcaaaaatcccaagccgattacgcgccaaagaataccccgatttcatggaaaaacaagacaaaacatgttatgaatcacaacatgtaattgggaaactctttagacaaattaaggatgtggaaaatcactcaagttccataaaatcattcactaaagaaatagccagaaagtgttatgactctaatatggaagtagatggttttgaggattacattgaagatgccctgattcacaaaaatcagtatgattacaaattgggaagcttaatggattactatgacataaaaactgaagctgaaatacttagtgggaatgtggtttcaaagtcaagacattttaataagaaaagggatttggaatcagctaattatgctgttaaagctcttattaaagaagctagaagttggtttaataataacaagattgaaatatttgatcaaaattatgatgacttgtgtgccaagaaagcttcagcttggtactttgttacttatcatccattgttttggggagcttgcaatgatgataatgtgagtagagaccattttttgagctttgcttggtgtgtttttgataaacttgttttgattaaaagggataaagggggcctaattaggagatctttgaatgtttcttcattggagacaaagtttagtagtgctatagatataacttatgaggattaagtatatatcatctagtttgtataattatgtttggaagtattttctaatgtattgagatatgaagattgagtgctatgtgaaatatgtttgttttataataaaactcatataagatcatatgaaagttacaatagcaaattcacttattggacatttttgtactagaccttttaaagggtcgttttggtagattatctttctactgtttcaacatctagaaaatttgtttactttaatattttttttataatcacgtacattgtagctatttaaaatcacttataaattctgaatagtttacaatgtcaaaaattaaaatttgaacagttacttactatgcatgtaagaaaaaatagtcgcgcttacaacaaaataaattaatcttatttttagtcctaaataattataacatacacgatcataaaaaaaataaattaaaaaattcttctagatagcgaaacgaat

SEQ ID NO: 380406 - DNA, 2770 bp, Cannabis indica
aaaaacaaattcttaaccgctaagcttcccttctcatttctcgaactctcctatataaacctctatcaatcgtgtcacaaaatcaacggtggaaaacaaagaagcaaaaagcatttcatgggaactgtaatgggaatcgaaatggaaggagaaacagccaaagtcggtggcgacgtcggcggtggtagagacgttgaggcggtggattacttttacatgttgccggaaggctgcatagcgcatattgtgtctttgaccagtccacgagatgcttgccgactgtgtttggtgtcgtccatattcaaatctgccgccgaatccgacgccgtttgggagaagtttcttccaccgggataccattctttcattgtcgattccgattatcatcgtcgtgctctgacgaagaaggatctctacttctctctctgcgatcagcctctcctctttgacgagggtagaaaggtcagttcaatgaaatttcgattcctttatatattatttttaattaatttaatggttgtaaaatctgtacttttggactgaatcgctttttgattcacttttcagaacagtgaaattgaaattttaattttgataatcaatcaatttatggtttcttctcgattacttgattgtgcccttattctgttatgcaatactggaagatttctctctctaacaagatgaatgtaatttattttgtatttctaaatatatgactttattccaaaatgtttagaataaatattcaaaattaataaaagaaatactttaatatgaaagtgacaccattgtagtgttatagatgttttgcaatggtattagaaactaaagaagagtactttttgagttggaatagtactgtagttcacatctctatccgctaccactacaaaatctttttttttttgggtggaggtgggaacacaactgactttagttattgtgttttctttttctgcatgttttgtccacctttaactagcttattatgtatgttttcttccattgttgatgaaacttttcttctgtttttattctctttggattgatgaaggctctttcactgtgccatatgttgtatcggtctcaattttatgtgctgacttgttaatttgaaacattgctcagagtttctcactggacaaagtgagtgggaaaaaatgttacatgctgtcagcaagggtactatctatagtttggggtgacactccaaggtattggacatggattccatccccagaggccaggtatatacataaacacacacacacactatggcaatagctatatatcttatttatcacatgtgttaatatattatcatattgcaatatctatatatcttatttatcacatatgttaatatattatcatactgtcatactatacgaagaatgagtttgtggttactaaaatgtatgcttttgtactggttatcagatttggagatgtagccgagcttattagcgtttgttggttcgaaattctgggcaagattgacattcgaatgctgtccccatctacattgtacactgcaaatttcgtgttcaaatcaactaggggtgcttatggatttgaacatcaaacacttgatgcagtagtgggacttgttggtgggcaaaaatctacacgatcggtgtatttagatgatgaagcagggcaaaggaggcgtaggagtcagattgtgccgcggcgtatggggctgctttttagaaaccacagaaacatggaaactgaaatatcgacaaccagatcagatagggacatggacatggacatggatagggatagggatcgtaatgatgagcataaccatccaaaagttagaggagatgggtggatggaagtggagcttggtgagttcttctacgatggaggacaagaaggagaattggaaattaatcttttggaggtgaaaggtggaaattggaaaggtggtctcattgttcaagggatcgaaatcaggccaaaaaaggaactagcttagctagtctatataaaatataatatccattcacatatgtgctgacaagttatgctgaagttgaaactgactcatgttctctgtaatattcacaacaccatttctatgttgactataggacaagtctatggttgtttggtcacctgaaatgttcaagttgttatttgtgatgttatttttctttgatttcttcccatcttgtaataatctttcaactttcttaatgcaagtattattttttttttcctcaagaatgagccaggtttataaggggggatgtagtaattatcacatcccattaggtacttatatatttgtgtataatttgttttttttttaacataaaagccacttacccaaccgcctgaaccagcttcaaatttgatttctgaatattgattgttccttagtatgtattcttatttatacaaaagctcataacactattaattctgttgtattgtgtatgtgggcatcctcaaaatatactcaatctaaaagaagaaacaagtgcgtatttttcttaggaatttattcaaaagaaaaaaaaaattattttacctgtatttaattaaattatgtatcaaatttttagaatattattattattattattattattattattattattattttaagtgaaaaaattttaatcaactatacaaattgctctcaacaaatatagaaacatcatttaggatagagaaatgcaagtaaatgactttatttttaatttataaatagttaatgttcattttttaaaataataaaataaatgtc

SEQ ID NO: 380407 - DNA, 1468 bp, Cannabis indica
tttaaataaagataattaattaaagttaagtgtatcaaatttgtttgcctgtgaattatgtgtgaggtatcatgacatatattattcatgtttttctttagttcaacttttagaattgtatggtattgtcattggtttaaaaagtaggtaaatacatgtgataagaagattcgtcctttgatctttacctttatcattattattttcttttcgctattttcgaaagtcatgacgcaccaatattgttatatgtggattctttttcatttctatagactataggtaaggatcgaggaggaatcttcagttaattatagactatactttagaggcgatccaaagataaaaagtgttagggttaactttctattataattttttaattaatttttgtatttaaaaatatatgttagaatattttttttaatttttttttttcatggtggtatttgttatatttacaatatcatttgtgtaaatttaattttttttttgaatagtttacgtaacgaaaatacgtttgaagttttttgaaatcgagtggtaaactggaatatcagaaactctatttattgcgtcattgttaattattcaaaatttttaaaaatttacaggaatgatactgtaactataaccaatattattatgaaaaaaattaaaaaaaaatatttcgacatgtaatttcaaacgcgaaaattaactaagaagttataataaaagattgtaattagcacgttcttatatatttttattttttttcttttcataatatatacaaaaaaattaaaattaattatgtaaaagaaaagagtaaattacgacacaaatatttaagtttaactcccggttgtaaataaatattcaaatttaatttttggaggtaataatacttaagttatatttctggaactttgtaggtacctagttgttaaatattaaataaattgccacgtggcaatccctgattggtcaaagtcataaatttttaatttttttacaaaataatttatatgtatcaataagaaaatgatacgtggataatgatttgaaatttaacgttcaggtatctacaaagtttcagaaatataatttaagtattattgccgccaaaaattatacttaagtatttatttacaactgaaaactaaatttaaatttctctaaagaaaataaatatcggttcattttaaatatatataattatatatatataaatatatatatattgtattgtttgaatattttattcctacttgaatgaaatcctggtccgccttcgaattatgcatgaatattactattttcttttctttaacctttcttgtctagtaacgtagggctagagctacagttggtagtgagaggtaggggtgagtatcatcaaatccaatccaattgtaccgaaacgatccaaatccaatccaattacaaaaagttggatatccaattacaattggattggattgga

SEQ ID NO: 380408 - DNA, 1865 bp, Cannabis indica
acgatgcaaacctccatttttgcattttgtgtttaatgatggtacagggattgaatttgttgaaggcttctctgcatactagaaccgctcttacccatgtgttcttggggaatcccaactgattaattattatcttctcccatgcaaaaattatgaacatcttttatcttttttcactttaattttaaatggaatatttgatgagatgttcatgcattattaagatgttttgttagtatatcattaatttcttctcatgcattattacactttatatatattccaactcctaaattctgttcggctgaattggaaaacgaatagttgaatttgatctgtaaaacaccttataagatggatcaaaatgagcaagtttacaaagaatgtggtcctttcagcagctatatgtatgtgatttgaagagctccaaatgatggttatttggaatcaaaaagttgataaaacagttttcgttgaaaagcttatttttgtaaataaaaatgttcaaaacgtaaaaaataaaaaaaataaaaaatcgtgatgacatatttttataatttttctcaaattttaggtcataaataagcataatagataaatacaagctagctaagaaaaaactgggaagatatgataagagacaacaaggaattataggacaaaagcacctaaccattacaatatatcaatctgtttttacactactctgttctgttcgctctccagcattttgtacagaacctttatgaaagaaattcgtaagctgatcaacaaaaagcatatttttcataagctccaactgttgccactctttctccatccgcagatccaaggcctcgaagcgatcgatcttatctttgatctctttcatctgcagaacttacatgagagttagcaagcagttaaaaaactcagtaaggaccaacctgtacccaaatcattacacacctgcacttctaatattccagaaattgatctttcaacatcctgctcttccttctcgagttgtgattttgcgtctgccaaagctacctcggctgcatttacgctggcagtgttttcgttggatgtcacaacagcttctgcaaatttagcattgttctactcagcacactaaacagtgtaaaatagttataactcatttcatgagattagtggttcaactagagaaaccacacatacccgttatgtatgagatttttcatatgagatcgtagatcatttctaactgatccataatccccatcagaaagggctattacagcagctcgagcagcagcttcggcaacctccacaccggccaaagctgacagaaaggctgcctggaaaagtggaataaaatctggtgtcaacttgactttggctagaaaataatgacaaaaaggaccaattatgaacataaacttctatacttgagccatgattggattgctagcatcagcaaggggtgaaagacgcatccttttagccattgaagaggcacaagattcatcatcgtcgtgactgttgagcggattattcttgtcatcatcgacaccctcggaatctgcaaaaccataaactcctcaccaaaaggaagcttgataaaatgagagacacattccttctctcctcgtcccacatgccgagctaccttcctccaatcatctccataatgcatcactgcctccaagagatgcagggtatctttctccatccaatcagcccttgaattgtcattgatctcaacacgcctgaagtcagaagagcttacaccgccaagctgatagttcccccggacatagcaccgagcacagagagtcgtgtcattctgtttcaatcacacaccaaaaaaaagcaaaactttgaaagctcgcacatgtaaa

SEQ ID NO: 380409 - DNA, 2588 bp, Cannabis indica
tttctatttctatctttatttcttatatatatatatatatatctctctctttctcaccttctagggttttttttttttttttgatttggattttccaatcttcttgcccccaaatcaaaatcaagttcaggtttctctatctatgacttcgacttctgtgaagaataacttgttgcctccggggttggtctccaatctccaacaggtccttctcagcaggaaggttggtgaaggagaccaatccaaggaacctgctgctgattccacacaaccctcatcttctattgcaccccctgctgatgctgattctgttgatgccgatgttgacagttccaagccaattgttttggtcaccaatggtgatgggattgatgcccctggccttacttgcctcgttgaagctcttgtttctcaaggtctttacagtgtccatgtctgcgctcctcaatcgtgagtaatctcaatctctccctctgtctcatgttttcagatgggtattgcttgtgtcggttatatcttatcgtgtcttattttgtttgttattggcacatttgaattttgtttctttgaaattgaattctttagggacaaatcagtgtctggtcattctgtgactcttcgagaaacggtcactgtgaattcggcggaaattaatggtgccatagcttatgaagtttcaggtgcaattgtgtctatgtgtttttacactcttctcgttttcctaattttgttttttcgttttgttgtctatgcggtctttgttattgatgttgtgtacttttgttttgcgttttggttggggtcattgataataataggtttcatcatgattcttctactcagggacccctgcggattgtgtttcgttagcattgtcaggggcactgttttcttggtcgaagcctctattggttagaatctatgtgctgtaatctttaagtactatttatatctcatattggagccaagcaattcctaatttcaatatgatttcaggttattagtggtattaaccgaggatcaagctgtggccatcacaagtaagtgtcatttgtttccctacattgtttttcttcattaattttttattattcgggtatattatccaaaccggtgtatgcatcatataactttgctcctatcttgtatgagatctttcccttccttcttatgaatatgaactttattgaaatttacatattaaatcaaacatcaaatggaccaggttttactctggtgctgttgcgggagctcgggaagctatgatatgtggtgtaccatctttgtcagtatccctgcattggtgagttggttgtcaatgtcataactcatcagaaatttagttcccatttatttatggaatcatccgtttatatttggttaatctatcacaggaagaaggatgaaagtgaagaaagtcattttaaagatgctgttgctgtttgtttacctttgataaatgcagctgttagggatattgaaaaaggggtttttccaaaaaactgttctctgaacattgaaattccaactttgcctttgtcaaacaaggtttgtgttacttgaagtagtatcctcatcttgttggcttctttattgaaaaataattgtgatgcactatttgaacaccacctgattaatgtacacatgatataaaagatatgtaattttatttttctttaggcttacgtttaagaaagaatacaatttccattgagtgatgtgattgtgaaataaacccagtttttaattttcattcagattttaagttttctgatttgaggtgaaattatatatgataggaaaagaatttgctcttgagactgcaaaataagttctcctaaagcatattacttgttttggacaatttttcgttttgaggagtgcattgaataactattgttaccttttaatatttcaatgaaatattacagattgcttactggtataggtgtatctttagttgtgtaagtgtctaaaattacaaagtcttcaattatagagtacttatttttagggtctatgtagatcactgagactagcgtacttgtaaacttagttgatgtatgcttaaacgtgtttggcgtatgtctcaccattacagctgataataaattaagcaaactgtgcctgcatgtccaaatagtttattttgctgctataataacattagttacccggttttaagtacttgcaaggtgttgtaaagttattttataatcatgtgcaacgtttgtctcttctatccttaacagggtttcaaattgaccaagcaaagtacatggcgatcgactcccaactggcaagctgtttcaactaataggtaccctgcaggacattttatgtctaatcaacaaagccttgggattcagcttgcacagcttggtcgggatgcctcagctgcagtaagtggcttttattaaaagacagtgtaaacagttggcttacattttgttgctagttgttattactattaatataataatttagaccatcatttcctcaagaatttttgttcgtctccatttttcaataatggattgtatccttttatcagggggctgctcgccggttggcaacacaaaagaaga

SEQ ID NO: 380410 - DNA, 8069 bp, Cannabis indica
ccaacccccacaattgttacttcaagaaaaattgtcaggtatttctgaactttcacctcgtttgaatgattcagttccgattgttcttttactcatgttagctcgctgcaccaaccgaaccaatgcttcaactacttctgacatcggtggtcgaaattcgggttcagcctgcaccagaagtgcaaactcaaggatcagaatctcaaacttttagagaagatgaaacaaaaactcatagcttaacaagattacctgaatacaaagagcaatgacgtcggcaaagcgggaaagagacttaacaggatatagcccttcaagtgctggatcgaccattttagagagggcgtcgatatcatggagctggggtgatgcccatttaaccaatgactgttcagatctaggccttgagctgttaaaccaatcaaaaaaaaatcatcaaaaataacaggaaaaaccaaccaagagtaacacttcacaaattagaagacactaaaaactagttaggtcatttcaaatacctatcaaatggtttccgtccagtaagaagctccagcataatcaccccaaaactgtagacatcactttttacggaaaattgattgcccattagaatttcgggagcattaaaaccagcatctgaatggctgctcaaatactgcacaagtcatactcaaaattcagcaattgcctcaactttttatgttatcagaacatcttagcttaatgaagtcaaagctgaaaaaaacatatgtgcacatatccttggaatattatttttgaaacaactagatataacctcattggctatttcaataaatatatatatataaaaaaaaaaatataacctcattggcctgctctatatagtttgccaagccacagtctgaaaggtgagggttgagctctgcatcgagtaatattttggatgacttaacatttttgtgaacaactgatggcgagcaaacttcatgtaggtatctgaaaaacaccactttcagtaaaagcaatgaaattgcaactctagagaattcttaaacatacccaaaaccttcactgatagacttactctagtgcacgagcagtccccaaagcaatttttacacgggagttccaaatcaatggcttgctgaattcatctgatagatgaaggaagtcgtgcagtgaaccatttttgtggaattcatacactaataggtgttgtccatgctctgagcaatagcccatcaactctgtaacatttggatgatgcaaatgtgataagttcaaaacaatctctgtgaaatcttcttctggcgattgtctcgaaagaacagttgaatctattttcttgacagcaagaacctgtgataaaacaaggaacatgttaaaataaacagtactaattgcaatcagtgaagttggtcgtatttggttattcactttggccattaaccaagggcaaagattatgactttctagcccaagatgatggaccaacatttatttagttaatattatataccttcccatcatcaaattgagctcgatagacacgtccaaaagacccttctccaagaaggttatcaacacagaagcttccagtagccatctgcagatctgctacagagtaggatgtgacatttataggagcggtgacacttttctttttgacaacaggcttctttgagacaacgacaacatcagcttcatcgaaagacttgtgacgttcaatgggaggtggtctaagatttattgaggcaggaggaggagcatcaaaggttttggtgtccaatgtggaagaagtttgtaccgacttcatctctgcatcaatattccagagacaaaaaaaaagcttagcacaagcaatagtagcaacattattctcagaaaaaatgaacacttagtacagatcctgagtaaactaagattacatgtcaatacacttgaagaagattatttattacctatctaggctgtctgctcaaaactacaatattttaatgcagagctttctatcaacttgatatgggatttttttccttatttacatatacataaattcatcttttatggcttgaaaatattacatattcttttcttttttgtaaattatttattggtacttagatcaattgctggaattgtaacattaatcttgtatgatattgctggtgacactcatttagaagattaaaacctaaaacaaaatgcaaaataatgtgttaccttgcacttcatttgaagcaagaggagcgaagggttcattaatcttttctatgtcaggggatgatcgctttttggatcttctctttacaaggaagaaagctataattcctccaacaacaaaaatagatatcactattcctgctatacctccagcccctataccagaacttttaccaccattgccaccatcatccgatgatctgttactgttgggagacttatgaattcggtttctggttgctgggggtgtaccaggtggaggtggaggtgcaggccctgaactccacgcgttaccttccctcctgtcaagttggtttacattccttcataagaaagagaaagaagaagggggacaaaataaaggagcaattactcgtatcataaattgcttactttaaattaatgtttttgagttgttcaggaatccaaccagtaaacttgttattctccacattcctgataaacacaaaggtagacaaatgaaatgctgtaatgagaacacccttccaccccctcccacaacccgaatcccaaccccacagaaagaaagagagaaaatagggcatatttggctttctaataatactctggttacttacagagtttgaagaggaagattggcaagaacatcaatagtgccggtaagctggttattctgcagatacctgaatcaaaaaggacaatcagatatggggtaagagactctaaccatggtttagaaccacattaatcaaagttatctacttacattgaagtcacacttgtcaggctgcttaaactctcgggaagattacctggtatagtattaaacgaaagatccctgaggaaaaagatatgaataagaacaactgtctttatatattacatagatttatacacacaccgcatcctctaaagaaaacgtattactcactgaaaattacatacactgagactagataaaaattgccaaaattacataaacaaaactgatcaagcaaactttatcaaatggtttaattaatagaaaacaaacaacatgaaacctttaaagttttattaaaagagtttgaatccctttcttaacttctaaatgggattgaaaagaaattactaatttgctgtgaactctgtagtcatataaagcaagcatctacataagccagttcatataagattaaagctcaaactcacaatactgagagggaagtaagctttccaaacacgtcgtccaactggttctgaatctgattgtggctcaggttcctacagtgaagaaaacaaatgtatatctattaggtttccgtttgttgttcatttatggggtgtcaattttgacgaaccgaaacatagaaaggaaaaaacttacaggtattgcagagaagtcataagtgaaatagaataagggatgccaccattaaaggtattgccaccaagatttctgaaacaaagacaacccaaattatcaatccctccaaagaggaaaatgaagaacaagaacagcaaggaaagcaataagagaaaagcttacaatcttgtcaagtttggaggtagagcataaagaatattgccaccaagattattattgctcatgtctctgcataatttgtcaagagaccataaaaattaataaatgaaaaaaacaataataaatataaattcagtctaattatataaagaaacatgatcttacaggttggtcactgctgttaaaggtgctaggttatatcccattgaaccagaaagctggaggttcggtaatttactgatagaaagaataacagattcagaaacaagtaacgaggaggaaaaagaacatcaaatgtaaaataaatgaagaatagaaaatcacatctctgtcactctctggcccgaacaagtaattcctagccaattttgcccacatggatcatcaccatttgcattccagccggatagctgaccgggattgttcatgctagtgaacatgatctttaaagcagaagctgtacataaaggtctgctaattagaatccacatagataaaatccatactttgaaaaggaacttcactaaactttcttattcatctcaagtttctatacagataaatgaaaattatgaaatgcatttcagacatcatgtgaaaactatttgattcataaaaatcgcttgggggggcaatttttatttttactctattccagaaataaaagtttcacgaacttgtgaccttaaattcagaaaaaccctctttttgttttgctaggatattcaatgtcatcgttgcaaaacccattataaccactaaaacccccccccccccaaaaaaaaaattaaagtttccatggatgaagaggaaataaatatgccatttcccgatgtatgaaatggcgttgatgttttcttggtgaaacatggaatcgaacaaaaatggcggaataaactccaaaactgttgaatcaaagtaagcagagtataagaccaagcttcagtaatcctggtgcagcctttgtccaagaggaagagtctaaaaaatggcgactttctcactgatattggattttttgttaaacaacttacccatccaacgactcaaatctacaatatgtaacaaaaatattcccctgaagacccaaccgacagttctaaaaaaatttcatattttcccaaaagagagaaaaggtcaaatctttgatgaatagactgaaatttagtacaaacccagaacaaatctgccaaaaaaaatccgtaaagcagcaaaaaaaaaatgcagatgagctagatcagttgaagccatgaaagtgtgaaaagaagaaaacaaaacaatggtagtcaaatagaaaacaatatacaaggaaaagataaacaaaaaagatgagatggattaggcactgaccatcatttggatctgtgacggcattaatggaactgggtctccagcccagaatgcagacaatgaagaacaccaatacccatctccatttttccgacatctccctcattaccagctccaatggtcactatccaaaacaccactcgctgcctagactcacctccaaagctaaacaatcaaggcagctctttttttcttttcttttagctaattctcttaaatttaataattttaattatttttttctctcttttatcaacaagaatttttcaattactatttagccatactcaagcaaagctggcaggcacgattagccaaaagaatccaaagccacatataaaaaaagactcgttttttctcttatcagcccgttggcttctctctctcctcttttttcttagaatttgattgtttatttctctctctctgtccttttttttttggggtatggagaaataccaaaataaactcttggttggtgtgtatgtgtgtcttgtacgtgtatatgtgtatgtatctatagaccatatctcatctcctcctcttttagctcactgtaattgacactgacagaatattaataaatataaaatagggaactagtagctttcaacaggattacacgctttttgagtttttttattattattattttattttattttatttttattttaactttgaagtagaatctaaacattagactatttaatgattgagtaaaagggtatttctttagtggcttggcttccatagcaccttgtctcatattcccttctaaatcccatttagtaatacaaaaaacaatagtgggatttttcattttttatttttttaccttttggctataaaataatacgtaatgggattttagtgtagaaattgcatatgcaaccaaaaatggaaaaaaaaaacataatgtttagatctcaaatagtaaagagtcacatgattcttgtcacatgtcaaatagggtattgacagattatatgttggtagtaatctaagcttaaattgggtttagtttatcttagtttggtaaggttttggtaatcttcaagaatatgtggttgtgatgtggaaccagtcaaatgaaatgaaaaagaaaaaaacaaagtttaaggcaagcaacgaagaattaaagattgaaaataatggatctatcttatcttttgtgagtatggtcaacttcaaatccagcaaaagctctaagttacttcttcttcttcttcaaacttgtgattaagtttttactttcaattcactttttttgcatcatcatcccaattaaataagtatcgtttggaaatattttgagttaggtgaatcaacaaatctattccattttcctcaaaatctcaatgtggtcttctcatattatatatattaagggaatatattagtttattcatggttgtaattggtcttctacctcaatagtccgttgagattaagaaaacgtcaaatgaagttaatataagacataataaggataacattaccaacagaacaaaaggattcaaacacgcggcatactacctaatcttaaatattgtttattataaaactaagtattaattattgagtaattaactatatgacaatgacatatacaatgtatattgattattgatcattattgcatacatattttttcaataggacatatatatgaatttgagcatcattttatcttaaatctgaaatgttaaaagaatcaataaccacaaattacggttacggtgggaaatataaatatgttcatacaatgtaaggtaattaatgtcaggacaatttctcaaagtactagtataagattaagacaaaaataaattcgaattattattattattttttgaacagcttaaattttccattttcaaaataatatgatttaagtgaaatattagttctatcgaaactattaaaaaatgtggacataaaaatagtatggtgtatatactacatctcaagttttaatctactatctctaatgttaaaaacaaacttaataaaagtagaataataacatatgtaaagttgagtgttgcctactgtgtacgtaatatttgttatgctatatatttatgtgaggttagttgggaatttgggatgtccattgtccactatgcacaatttttttatttatttatttatttttgtgtaaaagtacaaatttttaaattggatatgcattagattttggatcataacacttatttggttgtaactataatttgactcgtttataaccacactacttataaaatcttttcaaaaaataaatcaaaactttaaacattccatccaaggtaatgtcatgctcaattaaattggaaaattattaaattccattaaaattagttcggtcaattcttcccaaatgagataaatatatatcttaacgaaattatttcattggatgacaaattggtacaatccatcaaacttaagaccattttcaatatgagatataaaaattgtgctatatttggcactaaaaaaagtatttttgtgttaaatttacatcaaattttaactttgtgctcgaatgtacaattacaaaattttaatgtaaaatttaatatctaattaatatttaattaagaaaatagaaactaataaatttattatcaattttattattattttaatatataagacaatcaaaaaataatataaatatttcataatttaatgtcatagttaaataaactaataaaataatacaaataacataaatgtaaataaaaaaggataatttacatgtggacacgtatttgtacatttaattccaataataacttagtttttctaattattaatattaccgctactttataccgtttttaaaatttaatacaatcctattgctttttgaacacgctgaagagaaggatgacgtcagcgacagttggatgggacgcgcgtcagaaggtgcagagcacatgatcacagttttccaaattttccaaaaaaattttaatacctccttctgtaaacctct

SEQ ID NO: 380411 - DNA, 1171 bp, Cannabis indica
ccccaaatctgaagaaaaaaaaacacatgaaatgataatattagctgtagagattaatgtcttttctctcaactaccataagaagagaaacaacacacttacgatatatttaagtaaattcttacaattgaaaatgagagcagcgccaactcttattatgcataacaataagagcgttccatagttaaccaatccataactttttttttctttatcaatgaataaaactatacatagaatactttacataatcattaaaacattattacgagcagatggtgagcaacgtcaatattctccataaaagaaatacgaaacatacataaattagataaaaattagaataagctcaataattttagatccaaaacaaaataatcacatctgaatactgttctaataagaagagggagatgaaatatgaaaataatcatgcctagcatacaatgagtaagaaaatcaaaatcatatttaaaatgcaaacaagaatttgagagagttatacctaatcatagtgtacagattctaacttctgatcggagagagctgagagagtaggagagagatgataaagtgagagagatccaatatacatatatatatacaaagagagagtgagcgacttaccatcgccctgagacgaagaagacggcgacagagagggatcctaggagacgacgcaggcacttttggatttgaggttttctggtatttaggggaatcggtttcagatttagggatttcttagttaatgagaaagattagagtgaatgctgaaacgaagagcgaagctttttatttcgcgcgaaatgatttcggtgggaaatggattttgggtactaaataaaataattattaaactattaataagggcaacttatcgcccctaaacaaaaaatgttgtccctaaacatatttaaaataaaaataaaaattggagcacgtttattagcagcgacagatggaagtcgccactaatgacaggtgattaggggcaaaaaaaggtcacctctaatattgtcgctcctaatgcttctttttgttgtttctgaaattaccctaggtcaagcatgcttaactgttgagttcttttatgatgggctactagaaaacaagatgcaccttgttgatataagtagtaccaatcaatccatttaagccctcttcaact

SEQ ID NO: 380412 - DNA, 727 bp, Cannabis indica
cacatgtggcttaattacaacaaggagattggcactaactcgaagagcaacccaatactttgtatcactgtattattttgataatattcttgaatttaagcattgtaatttgtcctccaattaataccatagcttataatcttgttaagttagctatttagcttgataatgttatagtttggtggcgtcatgaacttccaagctttatttgagttaatttctctatattagtgaacctatgtggtgccacatattcaagatagcctcacaggtcgttccaaatattttatcaggaacgggtattgccgcgccagaagtttgggaaggaagattcaacttttttttaaacgataatattttgaaaataaaaacaaaaaactcatgaatgatgccatcattcctaataagcagtatattaattttgttttttttttaaagtaaaaaattataacaatgcagtgtcacgcatagaaatgtaaatgggggagtagggtctgacctgatccattaagttttttagtcgggctgggtttgatctgatctggtttaatcaggtcgggtttgacccaacctaaatctttctcattttttgttattattttttaagttaacattttaaaaaaaaattaaatacacatttatatatatatatataaatggtgactattcaatggttacatttttattgtaaccatatggttacatttttatttgacctgtaatagca

SEQ ID NO: 380413 - DNA, 1421 bp, Cannabis indica
tcatgtccatgaacataccctgcaaaacaaaagaaactatataagatacagaaacaattgaaaaaaaaaactcaaaccttccattaacaatttctccttcttacatgataatcgtctccatatttctcaacaagttgaccaatatgaactcgttgaatagttgtcaatggttgcagctgtgcagttttcccatctcttcgttgctttcctaaggccgacttcaaatctaatgccgccattaaaaatggtaacttttattagaagaatgaaattttagacatgaccaaataaaattctcaccgattttgcaaaatgattatcaatataacctaggaagcatattttatacaaacccttatggttgattaccctatagtgaaaatggtactttgctaatttcactattacttctttcttaaaattcagacaagacaatccacaagattttcacatatgcctactgggttttcataataacaaaataaacaagccttaagaaaataacaaattaatcctactatagaattttgtatatactcctataagggcaaacgcacaccagacatgataaatctataagaaaaaaacacaaaccatacaacgattgaaaaactaatataaaattaaataacataagctttgtcaaattaccgtcttcttcaaggtcgcttccggtatcaatgaggtcatcgaagtctttatcctcatcggtctgcgaagaactcggagggggtacgacttgaagagactcaagttggaccatgtgagatgtacgttttcgaacgccgagcaaattaggatttgaaacgaagccgaaggacttgtagttttggataacgctggctttgtcgtcccattcgggggcagaggcgttttctccgatcaaagatcgaagcttgggagggacgttaaatgctggcttgaaaacatgtggcttcttcggcggtagccccacgcgtaccttcgtcctcgatctcttgtactttcttcgcgaccctcccatctctgaaaacaactagggcaacagaagaagaacgaaaagggttttagattggatttggggtttaggttttaccctttgctctcgcccaaaccatttaaacgctgtcgcatcgatgcgaagtgcccaacaataaatatttaggctaattatcaattttttccgccgaattttgacatataccaaattatgcccctgaactttttttgccgttaaaaattccccttaaactattgagatggttaaatttaaagacttttgtctaatttcattcaattttactgtttcaagtactaaatcatgcttcccagactttgatatctaccaaatcatgtccctcaaatttttatatgtattaaatcatgctccctgaactttcatccgtgttaaattttttttattaaaattagacaaaagtcct

SEQ ID NO: 380414 - DNA, 664 bp, Cannabis indica
aaaaaaaatactagatctaaaattttcttcacaaatcgaaacccctaaacagaaataaaaatctacattcgattctgcatttgaaattgcaaaaaataaaccaaaataccaaaaaaaaaaaagatctgaaagcctaaaccacttgggctccacctgagctatcgtcgacaagaaggatttttgccttgcttgccatcatcgacaggaagagagagcagagagagagagagactagtggagtgagagagaaggttcagggtcctagatccaccattaaatcaagtgatcggagttcttacgttcttgggtttcttggtttgtgcatttgtgctgagcgagcacatcacaatcaacaatgtgtggctctctaaggaattcacatatctattgagcgaatacattgcagtcagcagcgcgtggttcttcaattaggatggattggcagacgacctctctaagtttggctaacttgagatcttctcccaaggattcttccttcagttggagacgcctgtggaggatcctcccttggaggcaggagcctgccacttggatccaccgggatacctgtatcagtctggccactataaagtcctgccaagtaatcctggccgcccatagacttacaggtgttaggttatttttagtattaattttagattaa

SEQ ID NO: 380415 - DNA, 1431 bp, Cannabis indica
agagagaaagataaagctcagtaagagaggactgaaccagggagcaaagaataaaggaggaaaataaagagagaagaggtttaagtgagatgtagagttgaaagtcggttgttgaacattaaacgctttaagcttttcttttaaatatatattttcttttccatttatttatttctcttgtctgtgtttcgaattgagggttgggttgggttttaatgttttaggatattattatttattattataataatgaaagaagaagagagagaagaagcggttagtctgtatgaacagctgggagtatagatgtatagatagatataataatctttggttggcctgggacaagcctttatatatttgaattggctttaaagtttcaaagacaaaggctctgtcattttgagttaatagtgtttgtttagtataattataatttatacttcttttctgtcaattatgtttgtagtgatgaattgattactcatattaggtgtatgaaaagatcactgactatatatgggccctacatccagaaaacatgggctggaataatgggcttgctatctgatccaattccaagctctgttcacttggcccagcttggtttgaccagaacggtcactgtgtaccgtcgtgtgaggctagtacataaaatatctgcctacggaattttgatacatatcttacaaaaatactggaattctgtctcacagtaaaatagaaaaaaattgagagatttgagtatgtggtgtaaaacaatttacaaaataatacataatttataaattttacacttaagattagatttatttcatatttttatagattttttcatatttatatttttacagatttttacttcctcttttcagataaaaatattatttttatattacttctcgtatcaacaaaatcaaaacaatgttattataaaataataaaaaaataacacttcctattttcgtaaaaaaatcaagcaataatgtcaaaataataacttttcaaaaataataaaaaacaccaccctatttttttcgtaaaaaaatcttagaaatgtaaataataataataaatctgtaaaaatataaaagaatactttattataaaataatatacattactactttatgaattaatatgaaataattcttacaaaataatagtttattatttttatattattttattatttttaaaattactttttcagttcaaattaaataacaaaatttctattcttaatttttactttttttttttggtaaatcaactattcttaaattataatcaaaataattttcaataaatatatatatatatatatatatttatacataaaatgtggctatctaacgttattggttagttaaataaaatattttaagaatataggtatattctgttaaatttaacggtattagtagagtt

SEQ ID NO: 380416 - DNA, 1803 bp, Cannabis indica
ttatttttttattaggagattcttcgtcccgtcctcgtctcgattaggagatttcctaccccattcctagtagaaaataagtcgggatggaaattaaaattcttccttgtcctgtgtgcctccctaaatacaccaatcaaaataacataacaacatagcatacaatttctgtttttaacatgtaaaaaatgaatatttttgtaaaaaaataaataaaaacaatgttactttaaatattttaatttttacttttattttcatatttttttttttaagatatacctacttttatagataatattttcattatactccttaggttaatataaattatgtgctaaatttaagtagagtgtgagattatattaagcaacctactcataaaagtgggtacatttttataaaatttaatatgaaaatattttgattaataaatataaaaaagtgatatttatcaacttatccatatttagtgcgggcccttacttacagcaaaggcccaagacatttttgtcattttatataaagtgcaaaaactattataatgtatagtgtatctttattttttatttatttatttatttatttattttttgtatattttcataaatgagatttgcattacttgacttttaatattgtgtaattaacaatattcttccttctattttaggttaatgagcaggttgaattggcatgcatgagctggatttgttggattttttttttcaaaaaaaaaaaagaagaagattagtgctcttaatctttttggattattctcttttgttaataagggttatgcagtaaatggtgtaatttggtttgtctaataaagaacaagtgaacaactaagcctgtaggtgaggctttctcttacatagtttgtatttgtactaggaaattcaggcttttctttttggtctttaatcgcaaagtttgtttttgtaatttctattattttgttgcaactttccaagtttattttaatttattaatatttgtggggtttttttaatttataatttttctcataccatacaaactggcttaatattcatatccaacaaaacatttcacaattcatatttaaaataaatataattggtttgaaaaaaattactaatgtgattgaaaatattaatacatagcatttaagtgtacacatcatttactctatgctaatttttttttaaaaaaaaagttacaaattttaattattttccaaaataaacatgatataaattcgttcattcaaaggataaaaagattacttttagaatttgagataagatgtatgaagtttcatcttaaaattaattgacaatgaaagtagttgtctattcatcttacatatgataatttattttcacacattaacaatgtctaacgataaaaaatattttattatgataattgacatatcattaataatgtcataatagactaagtgttccacctataaatcttttttagatgttctactaaaaaactagcatgtatcatataacacattttatttgtacttctaataaaataaggataagtatggagttagtatcttgtgtataattataatatatatatatatatatatacttttaggtaccaattaattcatttaagtcctcttcaattgtgtagtttcatacctatacagttttagaattatcacacttgacctttctcaagcgatgtgggattgcacagcttacccggtatttctccttatggatcacaggactactaactgtcacaatcacccccttacgaggtccaacgtcctcgtcgaccacacttccagct

SEQ ID NO: 380417 - DNA, 1685 bp, Cannabis indica
atgtttacttttctttgtaaattggaggtcgctgaatattaccgttaaatatcaactggccgaattattaatgtaatgatttcgaagtatcgctaaccaatcacaatgaaacgtgtcttgaaagtattagacaccaccggtacctaataagaatgctcattaattaactatatactaattaataataaaaatggttttatcaatctggttacagttgtgtcataattacgaaaacctattagtaagttacagattaccgcgagtatgtgtgtgtatatatatatatatatatagttccaattataggctatatcttaaccatcgaaacactgattttcatttagttttcgaagagattaacgttgtaataatcaataagcgctcacacacacacacatgtaatctcgatctctatgatcacaatttaatttgaatagtctcatcattaagtttccgcacaccatcatatatatatatatgtcaatttccatcgaaaattatagtaccataatatttaaccatatatatgcatacgcatgctccttctccaaaaaaaaccactgtttaatcaacaaaaatgcttagtgtttcagtctaaataagtggaggctgtttcaacaaaaatggttcataagtcaattacttatttattaacttaattggttgccacttgccacttgccacattgatactcgtgaaatcatagttatgtagtttggttattttcatgacataaatgctttcactactaaaaaaaatgaatttttctaatgtttttaagagttgggtatgtcattgatctttatgatcgacgcctgttcggccgtcgcaaaaataaatagtataaacattggtagaaaatcacatgtatgtctatgtcctaattgtttaaaattatcggtaataactggcattatagttgacaatttagaacagccaacaaagaaattgtcaattgttcaaaatcatcacattaaaaaaaattcagatatgagctacacgagccctaagatctatcaaaatcaaactaaataaatacagatctaaaacaaatcaaaatccatgaaatagatgcacaaaattaaaaattctaaacacataatttcaagtttcaaattaataaatttatagagttggtcgggttcgatctacagcttcgaccaactgggatcccaacttcgacgcaagtttggtcatttgcgagcccccaacatagaacaaccacaaatctgtagacaaataaaaaaaaggtcaaagattcaatgaacagagagagaacccaagatccatacaataaataaaaatagagaagaaaaagatgaatctaaaaaacagaaaagaataagaatttgaagaagagagaatgagatgaggtcgatagacatttacctcatgaaagtttttgggggtcgaagatctcaaacacgtacttcatttgggactatcagtcatcgaaaatgggttgagagagaggtgatagtagagagagagagagagatagcgaatgagagacgatttgaaatgttttgagcgaatgagcggtatttaggttatttttgacagttttaagagagagggaatgtatatccaaacaatcaaagtatattaaatttcacttttcagatttcaatttgattcatgaataaaaaatataaatagccagtgttacgaaatttatagacaat

SEQ ID NO: 380418 - DNA, 1250 bp, Cannabis indica
agagagagagatcacaattaagaatatagagacagacacacatctctatcttgatttatacattgagggttgcttgtattagattacctaacttcaacgtagagaaggaattgcgtttttcagtgtatatatattatacatcatttttctttaatcacttgagaattcgaactatgtggcaaaaagtccatcctaacattattatgtgttttgtgtaattaagagtcgtgataatgaaggcaggtgattacctacttttattatatatatatatatatactcttagaccttagtagtatttatatgtgcataaattgggtaattaaagataaataaattgtgttggtggttaggtgtgggaagtcggaagatctagagatgaattgtttattggtgtatagagcagtttaacacctcccaacctccaattctctcttttttatgaatttgacaaattggcctcgtaagaataaacacaccaattaactcacattccttattctaaaaaaaatcaaactatcattagcaataccttacctaagtatccacaaatatgatataattggtcctaaaatacaataatataaatacattaacttaccctttgtagtttgtttgttgcaccatttctaatgatttttataccattcatattgttccacattatttgggtaagcatttttttcaataatgataaaattaataaaaaaaattatatttttttacaaaattataatatatatatatatatagcaatacatcatcaagatgctcttatattagttgatcatatattttttatatggaaagtgttcactctgttttttcaagacaaaagattttacatgcttcaaccaataattcaatttagtttaaagtagaatagaacttgcaatttttaatttacaatatatagcaacattttggtttgctaaggtagtgatctagtgtatagaaagactattaaaaacctatttatacgcaaatgtaagccattagtactaggggcgaagccaggacaaaatatttagggaggccaattgtagtgaccgctttagtaagttggatttgtaaaggcaattagtattaatttctgttaattttataattatttatgaatttgtttatttgtgaactccagtatttaagaatgagtattagagttataattaggggtgcacacgggtcggattttcgggttttcgggccatcggattcgggttttcgggtatcgggtattgtaaatctac

SEQ ID NO: 380419 - DNA, 3921 bp, Cannabis indica
ttttttttttttttggttcaattcattgcaagatgataaaattaaagattaataaaaaacctaaaaaaaatataaaaatgaagaagaagtataagatatcacaatatttgaatattgtccattgagtatggtatgaatatgaagatgaggtagtgcatggcgtgacaagtaactttttcttgtgactaaaagtcatatttcgtgacaaaatatttatgttgtgactaaaagattgtcactaaatgtaattattttttgtaatggtggtgtcgttgaagattgtaaataacttttatcttcttttagagatgtttttttacgttttgtcaaattgtctgctaatgatcaggctgctcatcttatggctaagaggatcttgtttatatgttgatcgtgtttatttaaagtttaatctcctatttgatgttgttgatattgttgagaccgaattagtttagttgaattaatgaaattcaattgaaaaaacccgtattatttaaaaaaaaaaatcaaaaaaatattttttttattaattgacaatcgatcgacttcaattcaaaaatatgaaaagtacgtaactagagggccaagaatttattatacatacatttattttttcaatgttgaagaaatgaatattctttgataatggatatgaatgtattatatgttaagtacatatatattctttgataatttgatatatagtgaatttattagtggagatgtacttttttcattttaatctcctaacttatagttaaagctaaaaatatgtaaaaatgtaatgattattagggcaaagaatattttactttttcatcctagaagaaatgaatgtataatctatataacatatatataaaatattataaatatgtacatttatgagagattttatttacggaatatgattattgccctatggttactataactattgaattaagattgagttaatttaactgttgaaagcctaataagtacatcaaatcgagtgtagagtacattccacagaattaaattacatcaaacaaatttatagtatatcatataattagattttcttattataataaaaggataaaatctattcccgtatataacattaattcctcttcttcaagttgaagtaatacatttcttggtactgcacgtatgtgaataatattataacttgtgttttccaagaatatttttgttatatataaatggcgttacgtgaaaatgtacaaatcaaataataaatttataagcatcaaatatttgaatatgatcatgtcgacgttgttgccaaggttcgtggttctcaagtcgatgtcgaacggcaaatacttgagaaagatgagtgaagaggagagtaatgaaaatgggatgaatgcaacattcttgaaatttgaaggagatgacattacgagccctttagtaaagtttgcagtggagatagcccaaagaaatcgggagttcgtgcaccttcgaagttgtcacaacaacaaatacttgaccatagagcccaatcataatactctcaagaggattgtggctggggccgatgaacccatagaagaccttgattcaccctcatgtactatgttccagcctatcaaagctaatggttcaaatgaaatgataacatacgaagagttgtattttcgatttttccacgcggcaacaaacagttatgcttgtcagatagaatctgcgtcgagtccttacaggagtggtatgtttgtatataagtttttaaggctttctgattcgagtttgttcaaagttttggattgggattcgcttgtcatattcccaaaaaaagtatcgtttaagatggttgggcacgagaaatatcttagcttgcgtcaaatccaacgtagaccacatttgcaatttgttggctatgacaacggggataacacgacggagtatgagatatctacctttggtgatggctatgttcgcataaaatcactctccaataataaattttggaggcgcagtcctaattggatttgggctgattctgatgatgagtcaggaaacaataagaacacgctctttcggccaattagagtcgctgataacgtggtggcctttcaaaacatggggaacaataatttttgcaagagccttaccaccgaaggcaagaaaaattgtctgaatgcagctatgcccaacatcaccattgattcgaaactggaaatactagagagggtccttgaaagaagtatctacaacatcaatttccgccaagatgagagtagagtctacgatctcaaagtcatggatttggtccccaaggctactgccgctaactacaccaatgaagagaacaccttagccctcaacttctcgtacaagattacaaaatccagtaccttcagtggcaatgcttcccttaagttaggagtcaaaacaacctttgaaactgcagttattccactcatcgcgaaggggagtgttgaaatttcaggtgaagttacaatcggacttcagtgggggaatacaacatctattgaaaccgtaaccgaaactacctatactgctagagtgcctgctatgactagggtgacagtcactcttatagcaactcaaggaaagtgtgatgttcccttctcttatgttcaacgcgattctctttacaaagggggtattagagtcgcgaaaatggatgatggaatgtacaaagggatcaatatgttcgattttcggtttgatagccattatgaaaagctggttgtaccatgattattgaagatttatgtcaccattcgagtcctaagctggaagatatgtactcaattatttatattaaaaattatacacatttaaaataataatcaactcctataaatatacatgtaagatattaccaataaataatactagttgtcattatatgtataaaaataatattatccttagtcatgcatcaaatagtttatacataattcataatcatcatgtatctagtttttttatgccaatttataatctacaataactgaaagattgtttatgtatctagcatttgaataaagagtaaatactattataaaattgtgttttacaaaaattatagatagaaccttctcgttttttaaataaaaaatcagaccctttctttcctaagctcaattttcattaattttttttttaaaatataaccaacctgaagttaatttttagcacaaaaatataaccactttgatcatgacacctttaggtattaggttattattaaattttatttttataaaaattgagctcaggatattattggattttattttggagagagagagagagtaaacggttgagatgaacaaataatggtagggttatgtgtttagggttatatgataaccctaatttgaattaaagagagagcgaaatagagtatcgatttaaaaccgtcggcaattttatcgacagttttaaagggttgctttaaagtgtggcgatgattttaaacccatagtcaattttaatctcatcgttcctaaaaaattcaatttttgtgctgacgagaatagtattttttgtagtggtactgaaggcaccatatagctttttgatcatatctagatatccaaggaacatacattcaatgccctaattgcctataacttttattgcttgatgtgaagataagttgtacaaccaaacactctcaaattatatccaccatacagtgatcggtggacaattccctaacgtacgattcatcttagaacaatgccaaaacatttcgaatagaaaagatttgatgaaagaaacactcctttgcttcatatggctaccactttatcatcatcatacacattctacaagctttgttgtctcaccccaaatttaatagtactactataaaaaaacaactatttttagtgataactttttagtcacaatataaattttttgtaa

SEQ ID NO: 380420 - DNA, 7174 bp, Cannabis indica
gtttggaaaattaaaaaaaaaaaccgcatatatgggctggtttgaaaaaatagtcaaaaaccacaccactcgtaccgcgaatacccttacatataaatcatcaccaccaccattaatttaccatataaattattgttgggtgttcaactaagtttaacattaattaaaaataagaacaattatgaatatataaaaatagacaatatatttattgtatgaaattttgttggaaaagtacctaaaaataaattatctcaaacttaacaaatagtgtctaacgtcccaacaatactaatacaaaataacattgataaattaataacctcaatgtaaatatgcttttactgacgggttagcaaactcatgtgtatgcggaaatttatttgttgtacatcacaaatttacaaatcctaatatcaaaaaacaattcctttttatgttaattttgataattattttaattttttttatatatatatatttttaatttttatatgatatatttttttatcttaatatttaaaatatattttatttttatttaatatatatattttaagaatatgacaaaaaaaaaaaaattaaaatgagatggctttataagattaattttactggtttatttatagtgttgtagggagaatactgtgcatacagttgggttggtatttgtgtggtctaaattaactttgtactaaatatcagtattcagcaatatagatattagattagacaacaaaagtaactaatacttacgtaacctctctcaccattttcattttatcattccctatgtaataataataataataataataataataatggattgctcttcagttaagcttccttgttctttatcttcttccatcctcaatcttcaggtgaacaagaaattgtttatcttttcattgttacttttgttttcttaatttatgttatgtacttttcaattgttattattattcgaaacattagttaatgaagaacaataaagtagcatatgattgtgttgagtatataacttttatgatgctaaagataagccaattggctatattttgttttgggttagaagatcatcagctttgggatgtgggtattatgaaatgaatctaattatgtgttttgaataatcaattgtcattgcagggttcttcatcacatgtttgtagaaatcactccatgtccttgccacttgttaattcatttcttcaacttagtcatagaacaaactcatatcttcacaaacaaaattcaggttgtgtctcttctaggttttatagagggttgataattacctcagaagcacaaaagcaaaattgggattttggtagattcttcaaaacaatatatttctttaacgggcctccatctcctgctaaggtgggaaaaagtttctctgtcaaatcctcttttaggtaaccatgaaatctctctaatgcttcaactaacaacgattcatttattaatgtgtttagttctttgaatttctaatcgagaaactatccagcccatcacctactactccaattcaaatggaaagttctggcattgtgttagtagctggagctactggtggtgttggtagaagagtagttgacaacttgcgaaagaagggtgtgccggttcgagtcttggtaaactctttcttccttttggtgataattagcaagttaccttatatgtggtgattttgataatctttgatttgaagtagagctgcttatgttttctttgattggtgtttatatttgtataggtgaggaatgaagaaaaggcaaggaaaatgttaggcccggacattgacttggtgagtgatagttactgtttttgggttaggtattgtttagttagcttagttgtagttgatattagtgacaaggggaatttcaaacctctttgtggttggttttagctaaccccaattctcaagatttaacaatcttgatgaaaattagtcatcacaatgtccattttgttcattgtttgagtccattttggcataaattaacattatccttctcaaaaaaatggtaggttgttggagacattactaaggagagtactcttgtacctgaatatttcaaaggggtgaggaaggttatcaatgctgtttctgttattgttggaccaaaagaaggagatactcctgacagagcaaaatacagccaagtatgtttccaaaatttggaaaagtttggattgagatttttgtagatttggggtttaataaaaattgcattgctgtgtgttttcttgtttcatttttttcccctattttagttgtatgacatcttaatattttgtggtaacagggaatcaagttcttcgaaccagaggtggcgttctcatgtcctactttgtaaattttggattgagcttattactaaataagaaacttcatgacttaaaagttaaaactgttttttcgtacaaatcgagcttattaagacattgtttttactgcggaatgcagatcaagggggattcaccagaaaaggtggagtacattgggatgaaaaatttgatcaatgctgtgaaggggagtgttgctgttagaaatggtaaactgatatttggatttgaaggtatgttcttccatgctgctagataacccttactatagctcttatgcacaactaagccataaaacaaagcaagactttttcttttaatatattaaattgtgaaataaaaggtatgcatggtattattatctgaacttaattttccataaattatgtttaaactcaaattatttttccctgtcatgtcatactttgcagataatatttacaaggaacttgcctggggagctttggatgatgttgtaatgggaggtgttagtgaaggtgcatttcaggtagatgcaaatggtggtgaaagtggtgaaccaactggactatttagaggtttctcactacctaataaattctcttatttctatagtactgtctttttactttttttaattaataaatcttttatatttatatgccatgtctcattcaggtgtagtctcaactgcaaacaatggtggcttttcaagtattagaacaaaggtacagcaaagattttcccttgtacataattggacttgacccaataatttgtatttaaagcaaatgcaaatttaaagtttttgcagttgctccatttatatatgggaaaaaaatgtaaataaaagaaaacaacatgcttatatgaatctatgattttccaaatatcgaaatttgattacaataacaagtaacctctctgcattgaatctattatttttcaatctgattgtgtaaagtgtttgattcaaggtacattcgtaggttgaaagtgcacgtgaatccttttgctgatgccatataattttctttttcttagttccttttaagattttgctttataagtttccatgaattaagtttctgtttctgcagtggcgaatggtgaagttttaaactatttatttattccattttgttgtattaatccatctctatttctaattagaacttttcagtacctgaggatctctctgcttatgacggtttggagctgcgcctgaaaggagatggtcgtcgttataaatttattattcgaactagcactgattgggatgctcttggttatacaacagcctttgatactgtagagggccagtggcaatcagtgagtaacatcatgacctattgaatacagatcagtgaggtatacaatagataacatcgatttctcatctgttattatgttttcttttccaggtgcggttgccattttcttctttgaggcctatttttcgagctaaaactgtctcagatgcccctccattcgacccaactaatgttttgtcatttcaggcatgtctctttgcattactaattatgcctttctttcctgcttcaagatctataagatggttttgttatgacattcaaatcattgcagcttatgttcagcaagttcgaatatgatggaaaactaaatcctacatttgtagaaggcgcctttcagcttccaatatcgagcattcgaacttatataaaagagcctttaactcccaggtacaataatgtctcatgttgaggttaacaaaatgcctgagtgaaatttatcttttataacttttctgttcaaaattgctcataacattgaatattgattttatgtttactgtaggtttgtacatgtgagctctgcaggagttactcgacctgacagaccaggtcttgatctaagtaaacaaccacctgcggtccgcttgaacaaggaattggattttatcttgacatttaagttgaaggtctgtagtctgaactcaatgtatgctttcattgtttgaatttcatccttttccttgtgatataaaatcaaaaaacaaaataaaaatggggatgttcagaagagataacttgctgtcttgtaaagctgggattggctactgtaattctttgggggcagttaataaaatcttcatctcctttctttctctgttgttcatttctttctaattgttgagtttgcaatagggggaagatttgataagggaaagtggtataccatatgcaattgtgagaccatgtgccttaactgaggagcctgctggagcagatctcatatttgatcaaggagacaacataacggtacattaataacgatcatatttactgttctttttcttctctgaatgagtaacactgttaaacaagcatttggttatggtaattggtcacatttgctatgctaaatgttatcagggtaaggtatcaagggaagagatagctcgtatttgcattgccgctttggatagcccatacgcgtgtgacaagacgtttgaggttctactcttagctcctcaagacattttttctttgctccacttgataagataaattgctggtatttttgattacctaacagttagttacactatggaaattttctatctcctttacaggtaaagagtgtcataccattcagcgagccatttacagtggatcccgagaatccaccaccggagaaggactatgatgtttattttaagaacttgaaggatggaatcacaggaaaagaaatcctagaacagactcctttaccggtctaatgctcaaacacatctcaggtctatttttcaacactaactttataagtacgttggaaatgttcatagttattgaggttttgtaatattcaaaattgctttaacttctgttttaaattctacaacacaaactcaacatacacaaccatgcacacaaacaaagagattaaaccagaaatgaaatcaagcaagttgagaacataatcaaatggaaaaataaagagacaagacaaagaatttatcttggttcggatctcaatgtgagtcctactccagctctcccccaatgagaaattgactctcaaaccaccaaggttgagctgctcgagacaccatgaatgccatggttcttcatcttcatataagtcttcttcttttactctctttctcacacaatctctcttaaaatgagattacaaggtactatatatactggttagtaaaggtcacaacccgagctaactaacacttaaaacgcactcaactaactaacaaccttaactaacttcctaactaactcttccaagaaaggaaagagtgatctaagactaattttctgtggattacaaaccgcaacttctttatgctcaacatgtaaagtttcattccaaagagctgttgaattgaagcatgcatgttagctattaacgctttaaacccgagttgtttgcttgacactctaaattagttagtataaacattaaaaaaaggttaaatttctgttaactgcgcagcctaagctttcactgaaacactttttcttgctctgactgcaggagtactcgtaatagagaaaatagcagacgttgcgaattcaaacaatccatcagctgaaaaagttgtagatttgtgttagaatgtttgtgtaacacatcatgtttcagaaaagggagagctttgcttcatgtaaatccataatatgcacagtacagttgtttcaataaatgtatataaggctatacaagctctttgtttacatttttaatgaaaatattaaattttgcatcaaattttgtaattgtgcattgaaacacaatactaaaaattgaggtaactttttgtgtagaatatatcacaatttttatatttctcattagagatagtttagtatgttagagaaataattatagcctaattttctttgacaacagttatgttatgctcaaattgataaagtattcattttaacattgatgtaagcatgtttgatattaattttgtttttgaatttttaacatgagaaggagagggcaaggcacatgctgaataataacatttttgttgatgatttaaatctaaaataaaactaatggaatcatcatataggctccctatatacatatataattttattttatttttttgatgtaaacgaatggagttcctatgcatgcattctctcaagaggaaacagaaaaaaaaataaaaagaggttcaatacctcaattaagaatttaaatcaatttaatttattttgttcttttaaaattaaaataatgaattttatgagctcacctgaattctatttaaaaagttgtgaaaatgaagtaaaataaattaaaataatttttttataattcaggtccaattttgactcgtgtaataaaatgtgacaacatgtttaaaggaaatagactggcccgttaaatgaccagcacttgccacgaaaattttgtgctggattggcttttcaaaatatgggtcactatgatacagtctatattaaatgggttggcacgactcgacctgacctattttttttcgagctttttgaaaatgtgtcgtgttgggtcgggctggcatgaatttatagttatagtgcctactaccttatgatgtgtcctcttataaatgatcaacgattttttataatcattattaaagtaaaataagtagaacccaatattaaagtactataggagaagtataattcaagtgttagactataaaaatactagaagagcttattagtaaattgcaaagggtgtaaaagcttataaatatgtaattgtatagctattgtgcaatatgaaatgagataatagaacttttgttcaattaagagattgatactgt

SEQ ID NO: 380421 - DNA, 3783 bp, Cannabis indica
gaaagatttacagtcagccttctacaagtagttcattgccgtatgcgatctggacatggaagttggctctctcaccaatattatgcagcagtaaatgaaaatcctaaaggccttttatctagaggatggtggaagctgcagccaaaaccaaagtcattgatgacatgagaatggtggttcttcagtttggattaaatgttgggtccttactatggggagaaaggcaaagaaagagagttgaaacattatttgaatttatatcaaaatcccaaggaatcattaaccttgaaaatgcttagtaaaaagctttcggagtcccttcagctctggttccttttgcgaatgcacctagttttattccccaattcctagccccaactttaactcttcccgtaactcgatttttgccaactatttacggacccactgcttcacgtctcgcacctatgcagacccatttctctgagtacacagtggcacataccggatgcagtgtggctcccaacagccaaaataaaatctttggattcaaatgtgagccatacacaaaataaaaggggggcaaaggcaacaattgaaatgattctttgaagaagtcaaagaaggaatatgaacccaaatatcactgtgtataccagcttagtagacacacggtggaatgtctatacagaaacgtacaatatggtccactatagaaagcccctaaaatgtctcacggagggagaaatatgcgggaccaaaacaaaaagtgtgactatcattgagaaaaagggaacatcactaatatatgtgattatctgaaggatgaaatcgagactttgatcagagtagggcacttaggacaatgtgtctggattcaaatcatctatcccaaacaagggttcattcacgagcacatgatcgttctgagacagaagggcactataaatcctctacataggaggtcattctcaagctcgtggatcacaactgcctgcactccctactctgccaacgccacctagagtagcattactcgctccgaagcccagaaccccatatccttactcgctttgcctctagtagatggacacgtggccatgatttccgacaagccacatatagtgggaagtacaggaaattctcaaaagagatatttgagagagcttgacaaagaaggggaaatgtgttcattggtgcagtcgacagcacaattccccaagatgatgaattttcccatcaccttcacgaaggatgattccaaaaatgtttgtatctcccacaatgaccctttagttattgaagctcaaatcgccgtcaaaagggtttctagagtcttggtggatagtcaaagctcagtgaacatccttttcaaatttgtgttctaggcaatagggctcacagaagctaatttgactccttgccccattcaactataaggttgcagtggagatgccctaatgcctaaggggaaaatctagctgccaatcaccctcaaggagaaaaaactgcaagttattttaagcactacacttttgtggaggtggattggccaaaatcatacaatgcaatagtaggatgactagtgttggtggtttttggagcggtgacttccttaaggcacctgtgcatgaagttcctttgtgataatggatgtattggcacaattaaggttgatcaaaaaagtgcaaggaattgctacaatgtctcaacacgaactatgttcattgtctgagaagaggcacccattgtcctagaatggagactcacatggaaactaaagccattcgagaagattttttgaagataagttagatcccagagttgggatgaaaagaacattagaacaaatggaggaggtggaagagataagcatcagtgatgtggaccccacaaaaacaatcaatgtgggaagaaacctacctctgtttgtaaaagagaatattgtgaacacagtcaagaagaaataggatgtgcttgcatcgagcctttctgacatgatgggaattaaccacaatactatttcctattccttcaatattcaagaagatccgacgccactccactaaaaatgaatgctctttgacccaataaaggcagaggcagtcaaagaaaaagttgacaagctgactaccaatcacttcctctgagaagcattatacccagtatggattgcgaaccctatcttggttcctaaatctgatggcaagttgaggatgtgcattgacttttcagacctgaacaaggcttgcccaacagattgctttctgctccaacagatagatcaaatggtaggtgccacttccgggtacaggttgctaagctactctggctataacaagattaagatgcatgatgcggacgaggaacacaaaaacttccaaactgacaaagacatttagtgttataaggtgatgctgtttggacttaaaaacgttggagccacctatcattgattggtcagcagaatgttcaagaaccaattagggagaaacatggaggtttacgtggatgatatgttggtttagtccaaaacctttgaggagcatggcccaggtcgtgaagaagccttcgtggttctcaggaattagaggatgaagctaaacccaaaaaaatgtacctttaaggtttcctctgggaattcttgggcttcattgttagctcccgcggaattgaagcgaatctagagaaaatcaaggctttcctttacatgccctctccaaaaacataaagatgtgcaaagtgttacaggtcaaaaaactgcactcaataggttcatttcaaaattaatgaataagtgtatcccattccttaatgtggaccaaagaatgtgaggaagcattccaaaagataaaggaggatctgaccaaagctccaattttgtcgaagcccatggaatgggaggattcatacctgtacttcgcagtgtctgaccatgccataagtgctgcactcgtacgagaggaaggaaaggtccagtacccgatctactacataaccaaaagattattgggtgcagaatctagatacccaatggttgagaaattgacatttttcttaatgattgcatctcaaacgctgagacctttcttagaagctcgcgccataaatgtactaacaaaccatcccctccgttaggtgctttagaagctaaagtcttcatgaagactattgaaatgggctatggaactcaaccagtttgacattcaataccaactatgagtttcaatcaaaggccaagcccttgttgattttaaagtagaatgatctagcatgaatgaccttctagaggagccagtctcaaaactgcccacctggaaggtctatgttatcaaagcctctcaaacaataaaggagccggagtaaggatcattttcatctctccacaagggcattaaccccaaagtgccctacacttaagtttttcggcctccaacaacaaagctaaacatgaggctatgctggaaggcttaaagctggctaaagaagtcaaagcccaagacattgaagtgcatagtgattcccaactaatggtaaacataatatcttgcgagtaccaaaaaaaaaggtgaaaaatggctacttatgtcatgatgtccttgttggaaattattttaccaggatcttagatctactcacaagtatgttgattaaaaccctaaatatgaacttctaaaacgattataaattaaatacatataaagtatgagagtgtatgggcactactctatcactaagaggttcgaaatttagaatgaagaagagagagaagaaggtggcggctaggtatagagagagaaggct

SEQ ID NO: 380422 - DNA, 1386 bp, Cannabis indica
tatatatatatatattactttgacagtttttcgaaactaatataagtcttttcaatatatatgtttcttgagaaaatttttctagagatctttatatcttaaaattattcctgattatgcatatttaattttgaagttcttaaatgatgaactatcgaatcttttagatatatacaaatagtacatattaatttatttaaattatatttaacactatttagtttcataactatacaatcttaaaatgtatagctaacctaattttttatcttacgtatcacagaattttaattgttataatttttgttaagaatccatgtcattttctaacttattgatttcataattaaaaccgaagaaaaatatttttaacaaagttgattcaattccaaaaaaaaaaaaaaaccatttcaactaattatttatgataagaaagagtgaaactacagtttcaagacaaattttaattaagactttttaagttgaggttagatatttagccacaatcaaaatttgataattaaatttctaaattaataaattcgttcttaaaagtgaaaaaatcgaaacttaaaatactttattatattttaaatttgtaattaattaaaagcatattagttggaaaatttttaattagttgtgattaattaaatatgtatttagtcaaaaaaaaaaataatagataactaacaatttatatttaggtactatttttaaatcataagtaaatttttattaatactgttaaaaagttgtcactaaaaggtattttatttgtagtgtaatctttattaggagcaataatattattaagttctagtagtgtcgaacagactatattacaaaatagcacatatttatacatgaaagttttttaagaaaataaactactatgtattaacacttgagatttgatcatttagccgaaacaacacataacacttctatatgtaacagaaagataatgtttgtaagtgtaaaatcaaaaacatcatatatatttgatcatacaagtttgggatgaagctcttgcaattaattcatgcaagtttggggttaattatatcttcatttagggtatgatgaccaaggtgtttgtggaattatcactgttatcagcaagagtcttatttaggatgcattattaaagatattattgattattgttaagtataaagtttattgttatatcttttgtttattgtcttagaattaatagctaaaataaaagtatagttcatgctcgggctaaatttattttagggtaaatagcgatataagtacttaaagttttatgtttgtaagtggcataaacctaaatgtttatttttagcagcataagtacccaatatttataaaattgtaattttcttccagtttcgt

SEQ ID NO: 380423 - DNA, 1533 bp, Cannabis indica
gattcttgttgagaaatatagttgttgttttctttgtcacagctatccccacatgtaatatcatatggcaaagtggactctaaaacaaataccttgaaattctgtttgtcaaggccatgcagtgcaggagaggaatgcttccttagctatggcaacttctcttcttctcatctcattaccttctatggctttgttccaaaaggagataacccgtacgacatcatcccattaggcgagtttactccatctaccgtgttattcattagtattggatgatactatcgtttctaaagcataatcgtttaactttttatactttttctcatgcagaactcgaaggtgatgagggtgatttcgatgagaatagtcatgtatcaagtacgaacactcacatggcaaggggtacgtggttctcgaaaaaccacgatattttccattatggattgccctctccattgctggactacttccgaagagctcaaaatgcaatgccacactctaaaacccttgtaattttttatcttattttgtctcagtgcagtattgtgcttgatgttcatattaggcaactggctttttttaatttcttttggttctttttccttatcattgttccctacattttcaggtgcaagaaaacttggagaatgaaatagaaattcttgaacaacttcgactcaactttcatgacatgatggagagactcggcgaagcagaacttgatgacaggtcaaatagtttcttgattcagcctatcatcatatcatctaatttgttgttgttgtttttgacagtgacacatggtttgtgtgtgtattttcatctttgtagagaaaacactcgctgggatgtgaagctggcaatagagtacaaagatattcaaaggcgaatcgtctcttcaatcttaacttcgtgtaattcgggtatcgagttagttaaagacaacttgtgcagatgcatggcctaagggacactagtggctaggtaagtgtctatgactaaaatgttgtactttcaagacaaacaatgaatcagttcattttggtatgaagggcattagattattaggccatttgattttgggtcaatgagatttgtcattgtctagtctaacaagagaaattttatttgaaatattgttattaggtaccagtagtgcctagcaccatcacgaggtgacgttttgcgaataactaacaatattttaatagttattaaattaaattatataaactcaaatacttaatttcactaataacgatatgacagattaagtgccttttagcatctcttttatttatttgtaggggtgtttactaagtatccgatcaaatccaattcgcactatccaatccaatccaattcgcaaaatgcggatatccgcacttgcggggattggattggattgaaaaatccaaaatccgcacttgtgcggattggatgttgtttgacctcaaaaagtaaccgatccaatccaatccgcacaattatatatatttttaaaaaattataatatataatatttattaattt

SEQ ID NO: 380424 - DNA, 5619 bp, Cannabis indica
aaaaatatataaaataaataaaactatataaaaataactgaaaacaattcttaatttaattttttttttgttaagaaaaatgtgttttgctattgattctattgaatgttatggtttatatctctgtttctatctaaaaaaaattgttgcactcatttggtttggttgatagatgccctggcctggttattctcatctcaaataaacccaattacttttaattattggcttgctttattataaataaaagtggtaattaatgggtgaatgctgtcacaaattttcccaaatatgtatataaagattttttatttttttatttgaaaggcagaattgaaaatgaataatgttacaaaaaggagaatgaatgaatgaagaaggtataattgaaaaggaaaagtgttattattttgatgtgtcagagaatggtgtgatgtggaatgattgcatttcgaggaacaatgactatcccctctctgatcacatatcccttcccttcttccccctctccttcttccaccttgtctttatttatgatctgcaataatacatatatttataattacgtcttatataatacataaactcaaagataggatagtagtagtttgagagtgagtgtgttaccataacattgttgcctatccttgcattcttatctacaattgctttccttatttgacattgattgcctatgcctattggaatagttgcttcttcttcttcttcttcttcttcttgttggtcctgtatgtaattttcactaatcaatcatatgaatataaaagatacaaagtgaatgagaattgaggcaaattaagagagactcccttccctcaccggatacacatcagagccaataatgacagaatcctcaatgacaacaccatctccaattctggtcatcatcccaatcaccgaacctttgatactactgcatctctattcttgattcgaatcaatcaatcaatcaattagccataggaatagagttaattggagtgtacatatctgctatataggaaaacaagagtagttgctttgcttacaccgatgatgcagccatccccaacaaggctgtttgtaataacagcttcacttataagagttgggggcaggcaatgaggcattgtatacactggaactcctctgtcacagaaactacccaacccacttagttagtatcaaattatcaattacaatacaaaacaatgataataacaaactcaatacaatagtagtagtcattagtactcacttgtatcccatcttctcctcctctatgctctctatgtttgccttgtagaattctccaatgctcctcatctcctcccaccgtccatcaaacggatacccttgaaccttgatcccatttgctgctactgctcctgcaatgacttcccttgccaagtcctttgcctctggaactgctctctagaagctttttcattgcctctttcttcatcacatagattcccatgcttcgcaattcaccacaactactaaaattaccattcaattttctattcacctacttcaaagtcaatttttcatttttcatcggtcaataaaaagaaaaaaaaagaagatagagtaatatggattggactttggagggagacttactgatgatggtgaagatgaagaagcaaaagggagaataatgggcgatgagttgaatcgaatagattgaacttggtgttgaaaatccaattggagaatgccaaatggtggtgggtggtggtggtgaggagtggaaatggaattagttgatgctgcaatagtaatgtcagccttagagttgcggtggaagtggaggaggtgttggtagtccattcggtagagatggtggcctggaagcaccagaaactcggtgagtggatgataatactcttctagtatccaaaggcattttctaaccgcatcagcacttccttcaaaccatgatccattgtgatgatggtggtgagagctctgatgtgctgcaatcacttggacaaccccttcgcatcctactactcccgaataagccttcgaaaggtgtgagttcagagaagtagagttgaattgtgtcagagcaaatatcttctttatgttgctgtttatacagttgctcactactgcgtcgatgagcctataatttgctgccattggcagggcgccctctgatcttctcatcgtcaatggatacagacgtgattgtgattgtgattctgatccatccccaaatatgatggctgcaacgctctgagtttgactctgactctgatacacatacacacgcacatatatagtattagtaatgtaatgcttaactatatctattcattatatcagaggagaaaagagaaaagttaagacctgatcagaagaagctgaaagaagtggccaaatgggatatgatgaattggataccaacacgcttgatggaagctttagcggacttcttctgcgactaccatttcgtttgaatgttagagaaggagacgaagacctgggattgagaacacagagctgcggtaacaccatgtcctcaatgcactttcttttaaatacaagtcttttccgatgctcctctacaattatgacttctctattgtacatatatatatatatacacttaaatttggtatatatttagtataaaaaagagagagacagaataatctgttttcttcatggcgatggccactgcaaagcttagaaatattgtattggtactgcattgcatatttgcatgcatatgttatgtattaacattaactatgtgttttgataaagttggtgtctttggtagggtatgtatgtaccacgttgttgtatatgattctaagcttcttattagtcccttccctgcttttttgttattctttcttaaaaaaagtgagagtacatagttaacaacactcaaacttgtccgagggtgatcattattattagaatgggactacaaaatcaggctttgtcgaccattttggaatggagtcgttcacaagttacccaaattctttactctcaaaaaccttaaatcttcacacacacacacacactcacacccacacccatttgttttataaaattaaacttcatcaattcacatcacatgttctgttcctacaactcctatattcattaaccactaaactaaacacaaacaccaaaattgatcatatatcatggggaacaaatcagcgccaattccaaaattaccaaaattgatcacttgatttgaagaaaattaaagctcactctgtaaagttggctttacaactttaagagagcaaaagtgaccaatgaaataaagggaaaggataccataccagtagccagttaatagccgtgatttgaccatttccagttccaccaaaattactatattatcagatttgctctattgacaaaaaaaataaaaaagtgaaagcacaaacaaatctaaaggattctctactcacaaatcagaatctaattctcatgaggaattatgagtaatctcttggaggaagtttttgttttaaatttgcagagaaccttttttactgtagagtaggggcttatattctttttgtttatgtagatataatattaaggaataatgagctcaaaaggcattgagaattattattaaatggcaaacaaggctggtccacagaaatatgaaaagaaagggatggatgatcattgatatatgatacgaggagtagactaggaggagtctatgagacgttccatcacaagtttgacaacagccggagcatcaactgtcacggccaccttcactgttggcttatccgaccaatctgttacttcaccaaaccttttctgtttgttatacaatacagtgagccctcttgtgatgccattggtctggactctcacaacaccctccgtgtaagtgaccagatcaggatatacggctgcaagaagggctgtcgggtcgtgaaggtaaacacctaaaccaacaacattcaaagcttagtttagtgactttaaagtcttaggccatttgttagtctagtaaacaacaccacactccacacgacacacctcctgtgttataggcatcctgatgatacgagaagtagacatctaaaattttacacaagtactcagcaaacttcccatttgaacttgccaacacatctcgatccgcatctaggtacaatttgacagaagaaacagaatcaaatcaaataacagaaacaattatcaacaacattcaagtagtagtaaaacctgtgagaacgacttggtgagtaacatttatccctacaaccaacacatctgctccgctggtgaatacgatatctgcagcatctggatccccaaatatctgctcgtactcatccaacaaaagggtgtcattatatgattataatactttttctctttctcttactctcacaagtcacaatttgaatacaactactattaatgctgcttacgttggcttctgcagctggatttacattcccattcactgcaaaggcaccacccagaacaacaatccggccaacattttgggcaaaagccggatccagttgaatcgcctgcaaatgatgtggggtaatattgtgtctgattcataatataaataaagaaagaaggttgagaatgtgttatgttactaccaatgcaatattagtaagtggacccaaggctacgacagtgagttttccagggtgaagatttgcttgctggaccaaaaatgcagcagcggactgttggataggctttcccttaggcggagggaaattttggttgccaagtccatcggcaccgtgaacaaaatcagcaatccggagctttgtacctttcttattttattttatttattattgaacatgatagagatacatacagtcagccatacagatacagataggagcatagtaactgaattaaaatacaggtgagtaagaacaaaacataaggacgaggatgagacattgagaatgaaattgaaaataggttaccgtgattgtgacatgagatccttcagctacagggatatcacttcttccaccaatctccaactaaagtaattgagtaaagtgatattagaatggatggaatagattatagaaatgcaaaacatgaattaaactaaaaaaataaaaataaaagcaaattaggattaccaaatgtaaggcgtttcgggtggcgagagtggtataaacgttgccgtagatagtggtaagtccaaccacttcaacttcgggacacttgagggccacgaatattgccatggcatcatctgcataatcaagcaatcaatcaacgtattatcaataatttcatttcattaacaaacaaaacaacaaagtagcagcttaccgataccagggtctgtgtcgatgatcatcttcatcttcatcgccttaaattcagattcagattcagattcacccatcccaagttcccaaacccaactactactttttctacctcactttttgggacacaattcaccttttttgttaatcacctttcttcttttcttctttcttttttagcttgacttccttgtttttatggtgctattcggtaaccacttttgatttttttattttaaaaataaaaataaaattatcttctctaaaatttatttttattttttat

SEQ ID NO: 380425 - DNA, 6422 bp, Cannabis indica
aaaatatgggctggtgcagaaagaagtgaatactcaccggagaagatggccacggcagcggttaggtcgaaggtggagaaacaaataagagacgagaggggactcgctcgctcctaggggcggtgcagtggaagattggtctgagatccaaacgacaacatttagctttgttgatggtttataatatttgaagaaaacgacaatggaacaacagaggaacacgtactgcaaaaccttcacatgttttgaaaacgacatcgaattgatgaaaacggaatgaaatccatgctgtattttttcttaaagatgaaatttcattaaggttaaaagggccaaaacccaatcggtcaagcaaaaaagtctcacaaatctcacaaagagagatgaccaaataaataattaaccacacttattacaatttataacttaacacatgctctaaaccagcaaccaaaaaataaaaaaaaatcctacaaaacaactaaaactagcgtcacaaaagacataaacaactataataattattatccgtatttccggataagtaacatgtatacttttaaagtttcaaaattaattaagatgggcctattcacaggcccaattaagcccgtaaataaacccacgacgaagtccaaccgcgactctagattaaatctcagactaaccctaatccctacaagattagacttttagactcagaagagattctcgtccagagaaggaaggaattaagtgaacatacccggataccttcatgtggtaatttggaatgggcagtcgaagaaatgcccaagtgttatcctatgtggcatccttctggcaccaaatcccacagaaccaggggcttgtcccaaacttgggaagggcgcacatcacaaatataccttttttttgctaatgcccactatcttgacatgtattgtacattgccgacaactcacattcacatgtcaccatcaaatggtactattccgtacaaacgatggttatctcacaaattggacctcacctgacgggtctaatgtcaatataatgatgtattttaccccattaatgaacttatttcaagatacaaaatcctaacgagtctgaatttacttgaaaacttggtttcagcctataaataggaccttactccttgcaaagggttacaaattttggctagaaattctactgaaatttgacaagaacacttgtgtcaaatactccatagctagagagtttcaataatattcactcgtgaactaagaatctttaacaccccaaccacgtaaaaattatcttcctatttattacttaagtatttttccttaagttttcgaaaatcacagtaaacaataacaaataaataaataaaacacaaacaaataaagtaaacaaaataaaaaatacacatcaacaaatcaccccacctacaattagaaatttgagggagtcttagcaccgaacagtaacatggcgaacatggaacaagaaacacaactgttaaaacatgacaatacaactcatacgacctctcaaaatgctcaaaaaggtgaaagggcagcaacatcatgacaagagttgtacatctgattgggtaaacccattttcatcctcaacgtcaacaaaactctgtgagctcaagaaagcccctgtgcaccgaagccagaatgtcatactaagaaccagtgggaaaacaaccaaaaaaaggaatacaatgggacaatccaagctctaaactccatcgaagattgaccaacatcaaaactcaaccatcaggccgccaatagagaggaggaaagtgtgaaaccaccaccactaacaccaatcagaccgatgtcccaaatgttggtgaccaccaccaatgcctgccaataccacacgcaacctcatccagaacctttaaacttgagaaaatagttgtaagatcccaaaatgtgtgctatcgaccacagaacccaccttcaaagctcgaaccaccacccgctggcgcttaaaactctagaccgatcaaccaccaacgaacgtactccaccacctcatgatgcacccaggtaagcatcaagtctcctcggtcagggaaagaccaatgacgacctccctaatcgagagggacgagaagaacaaaagaaaaaccttaggaagataaggcaaaagaatcgtcttgagagaggggagagagaagaaaatccattgaaatggtttagttttacattatttatctccaaaataaagactgtggtcacttacattacacgatatattatcagcttaagcaaatttaaactagattgtcccatatgggaacaaatgtgaaaatattaagtcatttataaattcatgtgttattataatggtaagttataacctcatgatttttgtcacaaatctgattcgatggatcgcaccaaatcatttattaattggaatagactttgaagattaattgaattagattagatgattttttttaagtttaattactaattgaattaaatcaagtgagtataaaacgtaaaattggatgggatgtttacttctactctgtataccttacctgtttgtatttttgacattatactatatttttcataaagtttttatgattttttggttaattatcccctttttttcatacctatatttgtgcaaataacaccctttttctcattaaaaataaatgatataatttagaatatgaaatgcctgagtaattttataacattattgtgaagttccttctcacagtaacctttcaccagtaactaattagcacgccattcatcagtaatttcgtgttctttcttttaaaagtacatttcgtggatattaatcgatatgtttatttgatctttagctaaataatacacatgaaaagttgcacattatataatcatagcttattttccaaaagaaaaaaaatctgctacagcaactatctcactcaatacagttcacacaatgttacaataaataaatctaagcaaaaattatccgatttacattcataacttaaacaatatcattttcctaatccaaccacaaacaaacagaaagcagagtctcacttcactagtttacaaattctgtgcaaactagtgttgcatcaagagaatgtgctgctaaattctgagctgcttctctttcaaatacaattaccaacaggagcctttaaaaaaaatgtggtaacagctaccaatggcactgcagcaagagcaaggcaaaggaaaacatctattcatagctttctgtttgatctttctaatgaggatccaggttccacaattccacaactaaattaaggaatatgttatcgaaactctaagtcttgaaccgcctaaacccgaaccagatttcatagtgattgaaaagcaggctatcatgtgtaaacttcccaagatattcaagccccaaactagagagcctcttggtacactcttctccccctaaacgtgaacaaaacttaacattatgggaaacgaagatgcgcccatcatggggtttcagcttacttgctaatctctctagcccaacccaaacaagcttatcaggcatgtggagaaacacagcactagcatagatcaaatcatagacaactcctgagccaaacttactgaaatccatatcctcgcctctcacaatcaaagggcgcttatgcaatagaccttgggaaggaagctcatacctaaaagcagccattaatgacaactcgtctctttcaaggcagtggaagtgttcaggtttgagataccgtataaaatgcaacccaactcgaagggtgccacaaccaatctctagaacacgcgagttgggtctgaggtgggaagactcagcaagaaactcaaacacatctcggccccctgcccatggctcaccatagttgctatggtgctcttcaacaaggagcccaccagggcatggaagtgcagtgtggttgtttgattcttgtccttcatagtgagaaattcccttgtaactgtaattaaaacaagaaaaaaaggaaaactttagttcaattttaaagaaaacaaaccaaacagttcgatatatagcagcatgaaacaaaaattagtacagaaaaaaatgcaattattcaaaattttgttgcgcttaaagaaatcaaaactagccacagcagagttcgaatttaaagattcaaaatctcaaacgcacaaatcaataaatgacacaataaaaagataaacaaatctacatattcgaatttcaaactgacagggggctcaaatgcaaataatttacacatagggaaaggagaggagattacgaactttatgagatcttgaagctgttcagctctagtgcgagggttaataccctttcgaagcacattgtcctgcatatgcaacccattgattcggatctgatctttcacccactccacatcatccttgctcgtagatatccgctccgccaccgaaaaggcggcgttttcaacagcgctctcgataaatggggttcgaacagtgcccacggcggaagaacaatcgcaggaggatgaggagagagacaacaaaaggaagagaatagcggtggctgaggctgccaaaactagcaccggtaccgtgatgactatgcccttggccggcggagacgacgacagagccatctgaatatgattgaaatctgtggtgtccgactgaaactcggaagccttgtagttctttcaactattaagagtgtcaatttgtgtaaataacagtaaacatagtgtcggattaactaaaactttccaaaacgatgtcgtttacgtgattcattgctatttttttattggttgggaaagaaatgtgctgtcggaatgtcgttttggggaatgtgcgagtgttgttgtgattgttaacttgagagttaagtcggtgcaatcatagtaaaagaaacattaactataaaacaaagagacaatgcttgttgttgaagaaatatatgtaaatgtaatgagatatatactgatattgatataagtcaaataagcaagcagaatagaacaaagggagaaaactttgaaactcacgaagcctcggagatgacaaaggagggttaaaagaaagttagggtgaatttcggataagagaagaaaaagatattggaggaatcaatggggattggagaagaagaggatatgcaatgggttttctgtagagtgagatcgtgatttgagggaaaatcggcggtttagtatgaaaacgtataattgggagataagagttgttaaaaaagaatgaagaaaaataagtgtgctaaaaatgtaattgaagttgctactacacctaattttaaatgaagtcccgtctctgcttccatctggatacctggagtttctcaccccacgtttcttcacccaattgaatcctctcaccccactgtttctttttttataccccgtaacaatacctggaatgttgcaaagcttcgacattatcttcccatgtatcaggctaaaactgtccttcaaatccctttgggtcccaatcctgcagacactctcatttggggacttcatcattctagcattctcactgtcaatttagcgtaccaccttgcttcctcttccgcaaacgttgactctccctcctcttctgatcctaaccctcttaagcattggtggaaaaccctttggacactccctatctcaccaaaaatcacgcattttacttggaaagcgtttaaccacattttaccttgtgctctaaatctgtttcacaagaaagtccttcaaaacccctattgtcacttctgtggaggcaaactggaattggtaactcatgcacttattgattgtcactaagctagtactgtttggaagcattttaagtttcattcttttcatacagagaattgacggcatgatattagagagttctaccttcaaggcattcatttaatacctatagaggatctccctctttttgttagtttaatttggcaaatctagaataccaaaaactctttgttgttcaaaggtcttatgtttctaacaatgtgcaagagtttgttttaaattatttacaggaatataaggaggcccaaaaaattcatagtgcagtgtcttcttcttccaattctgcccatcagagttctatcactacccacacaatctctgacagaatgggggacgatagcacagctttgtttgtagatgctgcattggatcaagaaaactatgtcacaggttttggttttgttttcaagaaaggacccaatcaaatagtagcttcgacaatggctcataaacctggagcatctacaccgatctttgcagaaggtcaagcccttttagaaggtctaggggtgaaaatcggtcggttatagtcggtttttaaaattttataaccgaccgttcggttacggtttttattttacgaaaaccgtaaccgactgtttagaaattataaccgtataaaaccgaccgtacggtt

SEQ ID NO: 380426 - DNA, 2206 bp, Cannabis indica
agaagtggtgaagatggagaagaataccgagaaacaaacaaccttatagtcagctgctactgcataaagcgaattattgtacttgcattgtgcatccgcaagctctgacctgctctctacagccattttcagcaaacgttttctctctttacagagcaaaacgacgccgttgtcttcttcttcattcttcttagaagtaacgcaacccatcttttctctcacttctttcaactctcactcagtctttaattcaagactagtacttcagcacagtcatgaacagagtcctcatgcttaaaatgccacaccatagcagtggatgcctttaatgaatcgggtaaaaacaaaaagtgattattatgcaaaaaaagctgttaaagaagaatcatttggtatcttgcatacataattgcgtaactgatattaccaaagttcccacctttggttgaaaatggagatgggatttaattctttggcagatattttactgggaaaagaaagaaaataaaaaaatggaaaaatttttcacttagaagatgagacaacattctattaaatcacaaaaagcattggcctttgttctgtacaaaataaagactagtgactcgtcctttataattttttagattgggaaagagaataatataaagcaataatgtaaaaaagcaagtcattaattaaaaccaaataatctaagtccagagacccaagcaatcaatacagaactctccgttcatttatagagtttatgttctttttccttctttttctttttaagacagtacgtatgtaggattgttgttacagttctcttgcttggttagtctatagacgcgccattaggaaatgaacattcctattaggcactcctctcaacacctattaaattaacttattagcattttttaaaattagtgctagtactgtgtacgtaccactttctgtgcatggtgtttcttcatatcccaaaattgcttgcttttttatttatttcccagctaagcatcaattggattaccattttctgtgcatgcatggtaattggactaactattatctaattattaagttaaaataaacttatctcatcaaaacatggcatagaatgccaaaaagaggaatcatacatacatttggcccttttgttttgtatggcacgcgctgaatatgcatttgagacatgtaattcctgaaatgggtaaatactgtacaataatagtgacataattttttttttttttgaaacaaatagtgacataattatagtaggcctttttcatttctctattaataacaactcaatcataaatttcactttttgtcgtttttcactatgaattgagtaaaacgacaggagataatggaaactgaaaccccaccttttgataaagattcctcggtgttagtgaggtcccatcacaaccgttgattttgattggcctatagagctgacttggccagtacagtagtattacatttttgggttaaaatattttgatcactaaatgtatttaatttgtgacaatttgattaacatctctatgtaatttaagggaagaaatctcatatcaccacacaattgaacacttggttagatagtgtaatagtggtgtaatttaattttaatgtaagagtgttctaattgtacatgtgaatacagagttagactgatttcactctatgtttggtatctaaactataattcatgggacaattttgtaaagggagaaaaataatctccacatggactattttaaatcacattgaataaaaattagtatatacatatatatttttttttttgaaagaaagatatatttcattaaattaaatcagctgttacaggagcactaataaatctaagacaagcatctgtccacaaatcaattcctacagaactagtaacatactttgctagtgcgtgggccacaccattcgcaacacgcgaaatggcacaacaagaaccaccaccaacaacagctaagagagaaataatctcctcaataattgatttatactgaaaattagaattcggaaaagtaatccaagaagaaacaacagaagaatccgtctccactctcaccaacctgtaacccagcatagatgtccaccgcagccaacacgcatagccaaaagctcagcaactgcaacctgaaactccccaaccccacccaccgcccaagccgcccacacctcaccactcccc

SEQ ID NO: 380427 - DNA, 3741 bp, Cannabis indica
tttttttttttttatatgtataatagataattacaatttcattgttttcacgctattagtatttttattacctgatatggtaagaacctatgccaaaaaggagggaaaactacacatcaaagaaaatgcaagcattatatattgttttgttgcaacatatttctgattctgatttacttttacattgttagtgtttctaagacaaaaggttttaccatcaagcctctttacatctattctcgttttccaaactaactccttactggaaaataaatgcatgtgaaatgcaagcatagagtttgaaacacaaaaatgctcttcttctttgttgtcagttgcaagataagtactagcctaaattttttggaggtatccatgtttgggaggaaaaaatagttttatggggtgtttatagttagtatttcgtgataattaccttccaactttcctcctaaatgatgcgttcatgactaaacatgatgcagaagaaattgtgataaaagaagattttattgttcattgttgctgcctcttttaggttactccccgtctggaagaattacagttacttaggtcacgggaagaatctaaattggcagagagggaaagcatttctgagaagaatactcgagaaaagagaaggccaacctcagatataactcttgagcagtctccagcaaagaggcgtaaagatgctgtccaaaacctaaacaaagtcggcgaaaagggcaaagctcatgtgtcaaattcagttgagaagcaaaagatagaagagaccaatgcagaagtagagaaaacatgtgggaaaaaagaggagcattctaaagactctaaccaggagaaagcaagggtgtacactgaccagtgcactgcatttgtatcaaatcttcccctcaaggcaagtgaacattccatttactgctgctttgtatctgttgagtagattatgagcataatcctcatagtttgaactttgtccaggcaacctcagaagatctgaccaaatttttcagtgatggtggagttggtggtatccgaatactacgtgacaagtttactggaaaatcacgggtctctctcttactctataaatttgtttagtatatgtgcctacctattacctatcaaagtgcatatatttattttccatctcccagtcacattcttttatttgatctgcttatattttaatgtaaaaatattatttatccttgtacacactattattcagtctcctgtggtgatagattctgaataagcagtattctagtgctagtgcagatgtcagtttattgaagggataaactatatatctaactattcaattaaaaagcaattgaactatcaagtatcaacaaaattgaattgtataattgttgacgagttttctctgtgaactaaacgaccaattacaaatttatagagcaaacgcttgtaattggtgatattttgttagttctcttttcttctctttattaatttatttattattttgaagggtctggcttatgtggatttcttagatgatgcacaccttgctgctgctatatcaaagaacaaggagactctacttggaaggaagctgagcattgcacggtcagaaccaaagcgtggcaaaagagatctctctgatcgaaatctcccacacgggctaggtaggctgggcggatttattttgtcatgctcgctgtatattgttgtttgagcttttaggcaactaacaggggtgtacaagaatgcatgtcctgcagtggttgggccatcagcatagtaaatctagatcctgtacactccaataagtttttccgtatctgttggtcattctgagtagttattttgttagggtataacaacttttgaaagtagtgctatcgttagaaaagtttttaggatccacatctggaatgaagtggcttttatcaaaaaaagaatgaagaagaccctctagtattattttaattattaataatataggtgtgatgttttctttaaaggaacaatggagaaagctcatatatatgattttaaatttcatttttgttatactaaccaatattttccatgtcatggcttgaagatgcaatcttgaaaaacaattaaatacatgtatttctacagtttaatattttctttgtttgcttgtacttgcatcttgatagagggatctccatccaattattagataagtaattttggtgttgtgaacttgtcatagaaacattgttggatttgattctttcttcttcgttatttaaaatatttgttcagtgcttgatgttatttatcttttagattaataattttggtgctggtttctcctgaaacataaacgtttgatataatctgacagtagctgatctgtcaaatgatttgtttttccctttattgtttctgctctcttgttaaccatggtggtgtgatattgcagcacgacgtcctgattgcaccgatgcagctaaggactctgcatctggggagtctgtcagttcctctcaacaatctgggccaccccatgcagcacagtctaatgcacgcaagcctagagttgaacatatccagctcaaaggaaaaaacacatttgcacttccgaggaacgtggctgcacttaatctgagttcaaagaaacccgaaacagaggaaaagcatgacgaacagccaaaatccaatgatgagttcagaaaaatgctcagtcaaggctaaacgcttgtaattgtttttgcataagcggatgtttcactgcctgagccttgagattatttacgaatgatagagtaggtgatgaagatgttaggcagggaaacagttggttaaagagtgtgtccaagggctgtcttaaattacattcaatgttatttgtagtattaacttactgttatttattctcgcaagacatttgttcaatattaaggctatgcttggtagggtggacggagagagtaagatggaaggggattttaggaagaatggggaggatactaactcttctttgtgttgtatggtattaggaataaagctagaagaatgaagagttaggagtaaagttggaaggatggggagaaagttattaaattagtattctgtttggtcaaaatatttgttatttcttagaaggataattttgatattagtatatttagtttgtctttttcttatgtgagggattagatttttaggattggagggagaaggttccccgcttcaactctcatctccctctcatttgctctcctactaaacaatgaattctagtgtgtcctcctctcatcctccacccctctccatttactcatctcttcttaccaaatgtacccctctcatcctccatccctctccattcacttatatcttcttaccaaacagtgtagatcatgcgcgcaatattaggatatgtaggttttaaaggggaagttaaagtttggtatggagtgacatttgtttttattttatttttccttttaagaaaaagaggaaaatttacacctagctaaactattatacatgattgatatatatatagggaaatttgaaattctatgcttaaaataccatttaattttttttcctaaatgcatagttattaaaattggtcctatatgacaatttttctaattttcctaaactacccctcacatttcaaacaatcatcctctctcttcctcttgctcagccgaaccctcccccacgaaacccatctctcacagccaaaaaaattttcaaccgaggctcaacccatccctctca

SEQ ID NO: 380428 - DNA, 1898 bp, Cannabis indica
aaaagaaattaattggattaataatgatgaagtaggcgctctattgttttacaattagcttgaaaagtactacttaattaggttgttacgtgtaatcataatcacattgacatgcacaacttaacctttattttttatttggcttaattaccctttcggcctttaattagctagatcaattcccctctttctaatacacttttgctttttaattttatcacctttaattctaggacattacttacaatattattatgattattgtttttttttttcattctttattaatttccccttttaatcgatcaattccctaaccctaaagtggtaaaaggaggatatagatggtgctttaaaatttaaatccaagtttaactttttttcacacgaggcaagaaagaaaaaagtctcacgtagtaaaagtagattttaataattataagccaaatccaacactagatatatatctcctatatatataagtgaatttttaaagctaatcattcaaatattacaatattgcatttgccacgtaagaaaaatcatatgtacaagtataattacaagtccattaattaaattttatctttcttgtcattgattattgtggtaaatgcattttatacacttgttgttaagtagtaatatctttattatctcttattagtaaataatacacatatttaagtgtattaatttgaagatacgctattattagaaagttaataaagagaagtatatgtgtctcactttcactttaatatgtatatttatataattagcctcgtaaatggagaagaaaattcaaaagagaaaaaaaggacttttaagagagatgagtgagagttattgagtgttgagaaggctaaactcagcctttcattcatcgctattccttctcacgtgcgtcatcaccatccatataaagaaaaaaagaaaataaaaataaagtaacttaaattaaattcccatcacaaattaataataaaaaaaattaattgaataaaaggggttattaatcaaacgacaaaagccaaaacctgtcagaaatatctgacagcaacagttagttcaattattaccggaagtagccggtggtggtccggtttctcgaaaccctatgctatcttctcttctctctctctttctcaaacctcaaaatctcaaacacttaactaaagaaagaaagcgattcagagactcactcactctcactcgaaagatttattaagttttttctgttaaaaaataatgtaactgagatttatatagagagactgtgatccagtgttaactcctagtcctacttactgtgttgacgcaccaaatcccctccctcctatagtcctacttcacctctccaatattcacgtacacactactttcatctgttaacctacgccaccaccatcgtcatcgtcatcaccaaaaccaaaaccccaaccccaatctctctctcttaaattataattattatttttttataaagaagagagagagagagaaagagaaaaaaaaaaaagctatatttgatatattctgatctagttatggcggagggtttcgagccataccatgtcccacaacaaagccgaagagacaagctcagagtcgtagcaactcactcctctacaaacccggcttcggcttgcatcgacgctgctaccgcaaactttcacggctccggtggtggcttgctcccgttagccacttcatacgatcccacctcctccgattttctatcttgtactaaagaagaaggcgtggtcaacttaatgggtttggtcaacgggtcttcttcttccggttctcgaaatccgtttatggatccgatgacctctatccaagatatcaacactaacccttttctcttctcttcccaagcactccaaagcttc

SEQ ID NO: 380429 - DNA, 2499 bp, Cannabis indica
ttttttttttttattgttggggttaaatgcaattttattcttaaatttggttacattttataattctaaggggggctaaataggtttattattattattattattactattattattatgggtttttttattaataaagtgtagcgatatataaataaaataaaatttgagtggagcatttagggaatgataacatgtagagtatgggtagagtacgtttattttacgaccttattttatgaaaaaagttctacccgtaccttattctattactctatattattttttgtaggtacgatataggtatagggtatccacaaataaccctacctaataaatttacgaaaattttaaaaatttaataaacttaagttcaattatataaaaaattaccaatatatttataattacgtaaatagtaagttttaattctatgaattgtaaaattaatcaaaaaaatataattgctaacaaccaaaataatacccaaaaaagtattagaataataaataattatgttagatttttatatttttataatagataatataaaagtattttttaaatatgaataaaatacataatttttaaataaatatatataatcgagtagggttataggacaggatacacttatacttgtaccttaccttatatctgcatcgggtacatctttttataccatcaccctaccctaagccctaactcggtaatactctacccatatgagtagccgttttttttttttttatttaagcgtttatatattacaaccatgttttacttgggactcgaacccaggacctccaacacacacccacctatggccacttgagctagcctcaagtggttcatatgagtagccttagataaacaagtttttggtaaaattgtcatccttacgtgtgtcaatccttcttgccatataaatgtatttttttataaaaatatatatgaaaaaaaataaatacaatgaaaataagatttatagagcaacataactaaaaaatattttcaaaatagtgagatccaaatattatcatgaattataatccggttagttcttcatattgttaataaaaaaataattaaattaaaaaattagtcctaaaatataaaatatacatactgaataataatttattttataataactttatgttattttaagaaaaaaaaatatacataaaactattcaaataatataattcaattaatctcgtactaaatatttatgtgaacaaccacaaaaaatataaatttacatttttagacaatcgcatcctcataacatttatattaatcaaattatttaaaacttctcatacctaactcattctaagattctcatttgaacaatccaatgttcaatttcaacttcagtttaaattattaactcacttttatatcatcttcaactataaataacatgaagtaattgtgttctctctattataataggtaaacaacataaccaccaattaccatttctatttcctttaagaaagaattaaataaataaattaccatttctattcttcttttcattgaattattcatgactttgtcaactgtcgtttatatgaatgttgttcaaaaaaaaaattaatagtacaaaacgacatgtcatttgtccggtatgaacagtaaggagcttttgggcctttctacacatatgtagagggcccatatcagtagagcccatcagctgcctctatttcacacatctttacattatatctaactttcatttacttttcttacttaagttgtataatatttatgttagttataaaagtttggtattgatatattattattatgggtttcatcattgctaaaggtttgacaatcaaacaagtgagctaatatttttttcttcttgaaatttcaaggtggttctgtagttttactcaatttggtctcttgagactaaatttgtgtgtaagtgactttgtggtcatcacttttccttttgaatattttgaactatcatatactattttcaagcataaagttgggctaaagcctcaagttatggaagtaatcaattgcttctaaaattacctttcgtttagcttgaaaggtcaacaaacaaagatgagggtatttcatttcatttatctatccaaccttagagttgaccatttttttatttatttttctatatttttaaatgttaggatggattccataaaggatttcaatccaaaagtctcaaatgatcctatacttaaatagactagtagtccatttggtgcactaaacattgtttagtagtgtagtactactaaaatattttggccactagtatgtcttctataaacatttctatctatgttaaatcatgagataaaactctcaaacccttgtctaactaataattatttttgtcttaatatttcctcttagggccaaagttgaattaaaatattaagaattaatttttggtacagtaaactataaggaattttttaaaaaaattacatggatgatatt

SEQ ID NO: 380430 - DNA, 8192 bp, Cannabis indica
gctagccaatcgcaaggtgacatctctagaggtgctaagtaccattggtgcccaatagcaatgctcgttggactaatagcgatattaacaaatatgataagaagatgttagacaccattggtgtcttttaacatttctcaagatttttatagtttacttttttactaactttttaaattcgtatggttttatttataaaattactcacttctgaaaacccttttgttgatgtcaacaacttatgacagaagcttccctctgtgacacaaagtatatgtataatgtagcctatgtatataaaattaaattttaatagtcgtgtataatgtaagttaaatttaacacatgctacaaattgtgttaaatttgacacaaagtctagcatgagccaaatttacatatggagatggaaattgggcgggtaataggcaaggaatgctcttcccattcccatcttcattaactatttcgatacccatccccacctgcatcttttcatcttccccatttgaggcagagtggagaatccctgctggagtgggtaattttagggggattcatttattttttttaacaaaatgaaatcatgaataaaaaagaaaaactgcataaaatttaaaatattatatatgttaataatttaaaataaataatgtaatttaaataaaatgaaaatattaaaaatttactaataataaattacaaaacacataaagactaaaggtaatgtatgataatttaaaataattttattaaatatataaaaaaaattaaatgagtccctgtcgagtgggaggttttattcccattcttgtcctgtttaacattagaggatagaatgttattcctgtctcgtctcattcctcatttaggtaggtaatcccaccttatcaggagtgggtacctacgagtagtgctgtaaatacggaccgagctttttgacatagcacaaaaccggcacgattaggtacgaaaaaatacaagcttgggcacgatatgacatgatgttacaaattagcacaacacaacgcgaaaagtatgaaagacacgatacgtaagcacaaatagactagcttaaaaagcacgacacatgacaaattaaaaaactttataatttattattaataataataataataaatgaattcatcaattataaataaattaaaataataataaaatttaaacataatacttattattataattgtataattaaaactattataacatgaaaaatttaaattatatattaatttatttgtaaggtgtgatataaaaaattgagtattcataggtaaatatccaattttaataatatcaataatttttttacataattatcagtaaaatattattaaaaaattttataaatataaataaagctttaaaatatacaaataattttaataattgttaaaaaaaaaaaatgaaaaagtaaagcacgaatttaagtcagaatatgaaaatgacttggcctgtttaaaaaatacgagccaacacaaaacacgacacaaatccaaagcaccacacgaaactattgggcctactgattgtgctgagcctaccctttgaaaatgtcaacacaacacggaacgacctatatttttctatggcatgcatgagatgactttatttttttttttaaaaaaaaagcatgaataaatatggaccagactagcataatatgcacgaacttacaacactacttgcagggccctacacgtatgaaatttctttcactatttacattttcttatatatttaatagaatttttatacttaagatttcgttggccttctaaattaattttaataatttaggttaaatatagcaattattttttttagagatggtctttgacatcaaatatgatggagatttttatgttaaaagaaaaaaaaagtagaaatgtgagatggtttagaattagaagattttagggatgatttgataatgaaagtgattaatgatggtgattatgattattaagtttgtttgtatatgggatatggagggcacgtgctacgaggtggattcgttaggattctaagcacgtgagattaggattagaaatgaaaagagatgggtcccactcgcacacagtaaagagaccacatataaacgaagtgggtcccacatatgtactggcggctgattgtcggaccaacctagcaatttaccagttttcagacgcacacagctgccgaaagcgacccaacacgacccttctgcttctgcttgtggaccaaaccaccactcctcctcacacacacacactcacacttttcttttcttttttttttttctaaaaaagtttcactcaatttttaatcacaaacaaaatcattgtcctcctcatttttctttttcttcaataatataaatcaaatgagtacttttttagtttttatataaaaaaaaattggagggggaaaattccaatttaggacattctcatgcaaaactactaccatgtctttcttttcttgatgaactttcttttacaaattatctactaattttgataaaatgagtgtattaaatatgatagttgttaatgggataaatttctctcactccagaaggattttgttaaagagagactgcaatatcaaagaaaggaccttgtggtattaagaccagtaatatcaatgaaaatgcataaacacatcaatcaacaatggttaagcttatatttactttataattggtgtatcaatataactaatacgccaattatagttgtaatagtgtgattatgactaaacattttgtaaccttcacctactattctataaataggtgaactcatccctcactcaaatagattgggagcttatctaaataataaaatacagagcaagaaatttcttttaaaagtggactaagcaaatcaacctaagctcctattaaaccattatgatttttgtgtcttttctattatatacatattcattattcatatatattttatatattacattatttaagtacttgatattctaagtgaatacttgtagttttggtgttgtctaaattctttcacaacaaaagtagttggtctataaatcctcacatttattttactttatgaataatctattttgaacaacatacaatgcactacccgaagaaactatataatttacgagtgaactataaattcagaaggaaccctgttagattcaaagaaaacggacacccttcttggagggcttgcctcttctaaaataaatttatagtattgctgagtgtcaattttgtcttatgaatcactaattcggaaaataaaacgtgttcttaccataaacacggacaataattttaaacaaaatatcttatagtatggacaaaatataatgtttttgaaaaattatttttataaataataattatgaaaagaaaattattatatgaaatgagtttaaaaaatattactttcttaaacaccttaatcgacaatcaaattcaatgatattgtatatgtccaaataattataactcttttactttcttttctgcatagaaagctaagaaaagtagttgattgtgtattatctccatcatgatgagatgagtggtgggtagtagtgggaatgaatgaatggtgtttgatttgcataattggacacaccaagtcatgtaacacatgcagcaaaattgctactatactttattctaataataatataaaaataattacatatatatggtgtgaccttacctactcagacccattatatttagatggtatataccacacccaaacgtttttgctctctttttactaatttctcttttgagatttttttatttttacactttaaaacagatttttttttgacatttttacggaattctacgtaaaaatttctattataactagccatgcaatctaaattgcaacaaaaaattgtataaaaatccctattacaattagtgctgcaaccactttaaaaaactaaactgtaaatttaaaaaaaaaaaattaaaaaaccagtatataaaataatttccaatttcttttttcaccaccagctttaaatggcacctgcaactgtattgtatttatttggttcgtgaaagaaagaatgcctttgcttactcacacttccacttttttagttccacaataaactcataatttactaaaatcaagtcaaactcggcggctttaaaaggtcccacctatttctttattaaaatgttttttatttaaatgtgtgacacaaaaagctatttattcaactaaaacaattttataatgtttctgaacatcaattccaagataataaatactttctaaaaatagttacatgacattaggaaaagggtcgaaattaatcaattatcctgatttttgtttttcatgtcattttcattaacatggttaagcttgaaattaatttctgcctaagtagttcttgcttaaagaatatagggtaaactttcctagaactttagaatatagaataattctcctgtagaatatgatacaatcttgatctttcatcatgattatatacttcaaatgaatggtcgagatcttagatctataaagccaaattataaaaaggagaaaaacaaaacaaaacaaaaaaaacattttacttgcatatttacagtagtgtgtttcacaaaacacatatacatgaaagtgaaactatggaactgtacagcttgaaatgtgatttcactgtgaagatttttatcattggttcagaccacacttcatggataaactgaggccagggtattctagtaattacagaaatggcttagagaaaaggaagtggtgtgtgatctgagtgtgtgaggatatgattcacaagtgagatgagaggttctgaagtacacaacccttttaagagtatgactttatcaaacccaagttgtaaagaaacttctcagagctggacctaaagagattacccaaggagaatctcccactctcctgtggtggggatttagataacaactcttcttcttttacgcgaagtatagtcaagccaatttcgctcctaaccgcctcaattgtctcggttctcactgggtttccagatgcatcagtcacataaaaaacatttactgcttgggatccccgggttgtaacctcggctctagtcactgaaaggccattctctctgaatattcgagtcacatcagaaagaaggccagccctgtcatcaccacaaagctctagtcttatgccctgaatacaaaaataagaaaacaacaaaaggggtggaattattagtataaacaatcacagcagcagcttttaatccaataattaaaacttatagatgcttttatacctcagaagttcgccttcgaacagcagcttccaagcaattgatcactctctgcctctcagcttcggaactaataggacagccatccatgtgccttatgtaatactcctataaacacaaagataaagctggtaagtgacatgaagtttaacttaagaatatgaaactaaagcctacaacttgatggagagaaggacaacctgacaagcctctggtccttcagaattaacagtggcatggtagaccacatattgcatatctgttaaggtacatacagtatcgaaaagcagcttaggacggtctggacacctcaagttcacaaccgtgtatcccttatcagcacaattctccacagttacaagagcctttctccggtcactggttgtcccgccacaatctgtatcatcaacatcataatcacgatcagcatacatcatctgatgcagccttctttccttgtgtgtagaacccacagatacagcagtattggcactgcgcttgtctctgtccccctttagaacatataggagaagctgtttgatattgtcaagacgatcagcatcgttaatgggtaatccagttgactcatcggtaatgaaaacaaccgatgccattcttgaattatgagtccacacttctgctgcgactacattacatttaaggtctgcaagaacagcaaaaacctccgaaagcaatcctggcctgtctcttccagttaactcaattgtagtgttttctccagcagcttgaacaccaactgaccttcttaatgaccgaaaactccgtccccttggacccaaagactgcaaaatgcaatcaagcaaagaaaattgcattagattgttagtatggtttactccacaaaatttaaactaaacaagccaccaacataataatttagtgtggaaatactttagttcaatctatcatgcatggaccaacattgagacaagaaattaacaaaacttaaattgttagcatagtttgaacacagaccaacaaccaaaggctctattacaccacattaaagaataaacacattaataatgagatttgatttcccaatcacaacattacactgaacaaagttcagattcacagaacagcacaattggaagggctagctacctgttgaatccgctcagccacatcatcttcagatagttttctcccacgttgatcagtgacatgaaatactgcaaaagaaatagtgggaattcaagaaaatgagtacctgagatacaaaaagaaaaaagagagagatcttgaatatgaaaaatccattgaaaatagagactaaccatccataaaccattccccatcagaagaaatgtaagcacgtcttataatgaggtttaaatcagttaaaacctgaaccacctcaagcaaactcccacgcctatttgcactgtcaacctacaacaagtcccaataataatgatcattataatgaataaactaacaaatcaaagactaacaagcatttaataaaaacaatcaaatcatataccgtaatcagagtggcttccctgcttgaatcattatcaactgtaaccctgcaaatccaaatttcaacaagaaaaacaaaaatcacaaacccttttcaccaaaacactcaacaatcaccgtttcatcacaggagaaacaaaaagacaataatttgtgcaaaataaatgcatatacacattatcaaactaccaagaatgatgaaattgagagtgaagtagtggtacctaggaggattaattctcctcataagcttctcaaactcgtcatcatgagggagagaagaagaccaacaatccattctcaaaagaaagaaagattccgagagagcccagataacaaagactaactatgtgtcgagaattgagaaaagggtatggagtgaagagtgtttccaacaaaatttgtataaaaaagttgtctcttttttttggtagtagagaagaaaagagaaagagagtctttgtggctatgcaggagctgtggtgtgtgttggttggggtggtgttggctctgagctggactaaaagaaagagtcttggatggacataggaacacaaacagagagagaaatgagagagaggatgcgcatggggacactattatcaatataacccattgtctctcctcacttgggacccactcccacctccacacatccgaacacttgtggtttttttttctttctttactctactagggttttgttttgtctgtgtttttatttattttaaatatcataataaatctctctatttttttttagtaacaaacaaccaaggcggctcaaccttcgtagtgtatttttcatttattgttttagtcttatattcttttttattttattcctaatttataaatattagattttgtctcctatctttgtgtacttcagatccgattttttatttatttaactttaaatttgataataattgattaaaatctcattaattttaatatatatgtatataaatagcatggataaataacttaatacttagaagtccttaagttaaggtaaccaacccgtttgatttggtacttgttctttttgtttgttcaaacattgaacaaatctgaaaagattttattgtctttagcttttagggaacccttctattttaaggacctctatttccttatcacttgaaatgtagtaggattttggctagctttgtggtaggagtaggggtaggggtgtacaaaaatttttgtaaaccgcccaatccgaataacccgcacaaaccaaactgacaaaactaataaaaaatacaaaccgacataactcgacaaaattctaaactgcccaacccgatttaacccgatttttactttttttttattattttatatatatattatat

SEQ ID NO: 380431 - DNA, 1647 bp, Cannabis indica
agtgttatattttgtgtacacatattatatatgttgaaggatcattacttagagcatttgtaatggagtgtcaaaaagtgatgtattattatattttagtacatttaaaaaaaattactattctaatagtattttaaaaagtgtgttaaatttgacacaagatatagcaatatgttaaatttagctcacaataaatattattttataattttatttgttgactaacatgcaccaatataaatagttttatcggagttgaccttaactactgttgatcgcggaaaacgaattattatatataattagtagtaataaaatgtgttttagagtgatgaaatttttttatgtgattgggacgttaatgagttttagtccatgaatcattagtatttatgttgaagattataacaatagcagaatgcttaaagaatttgatgttttggcttaatctcccagaatcctttctcctctttacagtggacatggagtcttatttataggaacatgcatgagcttattgggaaaactaaagacccgttttccttacaattcccttttagatgtatctgtgaaggactgcttccttagcgtggagggttccccttcgtaggcctgtagaatatgcccaaagtaggtgcttggtaaaaaagggcaggacttgtccacgactgatgtgactattaagggcatgagccgcatatatatactgggaaagaggcgtgtgagaaaagagagtgggaaaatctccaaatttatttactttgtgggaaacttcttttgttgattgtaagaaagagataagctatagtgatttttctagttatgtgctacaaaagttggggccacacgcatcagggaggatccgtgaggtcttgaccttcccggacgttattttccttttatgtttcacttgaataatttcttagggcagacacgaccctccttcgatgcctttctctcggagctaaccatatctctttcaagagatgaaaactattaagtgccctttggtcgggttccacttgccacttagctaactgctcgggggctatgtgtataatctaaattttagaataacaagaactaatagtgtttaatactaccatacataacactttataaaaagtaacactattttataattcttattaaattaaagagtattattattggatactagtggtatctaatactttctatatgtgacgctatagtgatattttctaaaaattaaatttttaaattatataggacccgatacttaattacactattaacagtataatatcgaaaagagtgctagacactaacagtaccttttaataattttctaaattaaaatagactaattagaatttttatcccctaaactttaacatgtactaaatcatgccccttgaacttttgtcgccgttaaaaaatccccatgaactattaagattgttagatttaaggaattttgtttaatttcattcaattttactatttcagtgattgtttatgtactaaatcatgctctccaaactttgatatttaccaaatcatgcctttcgaattttgacatatactaaatcatgctctttgaactttcatccatgttagattttttttattaaaattagacaaaaatccttaaatccaacaatc

SEQ ID NO: 380432 - DNA, 2060 bp, Cannabis indica
atattatttaataaaataaaatacttactagatattgaaatatgtcactttgtgcttggcagcttgttaacccaaatgcaatacaataaaatctgaatctaaaccctaaaactagatggatgaaccaatcacacccccaaatacaacaatatatataaatgtaagtacttccctctattttttttcttcttcattttacaccaactaaaattaaaaactctcacacattagtttcaaacgcgaccaacataattaattaagacatttgaaaaacgaaacatgataattataaagactacgtactatattaactaattaataattatatataagtagaatatatttttgtaattattagatgactattttgcgttctagtccacgccttcttttggatctttcagaggaattggatcgttcaagaagagacttcaaagcattctgtaagaaatggacagactcaatgctgtgttctttatcagcagccactattagaacattacgaattctgccaccaagtgtggccatttcaactttgagtgtcttcaaatggagggactttagtatttcgattaggtcaggtatgagatctgaccggtcttcacaacataatgaagccttgaatataagctgcccttccccacctgctgtacccgaataatttccagaagaaagcactgtgatctcgtctgtttcagatgggaagctttccagttcggtcaactcagatgtttgttctttaagctctttcactcgttgaactacttttgctaggagagaagctttgtctgtctgagaaatatattttatttagaaaagtgtagatgcttttcttaaacataaacgaaactaaaaaccatatagagccctagtgaaactctaaaaggaaagagatacagccaattattattatcattgcacttttccttttgaagaaaaactacaggactactcttgcttttatggcttagtttgaatattcaaaagtttatgataagataaaaagttggtgtatgtagatggatccaagattttcagaatcttaactatgtaaaaaaatagttgaaagatcgtcgcgtaattatattaaacccagaattatattttcttagattacataagttaaagtcaatgagtagattttctatttttcaactttttttcttcagtcccatcaaattacagtcaacttaccaaaaaaaaaaaaacactaaactaaagttccaagaagtgaataaatcaaccctaaaagagaagccatgataatacatgtatatatatttaattaataccttggaattacaaggaagaaggcttctgagcttatcaagatgagagttaatcctctctctccttctcttctcagcctccttgtgatttttcaaagcgacaagagctctgtcgtgaggagacgtcgtattgctgtcgctgcaagttccggtcgaacccttagaatatgggtaataagaggatgagctacaaaagctttgcatcgacgagaactgatgattattatgatgttcgccggaaccaccgcccggtgccggaaagttataaggactcacgacgttgattaagccgttgtcggccagaaactggtagaggtccggattttccggctgcatggtggtggtgattagaggtatgggatttgagtgtgttatagatatatagttaaaatttgttgatgtggtaattatgattttgaatggacctgttcttggcttagctttttctttggactaagtgaaatgaaatggaagtgctttgaggggttttgctaattagctttcggtggtactttgtccatatagtgtatttatatatgtttattaaagagaaagagggaaaaaaatgaaaaataaaaagagagaaatagaaaaagacccgagatccaataagtgtacaagcatgtaaagccaacccaagcttgttgtgagagagtgtatagagttctattcacctcgtaaaatattaaatacaccatattttttaaaaaaaatataaagttaaataatttttaaaaattattcttcctatttttttaaatttttttctca

SEQ ID NO: 380433 - DNA, 7249 bp, Cannabis indica
atgtggatgctgaaatccaaagtagaagtctaaaggtgggccttggagctatcattagaaatgcaaacaaaataattttagcattgacatgcattcctctatgtgcaactttcgtaccactagcaacaaagtctagtgctattcatcaacacattctattatctataaggttagggtacaaatcagttgtggttgaaactgactgtcgataagcgtgcgaggctatcagtattaacctctcggtaactttgtcttttggtatggtgctagaagacatttaaagtctaaaaaaatatttctcttgtatttatttatgtaatgttctagaactatgaacgagatagctcatttccttgctaaatttggtttgtccattgaccatgctaaaacttggtggttgggcttgcttagtggtctcaagttttgtgggaaaatcttgtttttgctaaaattcatcaagtccattagaaagaagaaatgatcttggtgagcacatgaggcgttgcctcccagaagcttaagtaccctttacaaacattagaaagagcccacttcgccaacacatgagcagtaacattagagtttctaggcaaccataaaacataacaacaaaatctaccaagacctgaaattaaagaagcaagacaaaaggataactcctatctcggggcccttctcgtctcaatggccttaactagcaacatgaaatcgaagccgaagtcgacattgtaattcccaactctttaacatcaagaccccactacataacttgcgattctcactctagtggatttgtagcattgatctgtttagtgaaaagagcctttacccctcaaactatatcaaaaattacaactctcacataagagagaccatttcgaatggcaacatctacctacacttggactctgtctagtcttggcattcatctcaaaatataggtcccttcaatagttctaacatgggacaccttaggttgacaaaggatcctccacgactcgttaaaatccttaataattgccaccgtaatagactctatagtgggggatattctattatgataactcaagttcatgtaatacgacagcttatacacaagaatagtaacaaaacatgtgaactcaagacaattaaccttatcatgatgctcatcaaaagaagaaggaaacgagatccattctataagagaataaatcgaagaaaaaagaatatcatcaatacaaaaatcccacttactgcacaaccaaatacctcgcccaacttgacagtcaataaaccagtgttgagtagtatcactacatcaataccacataaagagcagttactagggaggctattaaaaatttgatacattttatcacctatagacagagtattattgcacaatttctagataaacaacttaatgtgctcctatatttgaaggctccaaagcttcacaaacagaagttgatgtccctaaaatcttttcttattaaaagtcaactaaatagatttaagagaaaacttcccattgcttccaggtctccaaaccaagtggcctaaaagaggaaacatataaatagaaatcttgaggagattatccaccacctatacaatctgcgcactgcatccaccttctagattaatgcgtagaatcaaccaaatcgtcaaccaccactttcgtgtgcactaatggattaacagtagctagagaaataatacgatgttctctcccaaccacaattgtttccatacctctactttagactcatgtcatgtaatttatacactattacttaagactagatctttgtacactccaaatgcccttggtagtcgctgacatcgaacaaggaatattaacaacaccaaaacaagaaccaactaaatatttgctagataagaccattgttcacaggttgtcatgcttagaggccatcaaccatcccagtttcacaatttgagagtcattaatatcagcaaattgttgtattcctaacccccgcatgactttggtttgcaaacattatctcatgccacaagagagaggtaactaccaccctatacactcccagtccaccaaaacttctaaccttttcattcaaatcacttagaaccctaatgagaaatttaaaaatggacatcatgtagataggctctgcttctgcttgcacaacacttttaatcaacatcgttctcactgcttgggagagaagtttagccttccaaccctcctttttctttgtgacaatatcaacaacaaatttgaaatcttagtagcttagacaaaaggctttccaagaaatagcttatcttgctccatcacatagtagcctagatgactgaagatagggtccttaccttctttctagagtgttttgtagaaatagcctttatgattttttttgttagcaaaataactttacaaaaaaaattattagcaaaataactttatatggtcaccaaaacgaccatgaattacactgtgcgactataaaatgaccattatggtcgcaaacgactatagacttatggttgcattgagtaaattaagtgaggtcaattttgcaaattttagtacattattagagcatctccaatagggattgcctataaagttgtttttacaaatgttgatttttgagatgcttttagtttggtgaatttcactcctctctacaattctttgaaaactacaacttcgttttgggctgttattcagttgttgacccgacctccttaacaaaaatcctttattttcaaaaataataaataataaataacggcaccgaacaaaaaatgaggtttgcttcaaaattttagacaaagaatcgtagcaaagtataacattcggagatttgaaggttttgcggcaattgtaatttgtaaatattcacatttttatggctacaagtttttagttgcttcgacagaccatggctagtgacctagcagaaggagaagaagtagtagtagcagtgagcgacgatgagagtgaaagaatagtaaaattgggatcgtacggagggatggtgaggctacttcttgatgatgatgatgatgatggtgatgacgatgatgcggccgctgaagagacgatgctgctttggggtattcaacagccaacacactccaaacctaacgccttcgtctctcagtcctctctacacctcactattgacgcctgcggccactctctctctgttcaccagtccccttcttccttggtacctctctctacttctctccctcaccatattaatcttcaaggaaacataaataaaattcttttgatatcgtacgattattacaagaatgaagtaataatctggtcctgatttgttttgatgcctagtttttgcgatatttgtttgttgttcaatgttctagtactattttggctaaatgatacagaaaataaatgattaaaataaccttcttatgataattggctcgtgtaacaatgattccttcgagctgaatgttattttgcaataatttaggtacaaattagcgatcatatacaataactttttgcaaaacaaaaggctttttttaggctgtttatgcttgtaaagaaataaatcattagtatagtaatttttatcaataagaaataaatggagaaagtgagatactcttggaacttagaagggtattttcttctcaatgaatcatgatcatcaatttcattaattttgaatgtggttctctgtgtatatttttgtcatggattgtagatcactcctggggtaactggttcggtaatgtgggacagtggaattgttctaggcaaatttttggagcatgcggtagattcagggatgcttaatcttcaaggaaagaagattgttgaactgggctctggatgtggattagttgggtatgagcagattatcatcattgttttcattcaacagtttaataaacattctaacaattcatcaattgtgttcctctatacatagaaagatggaggtaatcgtagttggattagagtttgttagcagcttgactggagagtagcatttttatttttctttcaagtgtattgtattgatttgttattccagctgcattgcagctcttttaggtggtcaagttatcctaactgatctgcctgatcgactgagactactaaaaaagaatgtccaagtcaaccttgatcatggaaatgtgcgaggttctgcaacagtgacggagttgatttggggagatgatcctgatacagaagtgattgagccattacctgattttggtaagtctatttcatattcaatgcctctagatactagtttgtatgtgccaaaaacttgttgaaaccaaatattctatcttatggttatttactatacaaaagggcaatttattttcccctctttgttaggtggtgcaataaccaaatgtttgaacttaaaattgcaatacccctttggtcaacttctattctggctctttttttttactgtatctattctgaaaggagtctccaaaagtcttaacgacatacttctttgtgacgtggtaattcattatttaagactaagacatgtgtaatgatagattgttaaatgaaattgaataaatagttgttatttgtatttgaattatttaaattactgtgtgtggaggttgaataggatggatattagtcagtgtagtatgatgatgttgatgagttgataaactggataattggtggaacaaggaagagttatgttttaatttttatgtgtaggaaaaagaggagacaaggtagtaagttagtagtaaaagacttgatttagctactcaagcttggttacaaaatggaaccttgatggggtattgtagttgcatgcccctacatttgtgactagaataatttatctagattgttctagttctatatgattcacagttgctctaaattttttttgattaattacttctaaactcttttaaagattttaggcctctctagtttatttattttcctacaaatgtgtaaaaatttctagagtaatactattgtagaaatgtctagcaacttttaatatataacatccttttagtaatgctatagaaccctgtatactgagctcgatagggcatcttcagtgttgattatcccatggtctagcgcagaatatgctttggtagttacaatatgttatgtaaacacaattcttgttctcctatagccaaagatcacgctccatctttggagactaaaatagaatgtatttgatagcatattttagttatggcatgaactgacatgccttcaggtttgggttcttagaaatgggaatgcaaaaccaaaattatatttggtgtagttttagtggagggtttatgattgagtggatcccacttttaagtttattttgggggtaatctcaaactctttatgggacgtttggtatgaggtttagacttgatgggaatgaggatgtcaaacataaattaaattgtaatgaccaaggggtttgtgtttctaaataggtctcacttttaaattaaaatgatggtaatgttaatctcctctgacacttgggtttaatattctctcctactctctccaactcaaacccacaacacaaacacctcattaagtggccattagttggaaggaatgaaaacatagctagaataggaatgacattctaatactttaaacaaagaaatggaataaaagttatttccttttctaattacctctaaccaaactccacctttaaatttgagattctcttaatttcaatccctttcaactaaattccaccaagtaaaactcttacaccaaacacaccataggtttcctgttgtgacttggagaacaaaagaaaaacacctacatttttttttgaataacacgtacattttaatgcttgagttttcatattttcagaaattttcacttctgatgcaattgttacattttgtttttgaaacattattcaagttctcggatctgacgtgatctatagcgagggagctgtggcagatttgttggaaacacttcaacaactctgtggatgcaatacaactatcatgttagccggagaacttcgaaacggtaaaatttgcaaaatttctttcctaaacttttactctcaagagattgctctaaaatgtttatttctgttacagatgctatccttgaatactttttaaagggtgctatgaaggaattccaggttggaagagttgatcaaacacaatggcatccagattacaatagtggacgtgttgttttgtatgttcttgtcaagaaatgagtgttgaaattggtacaatagcatattaacagttatttagagtaaacaaaaaatccactcaagaatttgattacttgtttatcaagggcatttttccttttgcttttgtcctccaatttctacttcccacgagttctaacctaaattttagcgcacagcaagtaactaaagttgtcatggtagttaaacagaaaaaagaagttaatcaagtggtcggcttatggttcgctcctttgaggtcttggtttcattactcattgagacttgtctagttgggaaacgaaaaatcacaatccaaaaccacttgttcaggatgtaaaattccataagtggttttggaactaaaatcacaatcattaagagtgatcgctcaagatgcagcttctacaaagaagaagcaattgaagcaattctagtagctttggattgtcaagaatgtcatgaaaaggttcaagagcaatcaactaagctctcctagtgctaggtgggtggttctctgactcaggtgaggcttcaattgaaagttggctcttagaacaatatctaaacaggttatttcactctaatagttgtccaactgtaaatacaagtatcaatgccactttattccattcaagttgtgcaaactcaaatttattacaatatctaaacaaatattattaaaaactcttttttaatgtttcattcatgtacggaaaacaacagttaaaatactagcagattataacctgagtttactcccttgtaagtgtatgggactgtgtaaatgtttgtgtcgttgtataattttattacaatttgtaagatttacaaatttaaaaaacaatattatgtaattattatgtaatgaacattttaaaagaaaagaatgtaatattggatttataaatatttgaaaacaaattaatgacacaagttgaaaaaaaaaatattataaataaaaataaaaaacaaaagagcttaaaaatatctaacctgaaaggatcgcacatcaactttacaag

SEQ ID NO: 380434 - DNA, 3422 bp, Cannabis indica
aatataacaattttagatccctgttaactttaggacaaaccttagctgtcacaagctcccagagtacaattgaaaaactgaatacatcagctttctggtcatatggttgatggtttataaccttgtgaacagaaaagaaagaataagaaattgaaagaacattgtaacaagtaaattcatacagtggctttctcctattgaaaaaattaattaacgtagaaaaaataggcaaaagataatggaagcatggaattaagagtctagcataaatatttttctgattttttcttcttttaattttgaggcaaacaaatattagcaacttcattaaacaaggtgtatattatagtgttacaatacaaatcaaacagaagtttgaaaccagcatgcctgaattttcaaaaacttggttgctggtatgtcagcattttaaaaaacaaaagaaatttaatattcttccatcttgaatttacaaaaatcaatttggagaacaattaaaacacaggatttatttaatgatatctacaaatttctgattaagctggatatttttcaattactagtaagctgattgagatttttattattattataaaaaccaaccaacatgcctacccctcctattatttcccctattttccactgtcatccatctggatatcaatagatagaatcagacctcaggtgccatccatctgtatgttccagtttcagctgtcattactcccccttgactctggaaccgagcaacaccaaaatctgccaccttaacaacctgaagagaagaagcaaggaaacaaattgaacttttaactaaaaatataacaagtgaagagtaaaatctaaaattatattaaagttagtctaactaagctgataaatccataggtaaacaaatatattcccatatttaacaaatcattatctataacctcatcatgtgctgtggaaaattatttaaaactaagcaaccagcgatactgaaaacctctatctatgtaagagatggaagttccagtgtgtttcatacatgatcataaaagagatcactgatacctaagctccaaataaaactaatgttaagacataatttagagcggtttaagtcctttttatatcttgtaattgttttttgtgttaaaaaattgtacttgggaaaacaaaagcattgaactacaattaaattaaattaatgaattctcacattgtcagtatccataagcaaattagcagtcttcagatcccggtggattatgtcattttgatgcaggtattccattcctctgcagacatcaattgcaaacttcagcaattgtgggagcttcacgacattacgattcttgtgcaaatagtcatagagacttcctccaggcataaattctgtgagcaagcacagcagccaaaaattgaaagttttctaatcaatttaatcaaatgatagaagatgcacaaaacaataagcaaacctatgtgagtcagatgaattccagtatgtggaccaaatagtcacacggcttaaatatgaacatttgctgactccaaaaaatgagagcatatactatgaaaagacattaagacacaggtagaataagaatcaaagaacccagaaaagctactcaatattagaactcctacgcttctctttccactcattttccttaaggggaaaaaaagctgcttggctggcccctcagcctaatagcaagctaggaataaatttgcacacctcatcacattggttctattaggcataagcatatactcttgattgtaagatttttcactctacaaagacaaagctacaaagagaaacaaaggatgacaatatttttcagataaaattgcaaaggctaaacctcaaccaatcagaaaactacatacctgtcactatgcacaaattgggaaactttgtacatgcaccaataaaacgaacaacatttctatggtgaacctccctataataaaaaataaataaataaataaaaatacagatcccatgaaataatatcaatatttaagacagacaggatataaataacagcaaattaatttggactagctacaggagtataaacaagatttgagcaggcagggatacttagtagtatgaaaaccaaaaaattattgtcattcaagagaacggaaagggtaagggaaacaactttggaatcagcatgattgtgtagtttgtaggatcgacaaatccaaaaaaaaaaaaacgttaaatatttgtcaggtagggagaacttttgtttaagggatttcattggtttggtaggcgtcttgtctattcatgttgaatccaaaagtactgtctgattcaaattttcaataaacatagtccatcttgccaaagcaactgattttcaagcttaccaaaacacgatcccaaggtactgttggaagtgaatatataaactctagagttgaagaaaatgttggcttatatctttcttgtagtttccatggcccagctagtattttgaactattactatatgtttttcttgaaccaattatttacagttaaaaaataaactatttcatttatataagaaactgcaaaataatttaccttagaattgcgacttcctgggcaaactcatcctcttgtgcacaattcaaatgctcagatcggagaatcttaactgcaacatcttcaccaaaataaactccacgataccttgtgacagccaacagcaaaaagtcgagcaacaaaacacagcaacatgcaactgaaataactgatgagaagaactgaaaccaaacttacaggtctccacaagatccagatgcaattctctctcctattttcagtaatcttctatctatttcccagtctccaagtttggagggtgtcgccaggggtttctctgtagccgaatgacaatgtgaagatttagaccatgatccctatattagatgaaaagaacatggaattaacacccaaagactttattaagacaccccaaaattttattgaaaattaacataatatatttcttaacttatgcttactgttttttttattccttttcatttttttttttttttgaataacttccttttcatattctaaaagacctacaaatataaataaaatatattttaaatatttagacataacatttttttaaaaaaaaaaatgaaagaaaatttgtttaagtaattttttttaaaatcattatatattattcttataaaatacgaagacaagattaaaaaaaatgaaaatacacacacacaataaaaattccttgcgaaaaagtgttaaaaataaatttatttgattttttttagtgtatacatattcttgggttgcaaatatcctcctccaaaaataacattattcttaacaacaaaaagaacatagccttggaaagaaaacagtatggtaggcgtttggttggagggaatgaaatg

SEQ ID NO: 380435 - DNA, 2665 bp, Cannabis indica
ataactaaatataccattgtaagtatggttgttaggctataatttatcttatagttgttagccggtcaatcagttttatgacttaaatatacacacaaattactacttattattgattatgactttatatatatcatcgttctgtcctgtgctccacagagaaatcatggttgaaatgatctcagtattcccgtggtcattctttgccattattaataaacactccttttccctaattagtctcttaaaaatgagattagtgttgagctgtactcaattaatgtgtatctgccatcactaataaaattataatatttcaatagtactatcatgtaatttcatcagatagataagactccacccaatttatttcactccattcgaaattttatataatcacattattaattacagcattacaaaaccgcgtttccctggaatttgcctgtgtacgaatcatgatcatcttgatcaggaaacgctttttctttaaaaaaaaataaagagttagggcacattttcttaattataataaatattacaatacacttagaaattagtgatcagtcaaaatattgaagtactgtattcccatgcttactatactttatatatagcttaactatatatcatcaggcctggtcagaaaatcgttaaaatccccataaatggctcaaatatatataaattttatcgattaaacagcccagctgacaatatacatgtgccccacgtacgacaaaattcgtgtcagccgacagtgcgaaataatggttaagtgcacaataaatctagtttactataatgaatcatatcccaccacttatacataaaaatattgcccagttacgaaatgttgggttctgtagtcgccatatgactactcgtggtagtagtagtactaatgcattatatattattaattagtttaaataattcaaataaaacttgcataattaattaattaataaagaaagaaaacaaagagaagccgacatacaaaaggggattcggttgagtcaaagttatatgtcaatatatatatagcgctaatctttgagcattgccccggaacatgtcggccataatttaaacccagccacgtaactataattaattgatattcctcgttttgttttactagctacctagctagttatagttacaaacgagatactatacttttctttttctctccaaaaaagaaaaacgacgacaacgtacacattacgtactctgtgcaaaactgtgtccatatgatatgatatatcctggtttcatggacgaatgactgggattgacttgttgtgtatgggacgacgtcgtctgaccctggtataatccattgtaaagtaatctccagatgtatcactcccttctacccactctcgccatgtccctctgcttctgtgccttactactttatttttcacacccttccctgcaaaaaattagattcccttttttgttttagagatattaattatttaataaatttcttcattttatatgtatacaagactagttatgtaatggtagtaagctttgtgtttcaaagcacattcatatattttatatccaatataattaagggggctacttatcattttattttatttataaaataaaataactaaactagagccttctaagttgtatctatatatcactctgttctgtacatgttaagtatatattctttctttctctctctctctccccctatatatatatatatatatgtagatagatagactttttctgagacgcataacacatgctaattaatatatgtatatatatggtcacctgagaaattttccttctgtttccttctgttgttattagacatggaggcagagagtattgctcgtcgtcctatgaccatggcctgcgtgcgtttcaggagatgttaaaagaagaagtcttaaatttttttcaaagaagaagaagaagaaatcattaattattttagctagaatctaactaattaacaaagcaatattattcttcaactatcttacgtacattaacttcttcagtaggaaaaccaagcttccagggcaacggcattaatgcatgtacatgtactagaggagcctgctctgcttaataaaaatgaaagtaacaatataattatgtatagatggatagatagtattagatatagatatagatagatataaagtaacttaaataatcctcttcagtgaaaatagatgaatatatgtaccttgtttatgtgaggattgagtgtgaattattggtaaggaagcacagggagttaaaaaagccgagaggaaaatacatgataaagtaatgagtgccattattaccagctccattaaggatgtataaatcttaagagattttaatacatttgctttgtattggcatacatttatatatatatgaatcttgaattagagaaaacccggagagagagagagagaaagatagaattatacacaaagcacaaaaaccagtgttccaaatccaagacaagtggatgtaaatttcaaaacttctccttttaaggtgggcttcacgacacatttcttgtttcttccatactactttttacgcgcttattcatttttacacttaaaatattttttttttttacaattttacggaatttcacatagaaatcctattgcaacta

SEQ ID NO: 380436 - DNA, 3609 bp, Cannabis indica
aggagtgtcccactgtttggtccctggttacggtttggctcacgcttcaaaaatggctttgatgtactcgagacaaaggatatccaagagagtatccatatggaacaagaagatgacacaaccttgtctaatgatggtcagcgcggtggttctatggggacagatgaacgtgtttttcaaaaatgagacaattcattcagtatcccttattctgagagagcccaaccccaatggccctttcttcctactgttggtttgaagtatgggctttcctctccttttaagaaacacaaggtcggggtctcctcttttaatcctaagggtggaccaaaaaagtctaaaagaaatgtccaaactagagttttagggcccaaaggtgtccaaagaaacccatttttgggagtagtagtgaccctgaagatagtgtggtgggatcaaaaagaaaggaaattactcatcaagcggtcaacgagtttgagggcaataatttaacggtgcctccaggtacggtggaagagggaggtcacaaggatgcctttgctaaaggtagctcgattccggagcttccatgccaatctgcgatggagattacagtgtggccccctctatcaaagataggggttgcttacttcgaaggataaaggtgaaaaatgaaaagctgaaaacagtttgagggatggagaggttcagtggggagatcccaaggaaggggtgcgatgatcacctcttccaagagattagatgtaccaagcaccgtggtagaattaatgacaaacctgagagtttggtggccttaaaacaagatgacagactgtttgaagaaaaggaggtggtttcatctaatactcggaaagactcggcttcaaagtttctgataggtgaacacctcttaactatttttggttccttgtcacttattttggatgctaatgttgccagaggtagagtcactcttaatacgccagttgataacaaggattttcttgtggccgaggaggcgggccttattaagctccccaaggcaccatgaaaatgctatcttggaactgctggggcttggggcaagctcgggtagtggaagccctctggggtttggtgaggagggaggacctggatgtcttattccttatggaaacaaaagttaacaatgctaaaatagagagtatttggaggtggttaggttttttcaatgttgttatagtggatctagtggcctttgtctttgttggaaggttgggattgatttatacaaacggaacaatctaaagtggtggtaaggtttaacaatattatgaactatgtagaatggttttatttattcgtgtatgctcctcatgtcaagagtgctcgtaaactattctaggagcatttggccttagacgcttctcgtggacttgaatactttgctcaatcatcagtttaaatttggtggtaatattgggtcccaaggagattttgatgctctttcaaacttcctgctgatttcgggaggggttggtctgggaagtatggggaatttttttacctggacaaataaaagaaagttctcagctctcattaaggagcgactggacagagttattggggattcaaagtggattatttcttttccaaagcaagggttaaggttctcactatcagagagtcggatcatgctctagtgttgttggatttgttcttggattgagattctactcattgaccattttgatatctggaagcttcgattcgtgatccctcttgtaaagatgtggtcaaagaggccttgtggttagaggttgttttagcttccagttggtatcaaaattccatctcacgagacgtgtacttgctaaatggaacaaggaattctttggtatctgtaaggctaaactcgattctccaaagaaacttttattagaagtccaatctcgtcccctattaaaggtaaattctgattttgaggctgatattttactagaaattgaagaggtttctaagcatcggtgtgagatttggcgtcaaaaatatcgcgagacgtggttgaaggacagggacaggaatacgagatttttccatgcttctactgtgataagatagaaacatagatttatcatggcgatctcaaatgatggggtcaattggatctcgggtaggggctcgattggtgattatttcattcagagatttggaaaagtttttcagtcactccgtttccctttactaatgaaattagtgaccttattagccctgtggtttcggaagatatgaatgtggagttgtctagagttccgctagtggaggagattcatttggtggtgtggtccatgggccctctcaaatcgcctggtctggatggtatgcttggatgtttttatcggcatcattgggatactattagtgcggacttcattggcactattcatgacttctttgcttcgggagaatttttcaagacattaaatagtatatttttggttctcatctcgaagaggcctaatgcgtcgaagtttgatgacttctgactaattttgttgtgtaactttgcttacaaagtcatctctaaattgatggctaataggctctagaagatcctgcctggtcttatttctccattctgagctccctttgtgccgagtagatggatcgctgaaaatggcatcttggcccatgaagtcttggattcttgtaagaagaaaaggaggtagacatcctttgtaggattgaaacttgatacgtcaaaggcatatgatagctttgaatggggtttctggataaagtcctagaagcattcgggtttgataccaagttctgggctcttgtctataaatgcatcagttcagttagcttctccattttgcttaatggaggtcctttgaagcgttttctcccttcctagggacttcgccaaggtgatcctttgtcaccctttctttctatccttagtagtgaagttctctcgaggctccttattcaagaagaactaaatgggaatctccatggttttaaggtatgtccatggttttaaggtatgttctaacatagggtacatgatctaatttggtgggaccaggagtcagaggacagccatgtcaccatacaagggccttccggaggcatctcttggactttctctctggatgtgtctcattgattgttcggagggcttcgtttgctccgtctcctaaaggctggatggacttcagaaagctaaagggtctcgtttttggaggcgaggctctcctagacttatgcggaccaattatactttaggaaatttcgcgtgttgtccatctagaaacataaataaaagaaaggaagtaactttatagtcatatatttttctaaaaaacattatatattcatatttgtggtgtataattaagccacattcatagttatattaaaaaattaagtgatcaattacaattaaataaatctaattttctgtattttatacacagtctaattacatttacacttatagtttagttaaacagttataaatttaagatacaactatcagatatataaattatcaagatttataaatataaaattaaccttcataatacataggggtgttcatccgatccaatccgcactaagtgcggatttcatattttggat

SEQ ID NO: 380437 - DNA, 3138 bp, Cannabis indica
aagtgggccaacgacatattataggatgtgaagcatcatatctctttgagccaccacaatctactatcatattaggggctgagaaatctgggccttctctccgaggttcactacaatgtttaacaaaatcatcttttgcctggcttgaatcaagatcaacaccagtttccctggcaggatacatatagcattgttctgaagagaccctctccccattttcaaaaatgtcactgttctccaaggcattgccaacattattggctaagaagcaactactgtggcttagatttacagcacgctcttgatcatcagtaagaagtgagaaggtgggagcagccctcatcttatcactcaaaagtgggagcttaagagactttgacatgctacctctccgctccacaagggaaggtgaggaagactttttaaatggtgaagaactcgactgagaagttaaattagagccagctatttctggacttctagattttggttgagatgaagttttggttgagagcagagataagttagaaaaattagacagtgatgaaggtacaccagaagctgcagaaggagaatgcaaagaagattctgggaaataattagaactggtacttggttcagaagatatggaatccggagagagataaggaggtgaaggtgaagaggatgatgatgagcaagaggaggaggaagatgacactgatgaaggtgatgaagaatttttaggggaatgcaccaacatcattgagtctaaatacaccctggagaggggaattctaggtgcagagacaaaatccttcatattgccagaggcaaacttcctcctcagcagactccaactgctttctctagcaggaagatgggtttcatgctcatttcctgacgatgcaaatggcggtacaaagccccccataatagctttctggaaaatctcaaagtcaacattataagattcaacttttctatcaccagggaaaatcctagtggctgattttccaactaagttaacgttggcagacttatccatcaagggtaaaagatttgaaaaagcatccaaaaaatacaatggttcttccccttccttgagtactgttattggtccttgcactctttcataccgaacaatctgacaaacagcacctcttgcatccctttccatgattgttccacagttcttaccaatccaaacataaattgcggaacgaatatgaatgataaaggcccctctggaatccaaagcagccggagaaggatcattcaacatcttcggaacaagatgaagaggatcatagggcgagtgtggagcaagtctgtacatcctaagcaaggaacttgggctgagtggaaacgcatggaccctcttttgacactgcaacaactgacaagcaaaccccatattgggatcagctattcctctcgctgctttgacatactgaaaagcatcgtcaaaactctgaccttctctccacataagataagcaatgaccaaagatgttgaacgggacaccccttggcagcagtgaacaaaaaccctccctcgctgttccctaacatcttcaaagtaatcaaaaacatcatacaagatactagtaatatcctctgacgggctatcttgtaaccacaatgttctatacatgaaatccgctttgaagtactctggacagacaaacccaacacagttcagtacatgggtaatgccattctgctcaagtatttccctgtccttagcaacagcatcgccgccgaggtagatatgttctgcaacttttgaacactctttatcaaagaaagcaatcttatcccttctcacaagcccaccattcttatctggctggtttcgctgaagcgacgacaaatcaagcttcagcctttccccgcctcctcttccacttggtgtgggaggctgcggccactcaccgatatcgtctgaactcgctttgggccactcatccaagctcctacgagctatcgacaatggctgcaagggtggcaaacatgacctggccttgcaattctgctgagaacgaggagttaatggagcaggaaaccgacggttttgtccatggccgtttccaagactaccattacttggatctgcaacatctttctcttcattctcagggttgtgtaacgaagaccgcgaagcagaccatgaagccgaacgccagaacatcttccgggaaccggaaggaggctgcgatggaccccatgaagcaccagatgcatcctccttgcccaccatgcccacttccaaatccttacagtaaagttcacaaaataaactcaactaccccctcactaagctccaaacatggcggagtttatgctaacccaaatgcctaaaaccagcacccatgactatgaaagcactcacaaaaaaagaaactgaaatttaacgacaaaataacaactgattagcaatcatgtagtgctataatgttagaaatcaatgataaaagaaatagcaacctagctatgtatcttcaactgaaaactactccttcctgactatctagggtttataatcgatttagaaactgagaaattggttaacttactaataggagagttgggagctagaatgtaataaagagagtctgagagaaaactttgatcattcggacttggaagactgtaattttccaaactgaaaagaagaagagaagagtgaggcgaagagaaaaaaatgagtgaaggagtgaagagaggaaagaggaacagtcacattctaatgtcatagatggaggcgaaggtgcaccctatttccctgcaccgctacttcttttttattattattatttttaagaaaaaaaaatgatttattaagcatccactgtcaactttctctaaaataggtaacattaatataaatttaaaaggggaaattgcagcataaatacttaattatatatttaaatacttcatgtttatttttggtggtaaaaatatctaatgttacaattctcttacaccgaactaccaatatttccgttagttcatatggacacgtgaagggttcagatgcattacatttatttttattttattttaaaacttaatattcttaacatcataaactaaatactaacttgtttaaaaaaaaacgtaattctcattaacaattttcacattgatatt

SEQ ID NO: 380438 - DNA, 4430 bp, Cannabis indica
aaacacacttcatattattaatataattcaacatagccaacaaaaagtgcttgtcataaccctaaaattatgaaccactttattagtatgcactgtgatcctgatgcaatgaaaaccaataaccatcctatctcaagctaaaactcaatattttaaattaatgaagctgcagatcattgattttctcagccttctatacctaacatcttcggaagaaacaaataagtagtttcacaactcccaccgccactatgaaactaataaatgagtaatgtaccaaaataagaattctctaacccacactgctaccattcacaagtgagatagaaagagaatagtaataaacgtacccagccaacaatgttaagacccttttcaataaaagatgcgtccgttggtcgcttcccactcaacacttcaagcaccaggaccccaaaactatatacatcacttttttcagttgctctgccactttgcatatactctgcaatatatatataaagaaaaatagctgaattggcaaggagcattttgatatggaaatgagtgttatccacttgtcagagaaagctgattgtaataatcttaacttcatgaataccactatgaggatatgcaaatgaatgatatcaagtacaacaataacattttgtgcaatactttcactctaataaagtcgagtgtcttcattatggaatttttcaaatgaaaaaatctcagagtgaatggtacaaatctatttcttccacaaagcattaaaacacataaaatcaaatttaatgcaattagaaaaacaaaaatattttcaaatggttattatctgcaaaggcaagataagaaacatttttttttatgatcctatcatgaacctatgtaaggaaaaaaaaatatctaagaatggttacccggagctagataaccaaatgttccagcaacaattgttgtaatgtgagattcttcatcttctaaaagttttgctagtccaaaatcagaaactcgagcttcaaggttgccatcaagcaaaatattgctcgacttaatgtctcgatgtatgatcctaggagaacaatcatgatgcaagtaagccagcccttttgctgctcccacgataatattcaaccgtacatcccaatctaactgctcagatctttctcctgaatggcatcataacttgttaacatgtcaatctcaaacaggattaccactaacaaatctgcatattacctaactgtcatcaaataatgataataaaagatatattgatgcttccagtactaggacgataggacccaatgggtaaactctataataagtccacaataatattcattgtatatcccaaactactgctcagatctttctcctcattggcattataacatgttaacatttcaaactcaaagaggattactactaagaaacaaatctacatattaccgaaatttcctaaagataataaataaattaatgatgataataaaagatatttttgatgcttccagtactaggacccaatgggtaaattcaatgctaaatctttttgcaattgttttcttaacttggtacaaaaaagagctgcaatctgtatgtctaaccctacatataataccttctagtgtaattagatatcgacataaagtcaatttacttgcttcatttaaaacaagactctaaggtgtagagaaaaaggaaataagatctcaccatgaagagcttcatcaaggctaccaccagataggaagtcatagattaacaactttgacgttggagaattgcaatagcccctcaaattcacaaggtatcgatgctttatacttccaagaatttcaagttccctctcaaaaaaccgatcaaagccctcattaatcttcatgattcgttttaaggcaaaaacattaccatcgtccatcgccagcttgtacacttgcccaaatcccccaatacctatcacatcttcctctgtcaaatgctccaatttcttaatgatgtcttttgaagagtagggcaagtccccatggaacattacaattgatgcacctgaaataaaaagaatgtcaacaaacagaattcaggatcttaccaaggtgtaagtatgtatatatataaataaatattgcatatatgtagaaaagcacctcgaccaacgtccatcacaaaattcttattgtcatgccttccaaatttcttatatagaaaacaaccccagaagcacataagagccactagaagaagcgccccaacagttgctgatgcactaattagtagccgaccagagtatttcttctttccagcttgatttggtcctacaatacaaaagattttccatatgattcaaaacagaacatcaaacatcaaatatctcatgtaaataaattgagagaaatactataattgttgccaacagaataaattttagaaaaatgtcacagtaattgttagattttagggtctagagaaactatacaaaatttattttggataagaaatgaaagatgtataactaaaaagatgtaggaaattacctaagttacaagaatggctgtaaaaggtactgctcactaaaccaacatataaaacaagactaacacataatacaagagtaaagcctaaagcctagtacagacacagctgccaatcccatggtagcatggaaaaagagaattcttgacttaatattgaagattcaaatagccacccaatgttaaaattatcccatacagatgaaagagtacaaacaaatgcttacactaacagatgtcacactaatttcacttataatctgcagtctcacctgagtccgaggattgggagcctgatggagatcctccactgtcatttttgcaaatcaaattaatttgcttaccacatagaccacgatttccaatgaagctgcaagaaaattatcaaatcaatacctcaattatactgacaacagacattttgaaaagtcttatcacatagattggccataatacttgacaatacatttccatatttttatccaaaaaacaattaagtgacaagaaataaattccaaaagttaagagaagaaaggattattccttgtatattatgaaaaccaaatagaaaaaatctttttttttcatttctatttttactttcaacgaaatagcttaaaacatcatatatgacgtgatcaattatcttacaatcaaaaataaatgtgagtacttacgagctttccatgaagttgttaagcacaccatcagttggtatttgtccaacaagaaaattgtttgacaaattgctttaaagaaccagattttcaaagttagattcatcaaaaatttaaatataaactgaagaaccttttgttctaacaaatataaaaagggacaactaaggttactcacagactaatgagtttgtccaacttcccaagagaaagaggaatatttccactaagggagttgcttgaaatgtccctgtatattagaagatattagataacagaaaatatgaaggcaagcatttgggccattccacaagattaattgattttttttttttttttctaaactaggatccccaccaaatcctacaatatacgggaacaccaaaggattactagatgagaatattcaagttatcatcacttggataggaaaataaagatatgaaatgagactaatatattattcaagaaaaagacataatacacattaaaaattaaaatacagaacaatccacataaaagcaaaataatgaaacatataaccgcagacaaaaaaaaccacctgttcactcaaaagataatacttagagaaaatactaatctccttcacattttaagccaaattgcaacccaaaactctacttttgcacaatgttttggaaagctatcttgaaaaatcatatcaattctgtgaccaaaccatcggcatagcagtgaacactccacatttctaaagtagcatcagcttttgattataactccaacaaagtcattaatcattaataattttttttaacaaacttttttactactcaacattatgttaacatccgtaacattcctaatggttgctttccctcctagctgtgagaaagagtaacttgatgttatttgcaagtgaatttctggtgtgatatcttggtattcttctgctttggatatttaagtaataaaaataactactttcctctcaaaacgcaaaaactatttcaaagttacttaaaagcaatatcatatatagatatatatatatttagtgtatgaaatacaaaatatcatatatatatatagggtgattctacaatgcacccccttaaaagggatgtatagatgcacccttaacttattttggcattcagaaaaaaaattttagtctaattttttttcatattcatgtacgttatagctatttaagatatccttcaaaattttgaaaaattcggaataatttaca

SEQ ID NO: 380439 - DNA, 5405 bp, Cannabis indica
cccttctctcctctaacaattatttagaagagaactatgaaaccggagcaagtacatctattcaaaaaatagttagttgcccacctattacagtagtaaatagcactgtcttcacagagtgcaatggcacaattatagagctgaattgcatcagagtaaagttttgactgcattgccctgttacctaaccagagagcaaaaaatgacaatagaaatagcttaaaatatatcttttaaaaaatttaatgataagaaagacaaaattagcttacaattgattaatcagtaaactgtatcccagtaagcaagcacattaaaagatacaatacacaattggatgaaataagatgcaaagccagcattgatgtacaaagtctccacagacagtacaaggataagttaacgatgtctccacaagttcccaataatttccccctatttgacaagtattatatataagataattacttggtcttcctttagttcgacgggagggagaaaaaacccagttgatatttcttataaattcactaagatataatataaggatgaacaatgcgtcaaaagtcaaagaatgaaaaccagggtaaggccatcaagttgcctaccttgtgatttcaatgtctcagctaggttctttgtattatattcctggcacccagccctttccatctcctgaaataacacatgaattctctttaagttatcatatttacttaagaatctttaaaaacctcaaaatgtagataccaataaaaatggtgaccttaacactgattaatatccagcaacaaagcaatgtgagttctcaaaaaaattaaatagtgttttcatttcattgactaaagcaactaaatatatgaagctaggtgatatgaatagcaacaaaaacaggtttgaaaaagacaatcctacatttgtttccttaactaacgtacttttttcatttgttgaatgcttaacaaagctacataacatacactatagactcaactgattgagatggaactcaattgtcttccattaacccaacttgctgaaagatgcagccatttttattcatggttcatacaatgagggggagtatcaaggagaagaagaaagactttgtagaacatagctatctttgctatcctttgggacatatggttaaagagacattttagaattttcaagatctgacagagggtgaaagagctatccagtgaagtatggatggctatttgaattttcaataccaaggactttaaacttctttattcctacttagctattattttatgtattcgattatgaattggcttcctaggttgtaatttggatgagataccttaccatccttttattaatatactacctgtgttccttataaaaaaactacccgaggtactaaaagtgaaagggtgataacaataagtttatacaatcatgagatgcgacatatgaattatttatggtaaaacatataacaatgagagagagagagagagagacaattagagcattgtggaataaccgagttgctttctctactccaactgagtcatcagttccatcgggaatggtcctaaaaaaatgaatcttctcaagtgcggcaaagaattgtccaaaaagttcatctttgaatgcccctgccagtagtgagataacaaaaagcacactaatgtcaaaagacatagcacaacctttgaaatacaataacagtacccatatctctcctattttaactagaaacactggaaattaacaaagagatcggcattcctatacaactaacgaatctctcagatccttcagtactattaaaatataatttccattgacaggagaaccataacagtcacatttttttaatacgatatgaaacagcttgcaaaacacaaagtattttttttatttagattatcctaatgatagcacaattgtagctcaaatctaaggattactgtgacaccaaaagcacaaacaaatgcaatatacaatttactacccataaagggttttgaatctgatctactttcatgctatagtaatgatcagatgaacatgtgatttaaaagaaagaaagaagaacaggtggtaatgaccaacaaggaatgcaaacaaaaaaagaagaaggtaaataaacaacctacctgatgtatgggcttcacttcttgcatctccagcctgatggaaaccatgaaaagttgaaaaaccgagattcaataatcagggaaccatagtataatacttaaggagctcgacacaaaatcatgcatctccaaatcattcaagaaacgataagggaatgaatagaattaaagaatgtatagttgccatagtttgtaaagcctattacaccaaccattagtagggaaattttatcaaagaaaagtgaagaaatactatataataaggggagacaataagtgattaagaaagaattattgaggttgacataagcatttacgaactatctatatgaaacaaatgattagttcctttccatgaatagagttgactcgtggaaaccaggactctttaaaggtttaaaatttagtttatttccttcctaagagattttatgatttctaaatatggtaaggttttggtacattttcttcacagcaactatataataaatatgcaagggcgcctttaaatgtttaacatgagataaatggtaagattttccatttgtaatcattattttttatgatttgtaaattagttgtgtcgtgtgagcatgctatattgtcagtaaattcttcacctcccctttgtttggtgaagcagaattgaattgatttacaaactagatgtaacaaagaaatgctataaatcaaaggttcatctttgagcaatggggctttctagtgtctgatgcccaatcaagtacaaaccagcattttaagcctacagcacttatcttatgtttgttttgacagctagaatctgattatcaacttgtttctgatttgattagcaacgcgtgtatttagctacaatcttttgtaaattttctagtattatatcattaatatcaaccaggagtcaaggacaaacatttgacctccagctacaattaaaaatgtacaaatttggttaataagctagtcatctaagaggttcttgactctgcaatacggccacaatctcaattattagccatacccccaagaatttgtgatctaaataaaagagcatacatcaaaaacatcattaacataaaatatttatgatgttcatagacgacctaaagtcatgcccattcctttccctagtttcaatataataccataatttaaattctaaaataggatacaggctcctcatttttatgctttcaagtttctacaatacaatgctctaacagttatttgctttgtgaaattcagtataataaaaaactgcagctgttgttaattatcaactgaaatgccacaaccaagaaactattgccaaccatctggtgtaagcattactagtcacccatccaaattcagtagttagaatactggtcaatttaatgaattgttcgcaagaccagaagtcatttttaaaaaattggattaaatggatggacccaaggaaatttgagaaacaatcacatgaaaagttagcaaataacaatgagaaaaatattgatgccgagatattaccgaagattttgaggtctttgaaagattgtccttgacacagttctgagtgagggatgaatttggatcatctactcttgagattgatccatggccaagatctgcattattattttgaagtgtgtttgttccaaatgaactgaaaatgtcaaccaacaaatccggtttgtttgatcatcaccagggaaggaatcaagcttaaaagcctcttgcaaacattctctggcaacctcaagtccttcgagatcaacaccaggagcaggttcaactgttaaatgggcaacacgtgctcttaaaaacagaataaaaaaagacaggaacaagttcaatctgcagaaattgttgagaacaaagattatctcaaggtgcagccaaccataatgaagtaaagcaaattctctttaaaaaacggaaaacttgtttcaagacacataatttgtttcaagaagtaaagtaaatgctctagaaaaactactgacaattaggataatttaatttgtgtgagcataagtatcggactaaaacatcacttgcatttgtttcatgaaaattgccgattaagagatgtgcattttcattccaggacacttgtaacataaaagaaaatgttttccacataatcatatttgccaacaagaaatttgtttttaaaaaaatgaaaaactacgacacaaaaattctggaaaatagaatggatcatttacctaacaaaaattaaataaatatcatctttatgtcatgtatttcctatgtatttccttctattgtcgctgcaaggggacacaaagctacaattgtagcttcaagagggcacaaagctatagagagcaaccaggaattccctaccttctcgttacaattcttaatttacagactgaagctccaaactgataatttaatcatgaaattttgtaataacaataatcaacaataacatgtcaataataacacccccaatttcaaaaatttctattggcaatttggctttcatgtttagagcctccgaaggaaaaagaaagagagcgcttataaacattacgtaaccaaaatttagagcctttcacctctggttacggatattcagcattttagggtttctgaattcgaaaacttcaatcataatttgcatacaatgataattaaaccaactgtaaacctctgaacactcctaaaagcaactaatgaactacgccatgtcgctttcaaagccccaaatctatttcataaccataactacaaaacagtaactaataaaaccagagtaattaaaaccctgaaaatgccattgctgcaataattctcatccatgatcagtagttaatcatcaatcagtcttgtaacaagccacgtcaatataatttgaattaaatagacagaaaggaatatagaagtaaccagagctgagaaaatccaagaaagctcgaacaatgcgacgagaggtgggagaatcggatttcaggttagccatggaggaagaggaagacgaagacgatcaagtgcgcatgataagagggtgtaccaccgcggcgtaacgtagatttagtatttagatatgaactgtgactaaacataaaaaggagacagactattccatcgtagctcttactggagttgttctttttattaatattattattattattattagggatattggcggctaaaccacctgaactttacggtttgtaacacttaaccaccaaaattgaatttttggcggctaaactacctaaactccacttccgttttgctctgcacacctcc

SEQ ID NO: 380440 - DNA, 1787 bp, Cannabis indica
tttcattttttttttcttttccagttaaattttctgttcacagagaacaggcagagagagattgttgatctacagtgtgaaggagtgcagtcggaaagccttgatgccttaatatcagttgcctatcaatgtgtttcttcaaatccagaagatcgtcccacaatgcacagggttgtccagcatcttgagtctgaagtcatgactccttgcccaagtgatttttatgattcaagttccgagtaagagctagcccagcctagcctgtcgtcaagtcgaatcgaatcagggatgttaaatactgaatcataattgaagctcctacttcaaatgagtagggcaagggcaaacattagaagagaggctctggatttgcaaaatgttcacatctccgttcaattcgttcattctttccgccgatttatgacattagaaggatgcccctcctgcattatctgtgccccttcaaccatttgcatttaataaagtatgttagtggttgcctttccttgtttttgttctcgttttgctagtgtccattcaacttatgttccccacgcgaatgaaaattccacatgattgagtcatgtattttttcttcttttccctccctttttggctccttagatttattaatttgtaatgccctgtagccttctcctaaattaagtgtatatgacatttgtacaaatcaaatgtggttcattttcacagattcttgttttatgccatttttgtaaaatatgttttgattacaattataagctatttgcccaaattagcaatgtgatgtgaacgtgaacgtgttattatcttcgtgttttgcttgcttatattgctttgccttttaatttaatgtcaggtctcgatttattgctcaaattctcgttggtattattattggtaagagtaattagtatttttgcttcttaaaacttgtgatactacaaataatgtcccaatctaatacaattatagaaatgtgttacttttttttactatatttagcagtttgatcggtgatgtaacattttagtcgaggatgaaaaaaagtaattttttttttttgagaaatttcactgtcattataactggtaatcgtttacaataacagagaaaataggatttgggatttcacccatccaacagacatctccatccaactcaagagcatactttgctaaaccatgcgcagcttggttagtatttctcttaacatgagaaatagttactcccgagaaaaaggataaaagacagctaatatcaacaattaaatcattaaaactagaaaggttcgaagaggtagaattgagggccgaagaaacacgtagagcatcagtttcaatatgtgttattgataatcgcatctgcaagacccaatttagactatgaaacaacgatttggcctccatttcatcagaacgaaaacatccttgaacattctttgacatagcagccaccacattgccatgatggtctctaatgatcgcacctatccctaaaatctttaactcttgattggctgctgcatctacgtttaatttcagaccagatagaggtggaggtgtccatggtatggcccttgtagtatcacaagtcgactgaacatttggagcagcagaatagtgactgctacaggttgtagtttgctggtttaagttctatggtggatgcaacaaggaattaataagttagtgaatttacttggtaaattctagagcagcttattggaagctcacatatataggcccatggtcctcatactagttgagacaatactacttgtaaga

SEQ ID NO: 380441 - DNA, 4599 bp, Cannabis indica
aaagattatttcaaagagttttgcaactacctcggtattacacccttttaacttgctacaaattcttacaagattctcgcctgtttgaaacccctttatcacattttgatgtgggagtgttgaacacccctttatattttatagatctactttgtgaaggtctgtcctatggtgtaggaggcttttattaccttgggacccatattaatgattgcaggatcattgtgaggctgtccaacaaaaaaaaattcaaagatgacttcttttggaccactagaatatacacaatcaacactaccagattcaaaattttaaggaagtactagtttctctcaaaatatttgttttgagttattaattttgacacttaattgactctgttttttgttatatgtttagcaatcactaagagacccatcccagctccagaaatcaaagagaggcatgagatcttggtaaacttttcctatagtttacgagctgctaacttcttaatgcatgacattaacttgaaggcatgagcccttctaggcaagggccaaagtataaatgactttaaatctcccatgtttttaacatggcaataggttccaatgcctgaggatgaagaggatcgtgactacatcgctctcatccattattttaaaaatgtaaccactcaggaggccacccaaactgatgatggggctccctgaggtaataattcctgcgtttatcgattgtctcctaccgtccgtatggctgatagaacaactttagttcaatttaaagataaccaatataatttcttcatctagaactgcattgacttaattgccaataattgtgatagttggtatcctagacatcatgtccaattaagttataatagctcgtactacgtgatcactaaaaattatggaactaacttcaatagggctgctagtttagattgggatctatctcaacttaacccctttgacctattcatgatcactagctctagggagtttagtagttattatagcagttcttcctcgtttgaaacttatggtaatgatctgagtgggagttttagcctcgccacctttgtattcttattttacatcgactttaatttcttattttctgtctcgcaaatacgtacagtttaaaagatctcttctgcattccatcttgccctgttaagagaggtaagaagaggtctgctcttgtcgaagtcacttcagagtcaaacccaaaagttttgaagaaaaccaaaaaggcagcaaataagaagtatactttgattggaataaccatcaacccaggaacaaccatttcagtaacttctaatgtgtcagcatgtttgagcactagtggacaactataagggtatgtccatcaggttaaattctctgggtctcaactcgagatggccctctttgagccttccttcccctacctacatatttaggtgtcgagggttctcaagcatgcttgttatatgctacacaaagttggcatcagtttaagactttccaacatgagaaataggatccaatcaacaaaggtgattattaaagccttatgacaaggatcgttgaccacatgcaagcggttagttccaacttcctccataatattttttttcttttttatttacattctaatatcttcctctgacctcgttctatgcagacatccttcttatccttatggctcaacaaagaggtatacaaagtatcaaccaacttagcacagatcttcgcaagtctagcgaccaactcgagctttcgactaagcaatagaatgatgccaaattagagatctctcggtagaaaacaaatgttgaaaacttggagaaatctaagaaggcattgaaagttgaaaataaagccttaaaaacaaagaatgagaggttgacgaagctaatcgactggcctaggagaaccttacagaagccaacaagaaggttgaagaggccaagttatacaccaaatagaaagtcaatttaatggccaatcgttctatctacaaggattggataacaaatcccaagatggttttgagctttttaggtactgtagccgatgagatgtgggcttattaggatgaagttggcaacgctgaggaaggcgtggtcaaagaaaaagaagaagaggatccctcttagtctccaacgatgtagacttagttattattatttataacttctaaacaatggccatttgacagagacaatgttttaccccttgtggcatttattatgtaatttaatttttttatttgctttgtttgatggccagtattgctttaattacatttcatgatgccattttaccctgctttgtttgagttacgaatattttgaattgcatttttgctcacaagtaaataaaacacttttctcaacttgagttagggcgtattacgaacataaatgtccttacataattaaatgtttttaaacactttttgatcgcctatgtatgggcagtttgcattctgctactttatttatgcgtgagcagttagtattctgccatataagttatctgcgagcagttatttttctgtcacaacactttttaagagcaaacattaaatattttgaacagtattaaaaactgctctaaatattccttgattgtttgtatgaacagttaatcctctattcacactttagcttgcgtactgtttatcaaggcacactagggtatctcgtttataatacatgataaaatatgcgagctttaatttattcagatcacacttagctttatgttgtttacaagacttaggagtcttctgacaactactactttcatatttgctttaagaaaggctccaaagtatttgactttatgctattttggaccatcttataatcaaacactttctttttgcaaatttttaattattttctaggcattaaaatttagtaagcctagttttattaacatatacctctcggtaaaactcagttattgtgtatttatataccctgaagtaattttaaagagacaaagactttatgattacttgataaaaccaagttattgtatatgaaaataaagattttttttacaaaaataaacttaatacaacagaatacactactggtaatatggccttagatgttcgttgttccaatagttttttattagcgagccattgagccatgcttacttataaactcatgttccaacaatagcttcaatgatatatgagccttcccagttccagttaaatactcttgctgctagatctcgcgtattggaaaacacacatcttaacaccaaatcaccaaccttgaatagtcttttttgaactcttttattacaatatcttgtgatgcaatgttgataagtaacatttctaatttgcaactaattgtgcttttcttcgagtggatccaagggcatattgagaagttcttgattttatgcttgatcatagaattcacacatgtgagtcgcaatgttcacttccactaggaacattgcctctgagccaaatgccaataataatggagtacatcccgtcaatgttatttctattgttctatgggcctagagaacctgtggtagctcgttaacccatcttcatttagatatgtctaacttattttttatagtgtcctttaagcttttattaatagcctcaacttgtccattggcctgtggtcttgacactgatgagaagcttttaatgattttattccttccacaaaactcagtgaataaatctccatcaaactgagtaccgttattggacactattttaatgggaatgccaaacctaaaagtaatgttcttaattgcaaaatcaaggactattttggcatatgatggacactaaaggttcaaattctgtccactttgtaaggaagtcgattgcaactactgcatattttgcaccgcctctccctatctataaggatctaatcagattaattgcccatatcataaatgggtatggcgaggtcatcattcttagttcggtagggggtatccttagtatatacgagaatcgttggcacttgtcacactttttaacaaattcacgtgtgtccttgttgatggttggccaataatatccctgacatagtactttcttagataaactttgccatcctgcatggtatccgcagaagcgttcatgaatttctctgataatttcattagcctttgtagggagcagacatcgtagtagatgcatacaatgtcctcttctttacgattttgcatcaactattgtgtacctcgggaatatgtataggagtatttgtgcctcagttttgttcgcttgaagttctccatctaccaagtattttacaatacgggttatccatgtagggctcgcatctatcatctctatctcttgcatttcatttttgcatatacttgggtcgctcaacacctccactgaaactaagtttaatttatccatatcaaagtgtgatgccaattagggaaggtgtaaagcccgcttagttaatttggaaattatcagttgtttatgattaatcatgaaattatttatagctatttaaataatttattgtactgttattatgttattcagtagcttgcatattctgcatttccggtgtccggtattttggaactcggcgtt

SEQ ID NO: 380442 - DNA, 2043 bp, Cannabis indica
aagaacaaggcatcattaccatttctttgatgaatgaacttaattgcattatacactatgtttcaagaattagacaagaaattagaaaaagataaatacaagtattgcattatgctcgtagtgttctatagaataattaaaaattttttttaaaaaaaaaaaaaaaaaaaaacttaaaaagttaccttgcttatcatctgtgtttccaccattaattatcaatgttgattcatttcacattttcattgactacccaatacttggaacctaattatgcatatgaaacaagttcaaatcttctctaaggctcagatctaagccaaacttaattatcatcgaaacgtcattaaaaagagtaaaaaaaacataaaatgtttctaaaccagcagaagtctcacatttcacaggtaaaaattgtgtaactgtcctcttcccttcactgaacttttttaaccgaagtaacgactcaaaagcattttcctccttttttttttctagcaatccaaacagatggctacccaaacaagaaaataaaatgcagtagtagccaacaaccacatcaaaatattagaattcgtaccttatcaaccgatacagatccgaaacgtatcaacttccccaaaatgatttgatttcttgataaagaaatcaagcaaaattaaaaatccacttgaaaccaacgtagattataagcaaagaaaagaattgtcgctcttccaagaaagaaacacaaagaaacacttcgtctgaggcaaaggtcagagagtggttgtgagtagtggactcgtcgtcgtcgtcgtcgtctcctggattttccctctagcgcgcgaaaattttctctcactttctgaggacccggaaaatatgctaccaaagaaaaaaactagtttttccttctgacactgacagtcaagagagagaaagagttaaagtgagtgttattagtggcattttgattgatttgatcggacggtccagatgtaaagatgaagaagaagaagcatgaggctattgagtagaagggaggtggtaatgtgggccccagtgggcctggattctttcatcgtcacgaatcccgggggacaaaaattggggcccacaggccgcttgatgttacgtcagcgagatgttatgattgggcctggcgtgggaattgggcccctgaggatgggactttaggtttctagagatgtttaatttaagaccaagttctttttccttttttccttttcttcgttgttcagtttatattttattttaaaaaatatttatctatttgttttggattttatttttttttcttttgttttggattaaagctgtataatgttggacttcacttgatatttcttctttttataatctctcagatatttcgtcgataaatgtgtgtaaatagtatagcagcctcattagaaatggcacccctgtggtccaattgtatattgccacgtgtcgtgctaaattatccaagattgttttaaaacgtttgtttttagccaaaatttgataagagtctaagacacatatcctcacaaatctttttaacttacaaaaatcaatatattaatagcccatctttattctttagtagctagaaatataagaagtcaaagtaaccatggtaaaagtccttcggtagggttcagtttagccttttttctaatgacttttctgttttgtttgtttgttaaatgtgaatattgaatatgactataccagaatagcaattgttttgctattctttgtttattgccacatatgttaatccacaaaaaatatggcataattaaatgtttaacaaaattataacacataatcaaactacaagtcaagaaataatgaagatacattataataataataataataataataataataataataataaggctaattacgatttttactccccgatctttgacgtgtatcaaatcatgctccctgaactattgagattattgtatttaagaacttttgtctaattttaagtaaaaaaaaaagtctaacacatgatgaaagttcagggggcattattta

SEQ ID NO: 380443 - DNA, 7337 bp, Cannabis indica
gttgttcccaggtgtaaggagtatggggtggtgtgagactcatataaaatttcttgtctgatacctttgtcaactggtacataaaccctgcctttataccgtaataacatgtttgacaaaattgaaaagtcttttaccgacctaacttcaagcctttctttgtacacatgtagctcagaatcactctactgggccatcttgattctttctaatagatcagactgcaacgtgatattagcaagtttttcaaccacgaactcaatccccgctctaatcatatcctcaaccaacttcagtgaaatcctcttcaattgataaacttaccgtagaccttttcgactcagagcatccgctatcacatttgcttttccaaggtggtagagaatcttgcagtcataatctttaactagttctagccatcgccgctccctcatgtttaaatccttctgagtgaaaaagtatttgaggttcttgtggctttcaatgcaaaaacgacttctgccagctcaatgtcgtgggtaggataccgctgctcatattccttcaattgtctagacgcataggcaataacttttccaaactgcattagagcacaacctaacccctgtttggaagtgtcacaatagatcacaaacttctcatcattaactggcaaggttaacaatggtgcggtaatcaacatctgtttcaattcctagaagttatcctcgcacttgtcagtccaaataaacgtacagttcttttgagtcaattctgttaagagcgtggaaatcttagcaaacccttcaacaaatcttctgtagtatcatgctaatcctatgaagcttctaacctcaattgtagacttgggtcgaggccaatcccaaaaatattttatttcaaaagtggtatctactatatccacataattcgataaaatcttcgtaatttataaattacactttatttaattatttattagatttacactaattatcacataattagcttaagtaagattataatcttacttcaatatcaatatctccacggaccaatttcaatttataatacccataactatagtaatctttaggctaattagtatttttacccctgaactttgacatgtaccaaatcatgccccttaaacttttaaggtcgttaaaaatattctccatgaactattgagattgttggatttaaagacttttgtctaattttagaaaaaacgtctaacatgaatgaaagttcagggaacatgctatagtacatgtaaaagttcgagtgacatgatttgtatataacaaagtctgaggagcatgatttagtacataaacaatcactaaaatagtaaaattaaacgaaattagacaaaagtctttaaatataacaatctcaataattcaagaaaaaattttaaattcaggaggtatgatttggtacatgttaaagttaatgagtcaaaaatcctaattaacctaatctttaattatttggcaaaattaaaaagtaaaaatgatctttagttgaggtacgatggaaaaggagctaagctacccaccaccagctgatgagcttatatttgaatcaatcaacccacaatatacataatacatattaatataatcatcgatattcaagcttataatcacccataaagcttcaaatacaagcaattgtatattttaccagaatgatctggatatccataattataaatcttttttctttgaaagagaaaagaagagaaaaaggtataaaaatcagaaaaagaagtagttgatttgtagaggaagaatgtaacgtaatcatcatttgcaattccaaaatccaaatccctttgcgtgacggtacgttttgatatattgggactactccaattcttacttattattactttgtcatcattacgaagcaatgtattattatacatattgtatttttatgtatatatattattttttaacaaaatacatttttatatatttaatttgatttaaaaaggttggtatatgcttaaggcatcagcaattacggcatcatagattccaataatgtctctactttttttatataccataaaataattaccaattacttctaatttgttatttatgtcagtgaaaaaggtaaataaaagttttatgcttcgtgtcttaagagtgcattttgcttttgtttataataatttgcattatcattataacattaagtatttccgagtaaaaaacctttcatatttttttccaataaaatgactaaaacagtcttactttatgtgattaattagctataagagaagagtctaccatattattgtaaaaaaaaaaatagacttataacaatgatatgaaataaattaataaacaaaaacaaaaatgccacttttcaatacgttatatctatccataaataatgaccaaaaactatcggataattcagataaaatttatgtgcttcctacacaaaatttgacctattaatccacgtgtcacattctacgtactagtcaatccacgtggcaaaatcaatagcatgttaatgaaaaaaaaaattatcacataataaaaagagaccacaaaatgagccgtgtctgaataatgaagttccggtcaaaaaaattacaatttacaaaataaaataaaaatattattaataataataagaaagtgtttaacggctaaaagcccgcaaagttatgtgtctttttttttattaatattataataaaataaaaaaaataaaatttgtgtaagcaatacgccgggaaacattgaaaagggcgtcatttgctgaagcggtttagtgtagagtagctctgagcttacctctaatggcggtgaggtaaaatacccatattcctgctccaaaagtcctttcatttcagtatatttctctatcgttatcgttcccacgctttggcgccacattattcctctactttcatctctgttcatcagctttaacctctgttctctgctctcattcaggtaagcattagagtccccctttctctctctctctctctctctagaatgtatgaaagcttcttactttcacatttttgttttctgcactcctccttttatgtatgattccttttattttaaaaagagaaagggtggaaagggggagagaaagtggtacagacagcatcagtagcagctgtgtgtcaagtgggaattaccgacggttttggaagtgggtgtctttttaatttttctctcatggccgttttcttagttttgttgtcttaattagttttcttgttcttgtttataacttgttaagttattgatgttaatggctttgaattaattgttgtttttgaactttggttgtacgagtggatgatgatgatgatgtttgttgcttgtatttggtgtagtatggggttgctattttatttatttattaatttttaagattggctacattttcttcctaagatgtaattgtgtttttattgagatctgttatagagttttggggttatggttcagtctgattgaatttcagatgtttattccattaatgggatggacattgcagacccattaattgattttgatgttttccatgacatttgttttgtttggatctctatgtattgtcttggaataggtcgctttttgttggtgaaaatattggggggaaaggatggttttttattgggaaagtgcatgtcttgttatgatcaccattgcagtggtctctgcttgatcttaagactctgtaattactgaaattaatctctaccattatgcattatttggaatttcgatgaggacaatgataccaagtttgatggtatctttaacagcaaaaaaaataacagtttggtggtataatttttgctctctttcttcttcttcttctttttttggtgctgttgtttaagctgctgattggaatctttgcttggatgtttaaaactttgtatgtttatatagatccaaagaaataaagagaattagagattattgtattatctgctgagtagtagtgatcactaattatagttggtctatactctacaagccaatttcaaagctacatctattattatgagatgcaatttttctcctcttgcttatcttgaccataatacacatgttatgttactctgccttatctttgacttgaatatatcttattcccatgatgcttacagcatcaaatagctttcaagcgattttcattttgtattttatccctatagaatgaaataagggacatatgcatgattactttgataattcatttatgcattagcctctgtttttggataggtaacttgctaaatatgacggagaaggaggacacttgctctcccactggtgttttagaggattatttcagaagctcagactctgaaacatgctcttccaaagaggccaataatgggtccgaatctcacaaaaatccaaagctacgttctcgatggcatggtttcatgcaattgctaagaacaagatccaagaagcctttgaatacaatgcaccctcttaatgttttgaacctctctaggagaatgagtgggagtatgagggagattatatcgaaatttgggtcggactctgattatggtttgaagtctccatggaaaaacttttctttgtatgagcttcaggtcgcaacaaactatttcagacaaggtttttactttgtatttggacttcaataccaattagcttataagttgtttgtagaaatgtctaactgaattttgtttttcggggtcctgttctttgttttcggtgcagaaaacttgattggaaaaggtggttatgctgaagtttacaaggggtgtttgagaaatgggcaattagtggcaattaagaagctaacaaggggaaaaccagaggacactactgcaaactttttatcagagatagggattatggcccatgtaaatcatcctaatactgctaagctaattggctatggagttgaagggggcatgcacttggttcttgaattgtcgccacatgggagcttggcttccatgctttatggttagctaaattacaattctcttaatctttcattgctttaattaaatgttatgtatccattggtggtccatttcagctcatttttcaccactttaaaataaatagtctattattgttcacaggctcaaaggagaagttgaaatggggcattaggtataaaattgcggtcggaacggctaggggtttgctttatcttcatcagagctgtcaaaggagaattatccacagggatatcaaggctacaaatattctgctaagtgaggactttgaggctcaggtacctaactttttgttaatgaacttaatgagtaaaatcttaatgatactgcgttctttctaatgtagccactgatttctactgtttgcaaattaagtagttaccactccttgtacagatttgtgatttcggtcttgcaaagtggttgccagagcagtggactcatcacacagtgtcaaaatttgaaggcaccttcgggttagtaaaccttatacttcagtaactcatttcccatcttccatgaaagattttgtctagtcttaacagttctacatttcgcaaactcagctatcttgctccagagtacttactccatggcatagtagatgagaaaactgatgtatttgcctacggggtgctactattggaattagtcactggacgccgagcgctagattattccaaccaaagccttgttctttgggtatgttgtattgtgttgtagttccttcttacttagccaaaggatgatattggttccataactttacatgcaatgacaagataaaaggatgctttttttttgacttttccaattggtccatgtctttttaggcaaaacccttgctgaagaaaagtgagtcaagagagctgattgatccctctttggccgatgactacaactccagacaggtgaatctcgtgctcttggctgctactttatgcatacagccgtcgtcaattcgtcggcccactatgagtcaggtataatatttttctacaaagtcaacctcaacctatagtatctttaaaaattaatgaaaaaccaatctgacagggtaggaatagaatacgtgttttaacttattaatgttggttatcaatttcttgtacaaggtgataacctgtgcgtgatatcataaccactggattaaattcataattaaaaatcagaagctgaacatgactttaattgactctttctgtattttatgaaattgatttgcattgaaaatggggtgcaggttctagagcttttacacggcgactttagttgcttgaagaacgtgaagaaaactcgaatttcatttttccgaaaggcatctcgtgaagaactcaccaatacagaaggccaaaaaacaaaaccaggaataggttgatctttgattaaccaattcctgagacaaagatggtcagtaagaaaaaacatattgatgatggtgtacataatgaaaaagcaagaacacgagaatgaaaaagcaacttcagtttgtgtacatagaaagataaagaaagttataggaatttttacaaccaaatacagtgatgcaattacaaagtctcaaccctatatcctatataaagagcttctggctcctcttctagaagactaaaagttcatgaggaaccaatttttgtttaaacaaaactagtactacaatgataatatatttgtgaattttgcattactttccctttttgttttcatcttttcttttttttttatctatgaagttgaataatttaatataaggtgcttctatgtatagacatatttcttctctgtccgaagaatttagacaacacagaatttatatgagtattcaaaattatttgaacactcaaaaataaggaggcaagtactcaaataatataacatgaaatatataacataaaatatatgtatatgtatgtacactccatttgtatagagatctctttacatatatactcactcgatctttttaaatttcttttcaacacctacatcatttttaacaaaattatcctcattagtaaattaaaaataatatttacctttattattatttttttttgaatggaatataataattttattaaataatcatctcagttatcaaacaatgtaataaattagtaggaacatactccaaattgaagctacaatcagggtactgttagactataatataatatgaataataaaatatatataaacgatatatgatgcgaaataaactctaaacatatcgaaaacgtatgtgcaatgaaaggatcgaaatacttccagctattgatgtttgagcttcaatccctacgatagcttcagtattggagttcgggcttcctcgctctct

SEQ ID NO: 380444 - DNA, 5092 bp, Cannabis indica
ctgactttgtgtccgtacaagctacttattaactattaatattttttcttctaatgatttgtaattgtccattgcagtggaactactattatattctccaaaacgaccagttgttgactactctgtgatatttctgtggatgatggctgttggaacacttgtatgtgcttcactttggtcagagtttactgcccctgaacacacagatgagcgttataatgagttatcgcctaaggttagtgtatacagtttatagatattaaccattgtgcattgcctattgtgcatgtgtgcatgtgtgtgtaatacggcttttacatttatctgtgctagcttctatatcctaaatgaatacatatttttttttttcattgttacatactgatctgctacatatgtcctcaatttctagtttttttcaggcactgtgcaatctgtaataatttctcttgtcacccttataatcttttattctttttaccaactcagtgcttgcactttctttccccataaaatgcttgacttgattcagtctcatattatttgctcctaattatattcctatactagtctcttaatcatggtatcaatttcgttcatttaaataaatagttatgccctttatcgtttgtctactgtggtttgggtgttccttaattttttaatgtgctatgcttaaatttacttcagttacaaaattttctttctttgtctaggaatctggagtaaccaaagatgattctgagaaggaagttcttgatattagtgctaagggtgctgtagtttttgtaatagtagcttctacttttctggttctgctatatttttttatgtcatcttggttcatctgggtgctgatcgtacttttctgcattggtggtattgaggtaaaacaatttatctgctgtttaatttcttgctgatattaactaactataatcttcccttttgccaaagaagaagaagaagaagaaaactaatgataattttcttgaacaaagaatttaatgactcctctatgacatgcttatttgcgaaattgagtatttgacttttttttttctgtatttgaagtgtatgcaaagtttgacattcagatactaatgccttgtaatttttcttcataaaaatttaccccttactcaaagaagaatcatgtcaagctctggtctacaaatcattacagtgaattagacagttcatgttttttctgttgtcggttgcccttgcttattctaaattttatgttgacaaccgtggtgtttagttgtgtataccctcctgatatatgttactctaatttccagggaatgcataattgcattgtgagtctgatttcaaggtacacttgctatatgttctttgtttgcaacaatcttttcagtgttggagccttaactcatattatatattttttttcataattattctgaaacagcaaatgtagaaactgtggcaagaaatcagtggatttacctttctttggagaggtgtctatcctctcgcttgttgtattgtttctctgtgcagcatttgcaattttctgggctgctaatcgaagagcttcttactcatgggttggccaagatgttcttgtaagttctgtgtactaatatgattccactacccccaattatttaattatctttatttttttccagagggagttcggacatgtggtttgttcccacaaggtctaaggctctcctggaaacctacatagcgtttgctataatttctgttctcccaatattataggattaggcgaggagcatggtttcaaaaaattaatgacttctgggttgtgttttagatgatagattataatctcttatttatacaacctatatttcttgttataaaatgtattttatttagatacttattcgtgtttgtttcctctggcagggaatttgcttgatgataacagtcttgcaaattgctcgcttaccgaatatcaaggtatttgtttttgcttttttgtgtaattaactactaccccttgtcttctaccctttcttttctccttatattcactacacatctcaggttgctactgtactactttgctgtgcatttgtctacgacatcttttgggttttcgtatcaccagtaatattccacgagagtgttatgattgcggtatgtttttaagatcaatttgtttgtatattttcttaagtctttttattcatctttactttgttgcaaaactgaaatggtggacagtattgaaggaaaaaggaaagaggaattgggtttaatggtttgcaattgtcatctcttgactgctttttgttggcgagaagtctaacaaagactgaatgctgagtaaatcattttgggacaatctcaatagtcttatatataactagtttatgtttagaagttagaaccatagaatcaaatggactaaattgttgttgattactgcatacgttatttggtttgcaatagtttccatgttgactggactacttcgatgtaggattttgagatgtgcatatgcaaattttagtttatttaggttcatgtatgctcatttatctggcccacatcagaatatctcctactaattatgccatagtttgtgtttaacatgtcagataataatatcatctgcatttttatgcttgtaggttgcccgtggtgataatagtggtggagaagccattcccatgcttttgagaattccccgaatttttgacccttggggtggttatgatatgattggttttggggacattctctttcctggcttgcttgtttcatttgcttttcggtagtgaatttatctctattaactcttttttttttctattgatatattgtagcttagtggttaactaagtcaaatgtctctcccaaaagtctgtattatattacagtagaaaatccaatgaacaacaccccaaatgaataaatcctgggacatgttttctggttttactatttattgactaattctttctgcgtactgcatgaggggtctgcttttttacactttgaatttggttttctgtccagatatgacaaagcaaataagaaaggtgtagcaagtggatattttctttggttggtgattggctatggagtcggtgagtttcctcgcaacaaacatttgttttcttttctatttgtatgatatagatgaatatattcactttctcatgcttggttgaatattttttgagttactcagcagaatttatttcagattaactgtgcatgttatcattagacatgtaaaatgaaactacaaagaatagttatgtccatgtacctatttatgcctttgtctttgtactaatggagggttactgcttttttaggcctcttttttacgtatcttgggttgtatctaatggatggacatggtcaacctgctcttctctacctcgtaccatgtactctaggtatcgatttagccaattttctcttaattattagcccttttatcctggtatgcatctcttatttttttccctttggttggaaattgatgtttcttgttttgttttcaggtgttatcgttattttgggactcattagaggtgaactgaaacacctttggagctatgggactgaggcaccatctagcctttcctcagcggaaccataaagcattattagattagtgacctatcctaacatgtaaatcgctgtaaattgggttgattgccactaattgttgtttattgtaaagaatttgacctttttgtttttactgcttaatatggatctctcatctctttttaacatgttataaatccatggtggcaaaacaagagcattgcaggattataccattcaagaaaaccttaccgaaatctggtgtaattggaactcgtggtgccatcagctcttcctatttaattttgttgttgtattagtaaagatcatactgagttaataatatcatactgagttgtgttttgataactctggattataagtttaagttcattcatagtagtttgcttattgaagaaacataagaaagacaatacttcctgaaataatggcatggaaatgctcctgtgtgtgattctatttcgcaaggaaaagaaataatgtaatttatatattgtatgctatgcatgtaaattggaaagattgggaggctccgtaacacctagctatatctttttttttgttttggtttattactattttacatctttaatttacaaaagcttggctttctattttgtaaaatggtattttctaaaataatacaaaacaatgctcttagctcaattttttattttttatttttatataactaattagacaatttatagtaggaataaatgcagaaaatgtacttattttgtcataacaactctagattgaattattattaatttttattttgatacaaaattaaattcgagtactattttgtatcattaaaaaaatggttcaataatttttacaaaacgcgaggtttaaaataaatgttgagaaatatcgcaattgctattgcaataagtcgtaaatcacatcgacaactacattgccaaaaatcgcaaacatgtcgataaatgtccttcaacacttcaccaacatatatttctaaaattatcgacacacattgcaaacaatgtcgatagacattgtgaaaatcgtaggtagaaagcataaattggtcattatcgtgaacttagtccctgcatgtcgctacgagtcgtaaaaagtcatctttaaccttcaacctacactaatatcactagatattgtgaaaggcattactaaatatcactaaaatacaaaaaataaactagaaaatacagaaaggtagctcaagtttcaggaacaagacaactaaaataaaagaatgatatgtgtagatatactcaaatcagcctaaatacaattaaatccaacaataattactaataaattacatacccattatttttttcaagatttatgttggtaagaagtttgggttgctcctacacacttggttgtcaattgagatactccagcaaagggtgctacgacaaatggtgctccggcaaggcaagggtatgtgtgtgtgactttgtagagagagagagagagagagaggagagagagagagaga

SEQ ID NO: 380445 - DNA, 1849 bp, Cannabis indica
taaatgtgttcttagtcacaataactaaatcagtgatatgacaacttgtatctaaatactatgttttagtcataagtatcaacttgagtatctttatgggctttggaaatatttctaacatcccctctcaaactttgtggggtggaaacaacaccaaatttgttgatgagaaatctaaattgactttgtgaaagacttttagatattcagactgcaatttgctcacttgatgaaatgtacctaatttatatcttctaagctaggaccttgtcttttataaaatgcacatgcaattctatgttgctttgttctcgcaagatacaagaggttcgatgttagagcactagcacccatattatcacaagtgaccggagtacgtagatcacaaaggaaattccaattattgtagtactccttggacccatgatatttcaatagacaccgcgctaatgctttatgttcttactcagtgccttgatcatgacacaatcgattggttttcagatgacaacaacaagagtgtccccaagatacacacaaactcctactatggatcatatatatcatttggataacacacccatctacatcaaaaaaaccttgtagaaaaagcctgtcacagtatcgaatatgcaatccatgatgtggtgtacctttaaggtaccttagaatgtaacactccaatgtgcacttgttagagcttttaggaactgactaagcttattaactacaaagcttatgtcaggtcgtgtatgagttaggtacagcaagaccccaattatgcttctatactcagttggacatttcagaggctcaccatcagaaattaatagcattttcaatgattccattggtgtgggacatgttttagattcaacatattcattttttcccaaaagatcttcaatatattttggctagctgaggtacattcttatctcatcacgatgaccttcaattccaaggaaacagtgaagaggcccgagatctttcaaggcaaaaatgtgaatgaattttataatgaattgctgcattttctttgtgtcattctctgctattataatgtctattcatagatgagcacaagcatgatatcatgacaatcagatttatagtaaaataaggaagaatatgctctgaagtttttgaaattctagccaagtagtgttgccttatgttatgcccatatttcaatccataaatatagacatgcaccttgatgttggtctcaaaaattaagaggactcataaatgcaaacaattatcttaggtcgggacaggctacaattaacaagaaatatccatcttgcgctgtgttacaacatcacaaacagttaacaatggtgaaaatacacagcaaggtgaaaacgttctgagattatctcagatttgaccaggataatcaagaagcacacggaacccaaaatgatgtcactggaacgggtagataacgagttctctaagagcttgataagcccattgatctacgtacttgtgagtatgttaaaggactaagggctgtaatgaagataggatctatctcgccactttccattaataatgcgtaaagaccaatttagaagaaccagctctagactgtttcttagtgttatggtgggaagaagcatcaagttatctcgcaatttacatcttgctatatcttctattataaaaggatgcaaaaaaaaaaaactctaattgtgttgtgataatttgcacacgcaagtgcacatatcgtgacaagtagtaaactcaccaagagtgaggtcgatcccacaaggattgaagttaagtacgttaaaattaaacttctacttctatttggttgaataaaaattaagaaaggatt

SEQ ID NO: 380446 - DNA, 1092 bp, Cannabis indica
acttttaattataaattttgttgcaactaaaaataaaatttattgtattgaaaacaaaaataatatgagcatcaaccagatcttaccaaagccatgtcataaggcctagaaacgactaacgagcactcatccgacaataataatatattatcttttatggtatttagcacttatggtgcctcttagcattatttctcaaatatatatatcgtcataaactatccacaatcgtgtctacaccgagcaaattcgccacaagttccgaaagatggaccttttcacatgttaaaatttcattaacaaaatattagtttaaattaattattagtttagtcagttttaaatgtaaagacttatacatttatacaatatgccttgatggcattatatatattataatatattaacatgctttcaaaaaatatatatatatatatatatataaatatatatttaaggatgcagcagtatgattgtatgaaagaagaagtaacatagaagtgcatatatttgtaatggggtcttgcgttctaatatatttttctttttatttaataatcaaactagcaactcacaattaaataacacataacttgttcgtaaatactcatgtgtagtatttgagttctcgaatacttaaaagtattaatatacttgttaataaataatattgttgaaataaaggaaaataaaactgtacagatacgacttatacgtttgactaagtaaccacacaaggacgaattcaacgtatatttatatatgtacacaaccacatgggtcaaaggaagttcaagaaaatgatagtaaactaattttaatgtttcttttgtaatctgcattttttttgttttcttctactctacctacttatcctccttttaattatttttttaaaagggaatttctttgtcaaacataaatgctaagttattttaacttgagaatctgcccttcaagatctattctctaaggtactctttcaattaaacctatatagaatacgttgtaaaaaataaataaatgttaaaataatatagaatagatgagaaaaaagaagaagaagatgaagagagaaagagaaagtgaatg

SEQ ID NO: 380447 - DNA, 2964 bp, Cannabis indica
taggaggtggtcaccgtgagaagtcacaatgaggtcaaatatggagttgagttgagaattaacagagatgaggtggtatgagagcttaagtgagatagatagtgagaaggagggatagagtgagagaacatgagaggggggctgattgatgagggatagtatttaaagttagggttttattttattatgggtgaacccatttttcaattaacgttttttttttttttgtaaatataactttgttaacatcatttaataaccaatactaatgcgtcgttagtgcataatcggcattccattttaatagcgtcggttcttgaaaaaaaatatatgttttaatcgacaagaatgcctatttttctagtagtgtattaaaaaagtaaatttaactgttagagctctttgttttttgtgtttctggatagatgacacgtgtacttccaaggcctaaaattaatcgagacaagcccattctcatatctatttaagtaaatgaatcagcccaacatcggatcacatctccaaattcagacacgagtccaacttacaaaaacaataaagacagaccatattggtctggaaatggcgatttacctagaagacgaaaggtccatcaaagtgtatctagatgccctcatggggtaatctgaaaaggggaagtgaagacacctagaaatcatccaacatggcatcctttctctgacacatgatcccagtaaattaggggtttgtcccttatgtcagacctggggaatgtgcaccaccaaaagaaacacatcttttgtccaatgccatattctttgatatttactatgcacaatcggcaacatatattacacctatcaccatcaagtggtccccacatgtgtggacgactgatacctcataatccagactttaaataacctacccaaagtcaatattaattatattttaccccatcagtaggcctaatggacacatttaaaccctagcacgtctgggtttacccacaaacccaactctaacctataaataaaacattactcttttatgcaaaggtttttgaactcattgcacaagttcaaagcttagcgttttgtaactttggcaagatcattattgtgtaagaatacttcatagcttttcaagccaaataagattgactcgtgaactaaggcttattaacgctaaaaccatgtaaaaatccttattccattgtccttaattcattcttctttaagcttaattttttttattaatcaatttctaaaaatcttggatattttgataattttataaagagcttgatgaaagatttaccatatttgtcatcttcaacaatggttgcaatccgtaatacgtctattaggccagttgcttaggatggtaatggcaatgctgccattgacaatacgaaccaactccctccaacaaatgctcaagcaggtgttgtgggggaatagggatcacacatcataattggtcagcccacctcattagggctaacaccaagaagatcacatcgatgatgatctcattgacgaagatgatcgtgaaggtcaatgcaaggatgccgcaggctacaacaaaaatgacaacaaggaatattaagaacattatgagcaagaccttaaagtaagaagaggtttcacgtcaaatgccagaagcttttgcataactacaagaaaaagctaacttccttgaagaaaaccctcctgccagaaagtttaaaagccctgggctagaccatctcactactacaaaaattattattcttgttagtcctcaaaatgattttttttagggggaccatcgctaataaaattaagtgagtgtttaaaatcctcagttatagtagactattcccaacggttttaaacaatcgtgtaattttccttgcagattagaagagttacaagccaaaaaaagatataggattttaaaggtcatctcgacggtttaaaactgtcgagaatactatagttgacaattttaaaccattggggattccttcacttttaataaaaccccaattcatatctgaattcaaatcattttgtctccctcaaacatagccttaaagctaagcggcccactcccttcccaatcgcacctcttctcttgaaactgaaaacaaaaactcgaatcccctctatctttttcttcgtctcttctgcgtctctcactctctctctgtgtcaagttttgcatactttctaccatggtcgtatatgagattctcactcctttaaaacctaggtacgagtattctccttaaaatggtttcagtctgtttcctcttgcttctttttctcatgagatcaaaaatcttatcttcttcttcttttgtaaagatcatcgatctcattctcttctcttcttgtttttatttttttaatgacacatttgtttgtatcatggagtttgtaagtggttgcggttgtgtcggttcatagatgcgatggacatttagagaagcagtcggagctcatcgcaggtagatttgtttttctattttggttttgatttttattttggtactattcatatttatctttatttttcatttaggtacgtgctttggatttgtttttgtacatatagggcccgtttggtacgcaggattggattggattagacaggctaatttgtccaatccagtgtttgggcatgttagaagtctggataactaatccagttaacctcatctgtctgggattatttatcccatccagcagggtgggataaataatcccatgcaggtgagatttttttttatcgtttttttaatttaaattttattaatatattttaaatttaataagaatttaaaggaaataattatcacacatttatttatacatttttttttatcaaaaacttattcattaaaattagtgaaaatgtataattttgaattattatacataagtttttaaaatttagaatattattaattaaataatagttacttaaattgat

SEQ ID NO: 380448 - DNA, 2115 bp, Cannabis indica
gtcggtatcaatcatgaagattcaatcataattatatttatcaattgtgcggatattatatttatgactctaattagtacttggtatatcatcattatcatcaattaagggctgcatcaatacgtagctgagctatttgtacttttttacccccttaaagaatgaacacatagtcaaatagctataaagtaacttaccataatgaagaaaggtatattaataaaaatgaagcaaaatgacttctaataaatttaccctttttttttccagttctacaaacagggtctttacattttatattagtgtacccattttccttttaacatcattttcttattcttttgaattttatatcaaatattagtaatgcccagttccatcactttgtgtcttttatgtatattatatttattaaattaaaataaatatttgtgtcttttaaccacactttgtagtaatatttatctaactactaatcatgtaaatgtaatcgtaatactagtactagtagaagtagtgtgttccccctaatctattattagagatgcaacaccctctaattgaccaaacatgttctaaacattaaattaaatataataaataaaatataattacaaatttttttcttaaaaaaaaaaaaccaattatacttatgagttaaaagaaaaaagaaaagcacaattaaaacaactttttacgcgccatagatacacgtgaactgtactgccataataaaatcgagaacaactaaattaatcggtcaaagataagaaactgtgtaaagcttcggcgcgtggggtgtgaaaatccataagacaacataaatattagggccgactaagtaggaaggagccgaccatatggggattgagttaagaatctctgtgtctgaaaaattaaaaaaataaataaataaaaaacgctttaaaacaaaataaaataccctggtttttagcgaacacccaaacagagctttatagcaaatttactttcgataaaaataataaattaattttataatttattcctcgtaaaataaggtaaaagaagaagagagattattaatgaataataatttatacaattatattgatctactggattagctgagtgacagttcaagtgaggccaaaaagtggggccagctttcacttcaaaaacctccattttccagtgtttaaaagcagctgcaaagcatatgcattttggcaaaacacacatacattaattaaagcttcaagctttcatactttgtttgaattaaaacacgccattttttcttatctctccactcgaaacaaacaaaacaaaagggagaagagtgaggaaaaaagtaaacttcattctggcaagcaaagacatgcccagctgggttttcttgtctctctctctgtttgtacaactaaagagggcatagaataaagtcactcaagagaaataaaagaaaaagaaagaatatttatccaaaaaggtcattcatttactttggtggagctcaagttagaggagagggcaggggcttttggttcatgtcatgatggggttgaagctagcaatgtggaatgctttgcttcttgtggtattgtccctttgggcttcttctgttcaagcctctgtttcttatgattctaaagctattgtcgttaatggccagagaaggatcctcatttctggatccattcactaccccagaagtactcctgaggtaatcctccaaatgtgcttcatgggtctctttactttccttgtttttttctttcttctccttactttggtcattttttttcatctgggcacttgttttctcctccccaaactattatttgtgtctgtgtatacatgtattgtatttatataattatttacttttcttttcctttccctgaaaagtcatagtttcttgatattggttcttctggtttgctgcagatgtggccagatcttattcaaaaggccaaagaaggaggtctagatgtgattcaaacttatgttttctggaatgggcatgaaccttcacaaggcaaagtaatggataaatggccaccttttgtgtttttgtgtgcttagatgattctgaccatgcattcagattgtaatttttttcctttttttttt

SEQ ID NO: 380449 - DNA, 4846 bp, Cannabis indica
tattgtaacctttttctttttttttttttctttatatatatatatatttatatgagtgtatttttaatgtgtattaacaatataattaataaaatttaaaaatttttatacttaattttgttatttaatttattttttttttatttttacattataataagagttgtttcatgtgatatatataacaataatattaataaaattaaaatttaactatagttatttttttaaaatattcaaaatcattatatagtacttattaataaatgttcgatatatatttctaccattacgctatatttatagtctaggacaacttacttttttttttttaaaaaaaaaaagaagaaaaagtcttttataaattaatctacacacccatttaaaactaatcatggtaaaatacatttgtaccaaaaaaaaaaactaatggtaaataaaacgttagatggatataaaatatatactaatttcaattcaagagatatatatagagttgcatccatcctcctttgctagcatttttcctaatttgattgtacataaatattattaactactaattactaccataattgtcatctattgtttttttcaatttttttttaacgagtattatataataataaataatgaacgaatatgatgaaatgaaaatctagaaagagattgtacataccaagttttgaagagaggaatttgagtactgaaatggagaagacccaaataatatatgacaatgtggtgggtagctagctagtggtgatgttgagtagaactgaaagctgatgacttggctagctatctatttagagagagagacagagagtagagaaaagaaaagaacagaaagatgtagctctgactggttcactatctttggggtcaagctttttattgaaataatagtgagatctctctttctcacatcacatataactgattcccctctctacaaaataatagttaactcatgattttatagcagaagcaatgtactaccagtgattcgcccattacctaaaatgcccctgctctaataaacaatggatagtaattacataaacacactgggcatgcaccgcagatttggcaaatggcagaatggtcatatcatcatttaatatctacatgaaagcgaaacggcagcacttgcaggagatgggtaaggatactctacggctgcattgttttgtgaatggtgcatcaccctgcaacgtctggaagatttagagaagagtcaatagatcccacacgtcggagagaaaaccttattggtgggattatttaatgagatgagagaacgtgtacacaggatcaccgtagtgaaggtaatgaatttgtctgcttttgtatgactctggcttccatgtttgatgccaagtctcctacctctttctcttcactaccttcttagacacgtacgtacaaccactactccaacttttcccttcattattattttatgaagacaattgattagtcaatttggtcattcatttttgcatactagtatattatccatgcgagactctttctcaaataagacataagtgacacttttctatttttaaaacaataattattttttggaaaaaattctaacaattctttacttcaatttataaaagtattttctcaaacaatatcaatatctataagattgtgcatataaaagaaatatctcatgactacggcaaaaaaagcttaattatggaaacgcaacataccctttggccaataatagtgtttctataggtataggttcaaaaatgtgcattatacttacacctacaaaaacaattagcattgcccattgctgtggatacctacgaaaatggacattgcccatttatgtaattcgtatacctacagaaaacaccaacattgccaatttacaatgcccatttctaggtgatcaagaaaaaaagtgctaaacttttgtttttgaacaattttatatttttattatactatgcacaatcaactatatattaagaaacaagataaatttacataaaactataaatacaaattacatagtgttgtcaacctttgtaaggacgcgctagtggtgcccactggatgataggcccactaaagtaccggacactggacacattacaccttaggctcatagtctgtctggattgtttcaaccagagaatttagaaagagcatgtttgatatagttggccttgagaagtttttggaagtttgaaggtttcaaacgagaggttccaaatgatggctaatatgttatcattcttgcatatgttgagaatagtgcccttaaagctaattttaattgacaaatgctttaaatgaataaataagtgaagttaaacacatatgtagacaatatttgatgttatgaaaataacattgtgtaaatattagaaaattttcaagttttcttggacaaactcacctgtgtgatctctgtaaaagccttcgtaaacttcgtagatgattgtactaattttggtcttggatatgcactttgaataccacatagataaccctattcgatataaccttctatctattataacatatatgagagcttagtactggaccttcctgacagttgccttcttagcttgtcactctcctgaagttaaatatctaaggatgggtcctatccaggacgtggattggtctatggcattgaccccaagtgtttatatgcatggtgtaggtaaatgggaaattagtacaaccctgtaggcttctattttccaaatctatggctagcttggctagcatatcagcgaaggcgttctggtcctggagacttgcctaatgttgtaccttttgaaatgctggagtagctctcaggtttgggatacataagtggccatcttttctcctttagtttggtctttgcctgagatttggttcaccataaaatataaattgagcatcactgtggacctcaatattctcggccaccacttccttagctagacgaagtccaactatcatggctttatgtcgacttcattgcttgaaaagtcgaagaggaaacagagggcactctgaagatggtgacccttcaggagaaattaagattacgtcggctccaaaaccattctcattcgaggctctatctacatataccttccacactgataactccgacataagctcttttgggttctcattgatcgcggaacattcaaccatgaaatcagtcaaatcttgaccctcaattaacactcttggctaataatggatgtcaatttggctaagttccatagctcataagcaatatcttctggatgattttgatttctataaaacttattagagagggtgattcgtgagtaccttgatggaatggccttgaaagtaaggtctctgctctctagaggcaatcgataagaagaatggcaatttttcagtaaggggatacctggactacgcgcctagcaatctcttgcttgaatgttttcttcttctcgcactaatgcaacacttatgtgatatttatatatgaccaagtacaggtacaacaattttactttaaccgattttgacagtattggggtctgagccaaatgctccttaagtttctagaaggcttcttcacattcggtagtccactcaaattttttgcttcaaagaaagatgttgaagatagggatacatttatcagtggacttagaaatgaatctattgagagcagcgatcctccagtaagactttgaacatccttatgtttctttaaagacaacgtatcaattatagcatgtattttctttgggtttgcctttattctgtgggaactgacaataaaacataagaatttctccgatgaaactttgaatgtgcaccttttagggttcatattcatcacatacttccaaattatgggaagggcttccttgagattgtctccatgttcatctgaagttttgaactttaccagcatgtcgtccatggaaagttccatgctctttcccataacatctttgaacattcaatttactaaccgttggtatgtggtcgtctctagaattctttaggctaaatagcataactatgtaacagtaggtcacccttatccgtttgaaaactagtgtgttttctatttgccacacgcatcatgatctctgattgtagccaaagtaagcatacatgaagctcaatagctcatatacggatgttacatccaccatctgatttatttggggtagcagaaaataatcttttggataggctcagttaaggtccgtgaagtcgatgcaaaccctccaggttctattaggctttgggaccaacaccagattgactaaccataccaggtatatagagcttccctcatgaattttattgaataaaatttgtccacttttattttcaaagattttgagtgaactagatccaaaggtctttgctaggataaaaagttttgatggggagcttaattgcgtaggcaaaactttcccacctaatttactttacacgtttttattacagaaaattaactgcctttttttgggacttttaccggcgagtttatgcgtcagtagaacttcttttcacttgccaaaaaataggtgccttttggcgcttggtttccctacttatgccggtgaattaaccttgtttcgccgacataactcctttttgccgacgaaaaaacttaccgatataggcgcttaacctgataattggcggaaaattttttcctacctctgccagcaaagctaaaggaatttcgtcgacaaaagttaacgtttgccacaacaatttatggatagccctggcaagtgattttttgtattggtaattacatagtaactgtgtaattggaggtaattgggaggcctcaattact

SEQ ID NO: 380450 - DNA, 3688 bp, Cannabis indica
gcaagtgtgtctgcagaagctattgcaagtgctgagaaggagctctctaccatggttgaaaagttgaaaagcatacgtggaagaatttctgatgcagagcggagataccaagcctcagagaaagcagtttcacagttggagatggaattagcaaaaactcagaaagaggtattttcagtgtgtttgagggttctctgggtttcggtataatttgtaaattaatgatgttcattttgtgtagattgacagtctcaatacacaacataattatcttgaaaagcaacgggattccctggaagctgcttcacaaccaagaaaggcagagcttaatcggcttcaggagctcaagaaattgatttctgctgaggaaaaggagattgataaactcactaaagggtctaagcagttgaaggagaaggtgagtgataaattttatgttttatgttctctattaagtattgccagttctacaatctagatcttgaatagagagctatacttccatattttctgcttttcgtattacttcctttgaagttttgagaacttagtataggtttagaaataatttattgctgatttaatttgggatattgatatttccgcttacttgagtatcttgagttttacttttttactttaggctgaatactagattctgcccgtttaattatttcccctttttaggccttggaacttcagaagaatatagagaatgcaggtggagaaagattaaaatcccaaaaggcaaaggtcaacaagattcagtctgtaagttcatatgaatggtatatcaattttaactatttatagcagtggagtgtagctcctaatttatgctacctattgtaggatattgacaaaaatagtaccgacatcaaccgtcacaaggttcaaatagagactgcccagaaaatgataaagaagttaacaaagactattgaggaatcaaagacggagatagaaagactcactcaggagaaggaaaagttgagagacaaattcaaagaaatagaacagaaggcttttgccgttcaagagaattataaaaagacacaggaggtctagcattcttattcacttttgtttttttaattatggattttgcaaactacaaggaatttcttatcttttatcttattatctttttgtctgtgtagatgattgatcaacataaagatgttttggacgaatcaaaatcagagtataatacaatgaaaaagacagtggatgaattgcgagcgacagaggtaccatgatatcaagattcttatcttttgagacttttccttctgttacatatttgttcaggttactattgttgtgcttcattgttttgagcagtagattaaaaatgttacaggtagatgtagactataaattaaaagacatgaagaagctatacggtgagttggaacaaaaggggaagggatacaagaaaaagcttgacgagttggaaagtgctattgtaaagcatatagaacagtatgttaatttgattgattttttttagctatatttttgtgcttctgaatttggcaaaataacgtattattacaaaattttcattaataaagaaatcataaccatgtcggttgcagaatccaaaaagatttagtggaccctgaaaagcttcaagcaactttgacagatgaaactcttcataaggactgtgatcttaaaagagccctcgaaacagtcacattgctggaggcacaactaaaagaaatgaatcctaatcttgactcaattgcagagtatgtttggagaggttttgttgtatgaaattcactaccttgtttatattctaactgtttgctgttataggtatcgaagaaaggtttcgttgtataatgaacgagttgaggaccttaacacagtcactcaacaacgtgatgatatcaagaagcagtatgacgaatggagaaaaaagaggcacggtttcctttagcttatatgtatacatacctgtgcacttgcgcgttggtgttgtacttctcaaagctcttttctaaataaagagaaattcctgttgtttcaggttagacgagttcatggcaggattcaatgctatatctttaaagttgaaggaaatgtaccaggtttgtgatcgtaacaattggtcttgctcatgttttagctttttctgtaaccatcctcgaacattgctgctgcacttgtgtggtgtagtacatattcttcaatttttcctagttttgttacttggaggaaccttcttcacagcttatatgtgatactcgcacaccagatgctacctgcatcccgttcttcctattttctaacctctcgtatttgagttgtaattattcttttcctcttaatttactttcttcagatgatcacgcttggaggtgatgccgaacttgagctagtggactccttggatcccttctctgaaggtgttgttttcagtgtcagaccaccaaagaagagctggaagaatattgcaaacttatctggcggtgaaaaggttcttttcacatcattttcaaattacattataaatatatacattccgctgctgttgaatggaaatatttcctgtacatataacatttcaaaatttcttatcatgttgccactttactgttttcagactctgagctcattagctcttgtttttgcactgcatcactacaagcctacaccactttatgtaatggatgaaatcgatgctgcgttgggtacttcctttgaactttaaacttcttctaattaaatatgttctctttgttctcatttatatggctcgtggcattgtagatttcaagaacgtttctatagtggggcattatgtgaaggacaggacaaaggatgcacagttcataatcataaggtaggttatccgctgccaatggactatacccaaactcacttgtaaatatgagtaaaaatgatggtttctttgtctcttttacagccttagaaacaatatgtttgagctagccgatcggcttgtcgggatatacaaaacggataattgcacaaagagcattaccatcaacccagggagttttgtagtctgtgaaaaggctgcttgatctgttttcgtgttgcctggttacatgaattggctccatgtcctattgtcctatgatcaattcaatgtttttacgtgcttgtgtttttttagctaatttatgtatattttgatattttgggtcggtatcatatgtttaccaaatatatgtagaaccaacaagcttaagtggcacattgtatgcccctcaggagctctgtaattttattgtgatgatatatagtgcagataggtagctttgcagtctttttaaagctcatgggaatcaactgcactttccttttggctaaattatgacagatttacaaactagtgctgtactgtaacattacttaattattataacattattattatgctaatctaaagatagatgtgatgagctggtattgggtttggctgaagaaagccttatttagtatcaggtaaaaagctcatttcaaactgagttgagagcttccttgttggtaacttggccttcattggtcatcattcgccggaagttgaatgaaaatgaagattgagatagtgcatgaactggcttttcgctcaccctaatcagattgtaacaccaagctccagttagtgttccggtgattggtcccaccatatacacccaaatacctt

SEQ ID NO: 380451 - DNA, 1524 bp, Cannabis indica
agagagagagagagagagagggcacgcggccatcatatgaatctctctttttttcagctttcttatagcaccccataattgagggcagatatagtgttattattatacatatacaacctaaaatatcatgtcttcacataattaatatagtttttcacattcattatgtatattttttaaaataattttgtaatttaataattcatgctgagaaaaaacagttatatattttatatttattcaaacaaaaaaaaactattattttctataaactaggagctaattactcatattatagctagggtacagtggctccctgaaaaaaaaaaataagtttaatttctttcaaaagcatcttctatatatatatatccaataaataataataaaacccgattgctctttatattcctttgttgatcatttcgtatttctttgttgatttcgtataatactagttagaatatttttcaaaggtatatttcgagtttcacatggggccagttttagattattaatgctagctagagctagttaattagaaattttctgttttattttaattttgatttgtataaaagaaaacaaaaattgaaaaaaaaataaaacaaaatttctaaaatattactctcaaacttattggtcaattagtattaaagatcgattaattggtcaacatatttttctacggaaagctccaaaagtcacagttgagcatgcatgatcaaatatattgggctctcttttcttttttgggggtcaaaaaagaaatataacatttttcatctaaatactgttgcttcgaacatgcaacaaaatagacaaacattgttttgtactattaattactatgccaaaatttgagaaacatcatattaaattagtcaaactttcaacagtttttagtgttttaagttaaaggttatatctcacgtcacacacgtatatatataatcgacagtattatcttccaaaaactactttaccatccgatcattatgttaatgcagctctattaattgaaatacaaagttacataaattaatgtatagtatataataacaatatttcttaaaggaaatacaaattgtcaaaccattattcatataattattataatttacccccaccacctcaggaaatttgtagccttaaccaatcgctatatatgatcatctactacaaagaagaaaaagaagaaaaaacattaccaaaaacaaaagtgatattatgttatttccatatatatgtgttttgtgttgagatcaataaatccatataattatttatggaagttgaacttgaatttgaagataatggagacaatgatgtgacaaacgaaccacttcgcagtggtaagtggtagaccacatcaaagttcattttacaaagcctatcctctccgcaaatgaattaattaaaaagaaaattgttaaacacagcaacaataatattggacattattaagatatgttggtttggaacattgtatgagatcatattgaattggattatatatcatat

SEQ ID NO: 380452 - DNA, 1200 bp, Cannabis indica
tttttttattcttattctttttctctttcttcttcttctatgctcagatccatcgttaaccttcttctttctttcactcccatggtggttgtgagggctttgcagaatggagatggcttagcaacaaatcggatcagacttcgtctgtgatgggagttttatgatgccagatcggagacacgggtcggaggtcttcctctgtccgccattaacgttggctgtgcgactggaataaatctatatttataattttgggtcatgagcaaattaattatatttttctgtatctccatttcttttatatatatatggtttgcgattatttattttctttttggatttggacagccatatatgaatggtaggtttgctaagttttttttaaatttaattttagttttgagcttgattattgtattctgatgttgttgaagatgacggctgactggtcagatattttttaaagaagaaaaatgttttgtttttaagttaatgtatttaattataaatatgaattattttgttattattatttaatgattttcttttttgaaaaaagtaaaatatggaccaatagaaaaaaagaaaaaaaagaataaaataaagtaatttttttataattttttcataatattttaataagtaataatacgtgggccactaaaaatttgccacatgtacatttgtgtacacgtaggcagtccaatgtggcacttaactgggatttttggacggaagtgtgcagagcaaaacagattcagggtttaggtagtttaaccgccaaaatttcggtttttgtggtcaagtgttacaaacggtaaaattcaagtggtttagccgccaatatctcaaaaattaatactaaaatgtgaagtttggttgtcaacattaatcttatcattcggctgccactacactgaacctaatttaattatattgggtgttaatttagttaaatataataatcaaataataaggtcttaaaattttaaatgccccctataaagagtgggccctaggcaccggcctagcccgcgtatgcctagggccgggccaggccatgtagtacattataattttcttaactttaattcagattcatacatgtcggccaatccaagtggagaactatccccgatgacctcgaccctatgtcacaacaataataacccaataagtgtttatcccaaaacacttctt

SEQ ID NO: 380453 - DNA, 2697 bp, Cannabis indica
ggagaatattgacctcgaagaaatattccgctttagtaagaaagaagcatctgttctcccagatatgtgtagtgtagttacatgtcttttcaatttaaacacccttaaccaaagtaagggccttgagggcaatgtcacataagaaccctacaacaaagtaaatgaagaacttatgatgatggtgaagatgtacaaacaaaatattctagtgtttaaataccaatatacacttattaccaacatctatgaggaaacttgttatatgtgtgtatgagagagagagagagagagagagagagagagagagcatgttcctataatcctaatatatcatacacagcccatatgtaaacaacacttataaaatacctgcattggatgggtgaccaacgccattatctctaccgatcatcaacccaaaagaacctagataaacacaaattattcataaatagatggaaacttgatgcagcaaaatgattttgttgtagatataataatgtcacataagaactccacaacaaagtcaaagtaaatgaaaaactattgattcataaaatatacaaataagactcctaagtaggcttttagtgcaaagagaatacagatggtactccataactccattaaaataataggaggggttcaataagatttaaatgcaaaacatcagagacaatttattacttggaaaaaaaaaaagtagacctcattatataacaagaaacattacaaaaaaaaaacattcctctcaagctgaggtttcaacaatggagctgtctaaagtaaaccaggaagatagtaaagctagcaatgatgaaaagtcaacttttaatcaataaagccaaaaaaaaaggaaaaaaaacctcatttcttattttacacgaacaattctcaagttgaattgtaagaaaaacatgaacataccaaaaacccaacaagtagctctaacaacacggcatcacctatgcttgaatatatatacacacaaatacactttggaaacgtaaccaaaatgtgccaggaattaccaacattattgtttcaaccacctgaaatactaacaaatatcttaaaatgctatcaattttttcttagcaaccaaacacaagcttacccaaaacaaaaattcaagccaaaagcgactaaattttccatatattaaaaaaacaaagaaaacccaatcctcaaaacctctgccatatcttcttcttcttcttctatgtaacaagaagaaacaaattctttatagaaaaaactcgaaacacacaaaacaaaacaaaaccccagaaagaaaatagcaaaatagaaactgaattaagactaacccttgtgattgaagtcatgaggttgcttggtttgcctaattagaatatatttgatggaatatgaatcaggataagaagaatgacctatcttatccaaattgatatttctacagaagaagctgaaactcttgttggttaatctttaaagtatatatataggaacccttttctctcttcctatgaaaaaataaaaataagaaggtggatggtaattagtataagcacataaacagagagagagagagcgagagagagagagagagagagagagagaagagagacagagaggctaaggtaaaaggcgtgaagattcattctggcaatttggagaagaaaaaggcacgcaatatgggccgtgcatcttggcccattgggtaggaagtgagaagtgtggtatgagaaattggcctttacaaagtggcccatattttgtaatttcagtagaaattacatgctttttcataggttagtgcattgttttaggagtttttttatttttacactaaaaataattttttttttatttttacgaaatttcacatagaaatccttatagaaactaataaaataacttaaattgtaactaaaatccatatagcaatccacatagaaactattgaaaaaaccactagaacaatttaaaccgtaaatttaaaaaaaaaaaataatatttaagataatttcccttactttttatttaaaaaatataatgatatagaattattttctcataaatttataagagaaacataattatatcacatttttaatagtagttagagtttctatgattctaataattaatttgtaattttattatattttaaaattgatttattattttaactctttttttatcaagaaggagaataccttcattaatcaaacaaccaccaagtacaaaccaatcaataaggaaccaaaacagaaccttaaagacaccagcaaccacaaagccaacctaatacactttcatttttacaagaaaggctctctcaactctagacattctcctattcttaacactttgtaatttatatttgactgtatttttgacactatcaacaattgtttcaactgtacaagaaaaacctttaaaagtacatttgtttctatttacccaaatattgtaccagtagcctctgaaacctgcttgaaccaacaacagataaccaataaattcagcctttgaaattcaaaggccacaactgctttcccaaccagctgaaagtgagatcagaaactttctttgacagcctgcactcgatcgaagaacatatgctcatacgtctctagtcagtggcggacctaagatttaaaatgagggagaccgtaattttttttggtaagtgagagttggagcaaaaaa

SEQ ID NO: 380454 - DNA, 2426 bp, Cannabis indica
gtttatacttactcctttaagtaatgagtgagcttcactggtaagataaggtggaagtttcattttctctttaatgattttctcttgaagtttctttctattttcatgggtatatggtggctgcataatgaaagtaaaatggattgaaaatacaaggttagtggagtagtggtaagaaaagtttgcagaccattattcaaagaactcttaaggaataactacacaatacagagacaatgcactgaaaaaggaaagtcttaggagatgatgaataataatcatatcaaatgtttggtgtatgaagacactcaaaaatcaagtcgatctaacaaagttcaaacccaacttcacagcctattggaaagctataaattcaacagactatttgtagacacttgtccaaaaataagaaacaatgagtaaatgacagtggaagacagataaaatatatagaactccaaaagggaagaatgttttagagttttctaaccttcccagttagcatctcatacaagagtattccgacactccaccaatctgcgtctttgttgtgacctttagattgcaagatttctggagccatgtattctgttgttccacacattgaatttgacctgcttgattcatcgatttctttagctagtccaaaatcagtcagcagaatctgtaccacaacaagtaaacaaattagagacgaaacaagttgttgacacaaaactaaaaaaaaattaaacccaagaaaactatgtatcataacaagccttgcaagtttctacaaacagaattgagttaatgagcagggccattacatgtccgtcggcgtccatgagaatattttcaggcttaagatcccgatgaacaatcccgcatttatgaagatgggaaactgctgtcactatctcggcagtataaaaccttgcatcatcctcactattcaagacaccgaaagccaaaatcaaaatatgataacacaaaaccacaatcaaagcttcaaagttttcaaaagtaaagtacctgaagataccctggcggtacaattgaaagaagagatggcctccattgacaaaatcgaggatcaaataaagcttagacttggtctgtgcaaaaagaacaaaaaaaactaagtaaagatcatactcacaaaatcacacagtaacatataatgaaataataactccaatatgacgggtaaatttcaacaagtgcaacttttaatgtctataataacacaaaagaagttctggcacaatttagtgagctattattacacttttgcctgcaaaagacataactttgaaagaagaagcaaaaaaatgtctatatgagaatataagtaacagaccttgctcctcaagagacgtaatttataaaaataaataataaagcatacataataagttattaagattaagatcaaaatttgaaacttcgattatggttttgtgttttatcatattttgattgaatggaaaaagtagcaagaaatgtgaaactgaaaatgaagggtaaaacccaaaactaagaaatgggtattgataactgaggtacctgaaaagaatagcggagcggaacaatgaaagggtgaacaactttggtgagaatatccctctcagctctcatgtaatcaacatggttcttcttaataatggtatctttcctcataactttcatggcatagatcccatccccaccaccattaccattaccattaccattaccattaccatcatcattacaacaattcttctttctgacctgaaacaccttcccaaacgcacccttccccacaaccctcataatctcaaaatccccaggcccaatcttcacatcactactcccactcccaccggactctggctgatcttttcaccgcaaacgacgtcgtttgggtccctgtttccagggctggtttcttctccatcttcatcatcatcatcttcttcgtcttcttcatccaattccaaatcgaattgttgggtttgagcagaggcgtagcgaggggacggacccacgaaggagtgggaccgattgtggatgatatagggttgttgctgttgttgttgttgtggttgtggttgtgggtccccatgaaaagggttggatgtggaagtggaaggggttgggggaccgaagacatcgttgaagtcgaagtcttgagctgcagaggaagtaggtggggaagaagatgggatggtgaggttgctgagcttggctgccaggagggaatggtaagtcttcttctggttttcagaggacaccattttcaacttggggtatgtaatgagattgtgagagaaatgtaatgcaaaaagcaaaggagaaaggggttacatcttgggttttcttctagttgattgatacttgattcgcagcagcacagcagggctacatgatatgcatacgagtacagagagagagagagagag

SEQ ID NO: 380455 - DNA, 3554 bp, Cannabis indica
tgtaatctcaaaggttatgacatcttctcccatattgctgctacacataatgacactgaattggagaaaattgtatgcatcatgtggtgtatttggtgtgaaagaaataaggagtcacatggttctaagtttaaaatagcagatgttatatgtagtttctctgctacatatctcatccaatatcaaaaggccattcaagctgctgctccacaccagaattctgatgctcaaacttgcagcacccaggtagctccttaatcttcattgttggtccatccgaaatggcagccacctgaaattggctcgtacaagatgtaggcgctcttattcagaacaatgaaggtgtggttgtagcaggtctctcaaaagttgttcaagggccaaggctgctattccccaaaagaaatggaggctactgccatgttttatagcttgcaatggtccttgacgcgtcaactacaaatacacttcattgagtcggattctcttttattagtaagttagtaactcattttcatgacatggtagaggatattaattatcttttgtcctttttcttagagtaaaagtatctcatgttataagagatgctaatcaagcggtccatgacttagctaaatttatttttcgattggatgaagatatgtcttgattggaggaaatttcatctccaatcttttctgttgttgttaactatttttttttttttccatttttaataataacagaatttttctttaaaaacaaaactgccgcgagtgatgctatcattgactatctctcgcgtcgttcccaaagtgaaacgctttaaattaagagataaagaagaaatcatcacggaaagaggacaaagacaaagacaaaccttacataaagactttttccgctcccattacataatcttgttccctacataattttaaggatggcccagtttcatgaagaagaagaagaacaaaaacacatattaatattatattataatggcaaataacaaataacctcaatctaccaaacacaacgtaccttaatatactctataatcattattataatcacaaaaaaccaccccactaatcatatcttttccacaaagtattcggcctgttgttttttttttttattattatttatttaaattaaagaaaatatttaaaactaaataaataaataggatgtgaaagtgctgggtcgaatgggacaaaacagagggttcagtcttgttggctgccttgtgtaaaccgtgtgggacccaataccgtccgaaacaaaaacgaaaatgcatggcgttggcatggcatgagacggcttggcttggctttgcttggcttggcttggcttggcttgacctgacttgacttgacttggctttatgtgatgcgcaaacttagctgatgcctcacgaaaccttagatcatttcctttcacttttggtcccgacacgtggcaatcagacgacgtcttcaccaactgtacgttttctatatttctattttttttttattaattttgttttgtaaggaaaatatgggacgtgccttcatgatcttggaagttgtcgatcttttttttattataaaattgttaaaggatcttgttgttttgttgttggaagaattttactgtgtgagtactttattcagtaaccaatactcaaagaaaataatttgattaagcaacgccgtaattaaataacaaatgctgcttattctacaaggcactcctaaaaaggtacatcgataagaaaatttggtactctcatatttataatgattgtgtaaaaattttttttaaaaaaaattagaataatttatagtatacaaaatactattcaaataatttatttcaaatgtgttataaaataaaagaatcatgcgtacaataagttgtttaaaccttatttttaacatgttaaatatttttacatttctcaaaattttacaaaatatcttaaaataaatatatcatcataaaaaaatagaataattataaacaattctcctagatgtcgaaacaaataagagatgcatctaaaattttccaataataaaatacattactttcaataaatgttcattgtcaaaaaataaaatacataaaattactctgaggtttatcaataataatttaatgcataataaattatttttgttagtttgtattataatatttataaagggtgtagggttggagacccagccccaaacacagaccctggaccaggcccagacctgagacttagacccagacccagatcccagacctcaggccctgaactcggacctcgaacactgaccacgggacctgataccttgactcgaatcctgtattggatcgagttttatgccataaataaaattcaatttcaatgtagtcatatttactatcagtaaagataagaaatcataacataactttgtctttcgcttaattcacatgtttcatttttataattatatgtaatatataaattctatttaatcctggacatatagttatttacaattgtagtgttgtcaccacaatagaaaataattgtgattatatacttcaaagtaattaagtcacgagatttatcagttcacaaaatttacattggcgtgatcattgacgaagtggtttacttacaattagacaattgaaatatattttccaagacattggtaaagtaaatttacattgaatgtatatagtttacattgggcatgatcgatattgacagtgaaagatattacaaacttactgttctatttgttctcagtcaattcacttagttgatcttaagatctgttgacagaaaactcgtcaactaacttaagccagaaaattgaaactcaaacacagtacttaaaatgaagatgaaaacgtgaaaatacaaaaacttaaacaaatattcagagcaacaataaaggaagataaatgcttgtatttcttggagtaagtgttgcagtgattttccaagccctctcacatttgagaatgggatattatggcctggggtacaattgtggtcccaagggacaagatgacatccatgactgctggttgcaaatggtggtcttgcaccttgtaactttgtttggtgcaagggggtcccgagttccaagggtagtggatgtgtgaacccttggtcgatgttaggactttcatgtgttgtgcttccactactcatgccttttgggaaatagaatttgcaggaggtgtggttgtactctctttgcatgcacgcgtcatctttgtatcatgcctcgtccttgtaatcataccttcgctgcattattccacaacacttgggaaaacttcaccaagcataattgtgtaatcaagaagagcatttccaagtgacatgcatgaaagtcatggttgagtgacttgcatgctatcttggccgagtgacttgcatggtgcaaggctgagtgacttgcatgatgcatggttgagtgacctgcatgatgcatagttgagtgacttgcaagttgcatggtcgagtgacttgcaagcttcatggtcgagtgacttgcaagcttcattgccgagtgacttgcaagctttat

SEQ ID NO: 380456 - DNA, 2331 bp, Cannabis indica
tttttttttgttcttggcatattattttttgtataaagtttttgtataataataatttttgctatgaattttttatcctgaatctattactatataatgataatatttgtttcgggtctattatttgaaatgtattcaatataatattatataatgatattatatttaataaaataatatctacaaaattttattatttcaaagtttttaaaaacgagtcaaaatttacagttataaatcgagatatatagtgtaaaaatgaactgcacacccgttagtgacagtttaaaactaacatcaatgtccaaaagtctcaattcacaaccggcaccaaagaatatactttttgttactgtaaaataagtgtcaattttatgaaccgacactaaaagtgtaagtgtcagtttaaaactaacaccaaaagtacaatttatagtagtattaattaaccctaaagcgtaagcatatgtgtttatatttccaatttgatttgtgtaagagtagtttataaaatgactttacatgtttaatttgggttaatttagcagctcactaacctatttatgacacatttaatattgtttacaactagtttataaggcgatacttgtaatttaactaatttaatgtaatttaaatataatatttaataatataaattttaaatagattgttgtcatttcattttggggtaaggaagtcaactggaaaatgacttgattattgatttaatttataaatgagttaggtgtcttagtccgaaaataacttaaaacaaatataagaaaagaaccaatttcatttattttatgtcacaattaaaaataatctctttggcttaataagaataatatatgtgtagtgagaattgtagttgagaatggtaggtaattaacgtgtactctttatcatattaattaataattaattaccaattaactcttgtctctagggcaacatataattaaactcataacttattattactctatatttagaaaaacaatgaatatacgcaaattttgatttcgtaaggggggccaatcttagctagcatcatcatgcataggtttaggattgggcttaggctaagacaaactaggtccgagcgaagagctcactcagtccagagctcaaaaaaataattttatctttaaaaatatacatatttttttaataaattttcaaaatgctacattgtttttttttaaaaaaaaaataagagtcttaataatttttctaaggtccgccaaatttcaagaccatccttgaataggtcaataaattagggccacatttttacctttaagcatattaggattataagactagcattgctatgaagtattagtggtacgcctaacaacattcaaaggtagtgctttgtgattagttgcgatatttcataaaaattattatattaatttattatatgagatctgatgatatttaattatatcaataaaaatatgacaagttgaaaggtgctaggtaggcacgtccactacaaataaaactcacaacataaatttttttttgagactaaatgtgatttttactcacaatgaaaaattatttgtaactaaaatgtaatatttagatacaagttgtttgttactaattagttttagtcacaacaagtatttatgactaaaaatatatttggtcaataaatttaatttttgtgactagtacttttagtcatggaccttttaatcacaatataaaaatgataatttataattaatcacaacgttatttttatttttaatttttgttataacaaaagtaaaaaattttgtagtaaccactaatatttttttaacatttctcgtataagagtgacaataataaaaattcaaagacagtgtacgaataatatataatgaaataagtggaaattctgtttttcgtgttggtgtctatcaaaaataattttgaaacttgattgactttatagaatgatcaaacatgtttaattttgattaatttagcaactcattaccatatttatgacacctttgacattgtttacaactcctttataacaaggaagccacctcgaaaatgacttgataattaattcataaatgcatcatttaggtgtctaattattaattataagtccgaaataacataaccctatttaagaaaatgccaatttcgtttattttatgcgataataagtcatagtaaaaaaaaaaaaaaaaggtcataattatcgtgtatgacccatataattatagggtgtaagttttaatttattagagattatttcacaaatatacaaaaattataaaaaatacgactttacggaattttaaatatttt

SEQ ID NO: 380457 - DNA, 2493 bp, Cannabis indica
aagtataactagccaatggtgttagccttttggctagtaacaaattaataatatatttgtcaaatataaaagtaccaaacatgaaatttacaactctaatttaaaattgaaacaaaaagggagaaactgaagaagactgaatagtttaccgccattgtcgtcttccttcgcattcaacacccatggaagccaactctttcgatcctgtaacattacctctacatcttcacctgtgcaattcttagcagttttaaatttctattttattattattcttctgctaattttttttttcaccatcttcatcacgacttcaggatctgattcacgccattttcaagctcgtctggaacaaaagagctctcggttagttgatccttcactttttcaatttcacattcctattcatcgtttaaaaccttttccttatttacatttctttctccattcttcgtgctgtaattttttttcactcagagcgcgagaagaatgaaggtgccgatgctttggactgcgaggtaccatttaaatattctgttctatttgttttgaatcaaaaccaaagatactttccgtaatgctgaaatactctgtttctaaatttgtttgaattggaaccaacattttttatgactcaaattataagcaagggctagactagagtcgggtttaagtccattaatgccctaagttgttttaggatttatgccatatgttatgctcacaggttctgcttttatataaagttgaaaatgaaggtgaagtcaattttgaatacttaatatgcctgtaaatttcatttcactattttgttttaatagttaatgtgtatctacaattaaataataacttctatgtatctatgtcaaaaagagaaaaacataattgatctctctaggttttatgaaaataaaggtatgtgtgatgttttgatatttcatcagtttatcagctcatagcctcattgccgcacttttgaaagctcttcattgtctatattaaaaatgtttagtcttcaatgaatttgaatttctaagcacttgcaggtaggagctggaacgacgaggaagagtcggtcaactactggtttgatcatccctcattgattctttggttcaattcttgtgttttccatttttattgttgtttttgattctagtttttaatttttttatttctgatatgctgagtgattaaagagtgttttgtttagttagatttttatgctttcattcaacatttctgatgcagctaatggaaatgcactgaagctgagttgtgagtttctccgaatgtttatagcaggttagcatatctgaaatgtactatgatgcttgtaatgtagaatgattttgcattttatgatgtgaatttatgagaaaactgttaaattgaggcagaggctgtgcagcgtgcggctgcgattgctgaagcagaaggtgtcaataaaattgaagcaactcatttggagagaattcttcctcagttacttctggatttctgaggtatataaggaaatactatcaataataaagtatctgcattgtagctaattagaaaaatttctactatgttcatagatgaagacaaaaacgagcagttctgttcatatcccctcaataagatttttcattttctcatgaattctataactgcgtttaaatatctttaggagaatcagctctttgtttattaggtgacttagttcatttgctctaatgtatgcaaaaattagaatttagcagttttggtcgtcttcaggtcaatgtgtctacatctgggatagaaagagcgctgtattagataccacttaaggctagctcaaatggttggacaagtgagtacatacaggtgtggggtaccgtttcaagtcctcctaattgtatcttattacaaaagcaaaatgtactagattgctcctgtgctgccaagcacgtttctgagtctgaagcattgaatgttgtatttcccttctctcattcagtaaacattaatttcagtcactgagtgtatgaaagcagagagagagggagaaagagtgagagcatgactttgggatggatgaatgtcaacttaaacgactgagtgtatcattgagtaaatagagctttgtgtagttagttacattgagcataacaaacttaatatactaaagtaacctttttaacatgagctcgagctattagcttaaatcagtacacaagcttctgcaggttcctcaatagagagaaagagaggatagtagagtctctaagttaacaaagctaagagttgagattgtttctaaaagagtgctttattggtaggggcaaggtacattgaaacgaattggctgctttagaaacaacgctttcatgaattttgagataagaaccaaaaaagcaccaactcaaatgatgaatcttattttttggtggagcattttggtgaattataatgggaaatttgattttctatacttagaaaatctaaaatttttcctaaaccaaaatt

SEQ ID NO: 380458 - DNA, 3908 bp, Cannabis indica
attctaggatagggaaatcttaatcaaataacaaaagggggaaatacaaagaaaaaaaacttagtggttctaggtgatgcaagttctatgtttttgcatgaaatttttagctaattaacagcacaataacgataaactattcaaacatgaagcttcaaaccgacaaacgttagcaaaaatggtaatcccagaaatcaatttccataatttgattgaaaaaaagggtacttgaaaacccagaagaatcataatcgatctacctaattaaaataaatataagtaaaaatgatccccttaaataataaaataaaagaaataaattaaaaagatttacctgagtgtgagttggaggaaatttatatggggcgatgagaaaatgagtcctgtctttgtttgtgttgggaaacttattataggactaatatgcagatttttttatttatttatatttttaattcttgtagaaaaggtaaagaaatgagatttaatttaagcaattattatttagttatttatgtgaggtttttttcatatttatagtaaggaacaaagttgagtgtgaagcagctttttttttttttttttgttgggcttatgttaagcccagaatacacactttccttttctgtatgttcttcttctaggtcaatacactatctatctatttataatgactcttttattttgattattaaaaaaaaaaaacttaatttaaaactctaatcttggtggaatataattggcattagtctggaaaatgtattaacatacctttaatcttgattacaaaagtgggctgttgatttttaaatttgtgcagttttgttttgcctaacattttaacaattagtgtattttatccttaaaattttaaaaagtcttacatctaagactttattttttgggtctactcgtgtggctcccttctctcttttggtgtaaccatgagagcttcaaccccgctcacgaatgttcgtcaagactttttgaggcgagtcacccttctacaattaggtatattacatgagccccaacatagcattaggtgcatgaatgcccttgagatggatgtcaatggctagggtggcagtccaagacaatgtcctcacatttagggctcccaaaaaaactacttagattcgaactcaagatctctatctcagaaaaaccattagggggtaagcactttgtcactagattactcactcagtaagactctttcgaaataccgcaataggctaattgagctttagaagtaattacaagttaagagagtttaatatcttctcccattaagctaactaacagctggtttataggtaacggcaccttacaaacaatttgtttctgaataatatatgagtaataatatgtaaacatacacattaactttgattcaattttctaaccgaaattctggtacaaaatgggatctctattcatatttttatccaattttatcattatttcatccaataatagcccaagatggtcgaatggtactttctcaactattttttaactatgctttatgcctaatgcagagatgttcaccatctactaactttcatgagtgtttataatagattaaattagtttcttaaaagcattgaaaatctagcaaatgcaaaatcttagccagggatttgcctcaaagtcaagtcaagactccaaaataaggagaatgcccagtgaaattctctaagaccggtagaatgtgactcatgcattagtatcaaattgaaagaactgaatgactaacaaaatgtaaagaacaagaccatttttatataacaagaagtactacaacgctggtaacaactatctaggtaggcatacatctaatatatgtacagcctatatagttccaagccgaagattctcagcaaaaaatttgcagaacacattgccggaagaaaatataaactttcatgtagtttcttgtaatgcaccctgaaacatgctttatgacttcagaaccctatcgatcgcagctacatagaactccttcggcatggtgccaaccacagactcgcatttcttccctttcttaaagagcaaaaccactggtacagccttgatttcgtactcctctgcaattttcaagtcattgtcagtgttgagtacaaagcaattaagcttcccagcatactctgcagcgagttcatcaattacacggtgaaccatcctgcacggtccacaccaactcgcatagaattcaactagaacaggagtttcgctgtttagaacagaagtttcccatgtgtccttggaaatttctggagctgcatatatcaaatgtccagagagttagccagagtcaaaatttacatctacattttcacataaatcttttagctcacacaaaggttagaaagcaacaaacgaaaatattctaacaaacatgaatcaacaaaggaaaatgataagaagacttgggcactaaacagaatgatattcttttctattagtgaaggatatatattctttcttgagacaaaagtccatggcaagaaactttaatttcacgattttaagttccaggtagatgccacacattccagactatcaaatttcaacaactaacaattcccttgaatttaaggacaaggggagtttcattttcatctcatcgttggagtttcccaatgaaacttttaattaaagaaaatacaacttgaataattaactaacgagttgaattgcatgagcatccaaaaatcagaacaattaatcaaatctttcatttctagcattctttatccaaggagtcaacatgattaaacatcctaaactaaatttaccacttaaagaaaagctttatataaactacaattcccatagagttacaatactccatgcaaatctcaaagatgcccagtaacccatttcagtaactgtcaatggatatcttctaaatcatagattaatccaaacatcagtacaagtttctctgcaagataacctataagacatctaaaaatccagcagaaagatcaaacttcaacgcaatagtaactgaacatttcttcagaaaataacatccctaacgaggtttatcaactcactccccacccaatactatcaagatgacccttaatttgagatccaattcaaaaacaagttcttaattagaattaacataaatttttacatgttcaaccaaagattcccactacattacaaaaaagaatataaaaataaactattcccttgcccaagcttaatttcatcttcaattgtcatacatcaagatccctatttcccctcttatgaaaaaccaaaatcgaaatcgcaaaagagttcggaaagagagtacctctggattcacggacgcagagaaccttgagagaagggaacctaagattggaaaccttaaggacctcagtgaacctggaatggaggggaaatgagacgaaagacgaagcggcgttgaggtcagagcgagaggacggagagagcgaagagagtggagattggagagcgcgtgagcaagcgcgtggggtagttggatggtaataagcagaggccgccatgggaaagaggagagtgaactgtgaactggtaataagtgcttagtagtttagtattatataagtaaggagatgaaattgaaatgagaataaattccaaatttatacttaattattttgaaactgattctacaatgcacatttttttaaatattttggtgtgtaaaagaatttttttaaatttaattttttttatatatgtttatgtatattatagatatttaaaatattttataaaattttgaaaaactcaaaataatttatgtactgaaaataatatttaaacagtctattttacacgcatataaaataaaatagtcacgcgtgtaacacacaatttttgacgtgttaaattttttcgaatttcttaaaatt

SEQ ID NO: 380459 - DNA, 5418 bp, Cannabis indica
ttaactccctttgcttttttggaaaagtcactggcccccttattgtggatgagagctgtctcaaagctttactaaaaaggatgggacgccatgtctttgtgagtttagttcctggtgtggcaaaaaaatctaatctttttgaactgatttttaaagaagctaaagatagggagttggtgcttgacaacgacccttggatagtcaaaggatctcaccttttactcaaaacttggagccctctctctaaaattttaaactctttcatggttgctcgactttgggtccaaatacataacttgtcgtttgaatttttctccattgtcaatggaaatgacatgggtgccctagtaggttctgtggtaaaagtcgacctggatgaaaacaaacctgcaacttggtctaaatggctcagaattctcattgatgtttggatcgagtctcctctatttttaggttcttacattaagaatgacaatggaacaaaaatttggatccaatttaagtatgaaaaaatcgatgcttttgttatcactgtggacgaatcaaccatcttcgacgtggctgccgtttctcaagcccagattccatcaccagcactgatggctcgagattccccttgttcgatccttggctcaatgtcagatccacttacaccaactgctttgccagtaaacctctatctcccgttgtgtctgaggcacctggaaatgcgactgtcgtggacaagtctcaggagatgcctttctcgtctcctcctcgacacttgaatgtgaataggaacaacataggtgaagcttcgaacaagatgattagacgtgcccagtttttgaggagaccaaaaaagactactccacggccccgtccttcgaatggtaaaggtaaacgggccaattggattcctcaaaaccccaatcgcatgccagagtttttattttcctcttctagtatacatgtcgtaggtgttttgactgtgaacgagaaaggtggaactaacacttcctttcctattttgaaccatttgaaaaagaatgacccacgtgccctaaatgaagaatttaaaaaaaaaaaggaattgcaactctttgctggcaaatgaaggggtgtttgaatgtgggcccgcaactggtaataagaagattcttgttgggccatcgaatttgggcccaattaattgccctgtaaacagttcaacttatggacaagagtgtaacgtccataagatgaaaaaagggctttggctaatttttttatgcccaagaaacctttttaatggagctgaagcaatttggagaaatagactcttttgagatcaaggccatagatggtcatattggagttcaaactacttctaatgttaatgctaaaaccactctttttaaaaaagaaaacttgacgaatgagcttgttctttgaatgctcgaccctcaaaagttcttcgtcaacatccgggagttgttcgcgattttccctgggacaatcatgggcagaaccaaaatactaatgatggtgactgctcggttaatgatttttactcgggtagtcaaatccacttttaaccagagacggcccatatgatatgtatggatgagtcatataatactacaaatggtgctacctagatagatgacattggctctcatatctcatctcatgctgctacccatgtggaggaggatgtctcacctcttccacaggtgccatgagaggagtagcttagaactgtaaagggttgggacagacctctacagttcgcaaacgaaagtccctggttcgggcgtgctctcttaattacatttttctaaccgaactaaagattgatgctcctccactggtacgtatactgaataaacttcacttttatttcaatttctctgtgcctgttgttagttgtgcagggggtattattttagcctagaaaatcgggtttatgttcgagtgtatcaattattcacacaatcatatctcagggttggtctactccgaccctattgcccacccctggctcctcacctgtgtctatggaccgtcataccttcattctaagaagaaattatggagtgagattatgaaaaatggagatcgatttagcggcctgtggctaattctaggagataccaattttgtgcttaatgagcttgaaagggagggatctagagggcgagattttttcattccgttcatttcaaacctggtgaattctcaaggtctcattaatctccttattcaaggagataaacttacttgggacaaccatagatcggacagtgctcatgttaagtctgctctgaataggggcattgctaataaggattgggtcttactctttccaagcgctctttccagacatgtgactcatatcgtaggccgctttgtttataattttggggacttgaaactagattcaaaaaaaaggtttcaagttcgaagagggatggacttgtgattatagaagcagcctggttgttgcccatgcttgggacattgtgagtttcccttgggccccgacacggttgttcaaaaagttgggggctactcgagttgccctcctccattggaacaagctccagtatggaaagtttgactctactattaaagaactgaaagctaaacttgacagcttgcaaaaacttcccactggtactagagattgggaaatcaagaatgctacaagaaaagcccttaacagggtggttgaaatgaaagctctttattggaagcaattggcccgcatctcttggcttaaagatggcgacaaatgctcaaaaattttcatcctctcaaccaaaattaggggtcaacgtaatgctattgaaagcatacttgataaaaatggtatgtaggtacattcgagggatctgatcggaaaagatcttattgagttctttagtggaatcttcataaaaaaaatatcacggtggttaattgcaactatttaattacgaatcacctatccaatgaggatcaagaaaatctagtaagacccccaaacaacgatgaaattcataaatccttgtttaggatgggaaacaacaaggcgcggggtcctgatggtatttctgcaatttttttcaagcattattggcagacagtgggggacgacttttgtgctgtaattttggatttctttagctcgggttcgatgaaccagggagtcaatgctactaatttggttttgatcccaaagatttgtaacccgactataactcatcattttaggcccatctctctgtgtaatgtgacttataaggttacctctaagatcattgcgaatagaattaaaccccttctccccgacattatatgcccccactcaatcagcttttgtgccagagagagattctggataacaatgtgattgtgcaggaaattatccacacctttaacaaaaaaagagtaagggaggggttttttgccatcaaaattgaccttactaaagcatatgataagctcagctgttagtttgtggatcatgtgatgagattcttaggggtcccggataaattctacaattgggtttcctagtgtataacaactactactctcaatgtctgcctaaacgggccatgtgggtagaatttatccctcttgcggtatttgtcaaggtgatcctctttcaccctacttgttcatatggaccgctgaaatcctttcaagacttatccaagatgccttaaaaatggtagtatcaaagggatcaaacttagccgtggtgggccaaccatttctcatatctttttcccagatgaccttatcttggttggaagggccaccgtaggggaagctagaggtttgtggaatttcctggagaaattttgtgactggtcggggaaacgagtcaataagcttaaaatgactattttcttcagcaagaatacttcgaagatcgtgaaagaggaaattaaattttccctaggaatcggtggtcctgtgggtgtccccaagtatttagggcaacccttgttccgatctagacttaaggatgcaaattttaatttcattgtggagaatctgacgtccaaacttcacgggtgggaagcgaaaactttgtccaagacaagtagggccaccctaattaaatatgtgggcttggcaatgcctgtttatgccatgcaatctaccaagatttctaaccagctgtgcttgagaattgatggtatggtgcgtgattattggtggggatttggaaaaggaaatcgtgggatccatttgagggcttgggacaaactctgcctcccaaaatctcagggcgaccttggatttaggaaaacaaaagagattaatcaagcctttctggctaagtgggggtggaagttgcttacaggatgccagtccttatgttgtaaaattctcgaagccaaatatctgagaggacatgatattctcaagtgtaaggctaaaatttcagattcttggttctggaagagagtggtgaaagcagcagacatccttaggaggggagcctgcaaagtaatcactgatggaaaagacacgaatatttgggaggacccctagatcacccatggcaaagagttctacccacaattgactaataacccatctcataattacactacggtgtctaagcttctaactaagtcaggtaactggcacactaataaacttcatgacctctttaatcttgacacggtcgttgcaatcttgaaggggggtaaacctttgggataggggaaagatgattgggtttggactaaggaaggaaatggtcaattttcgagcaaatcggcctacttaatccaagcgctgcaacggtcccctcattgtgaggttgccccatctctttggaataaattatggaacaacgggattctttaacgccataaagttatgtggtggagtgtcctttcaaatgctctaccagtaagggtagctttactcaaatgatttcatattgctgacaacacatgcccgatttgtggagttgaggaggaatccatggagaacatattccttcattgtaacctggccttccacttgtggcgctcatcaccgtggggcattttcccagttttttgaacagggattcatatgtgggactgggtaaaatttttgtggaacctaaaaagcagagacataaatgtagatgaggttctcctttatgcctccattgtaattgacacgatttggcaagtccagaacgacaaggtacataataaaagaatggataatgtaaatcaatgtattgactctgtttctcactcttatgcagattatagagattctcttatcatcatctctgatctctcctgcagcctggaaacctccccccaacactggctcaaattgaattgcgatgttaaagtaggaggggagcatatgtgtgtcgcagttgttgctagtgttggaaattattttaccaagatcttagatctactcagaagtatgtttattaacacccta

SEQ ID NO: 380460 - DNA, 2250 bp, Cannabis indica
ttttttttttttttgaaggattaattagactattattattattgttgtagtatgaattaatgctacttagaatggtaatcctatcattgtagtatcattaaaatgctctactaggtattatggcaatatttatttcattcaaattgcttgtgtttttaacttttggttgaaaaaaataactttccgtattccataaatgggcaccacttattacttaccaaaatcaaagttactttaataactttccatatttttaaaactcaattcatggatataaatgaagacttattattgggatctcattaaattttattcctctttgactatgagatgatttgtaatattttgaaaagggtaagcctagtagtcaaggtaagaattgatggatttaaattaagaccatctctaatagaagatataaaagttgaactatattttataagaattgctaaaaaatatcagtagtacataacaccttcctacgtgtcaacatcgttattggtctaattaagtatcgagcctcatataatttaatataataacttttaaggagtaagccaatcgtaaaatgacaagtctagaggtgctaggcaccactggtacctaatagcaatgatcatattttgtacaaaaagtaatttcgtgatatttttacatcaatttttactattatactctaatacataattataaatcttgatgcaaaatttaatatattatttaatgctcacttaataatttattaaaaatataaaataataataatgtaaagttaaatttaaaatttaataataataataatgcaagtcatttaatacaaaagagtatattagctaaaatttaataataaaatattaaaaaatggcataatggtaaatataaaagcatagcatttattgtcatgcaaaatttgcatcatgctatattgtgatgcaaattcggatcacttttgattatgtgatatttttgcatcataatttagcacaccattggagtatacttttgacaaactgagctatattttgcatttgcatctctattgtagatgctctaaggagcctaatgaaaagttttctagcaagtctaaatacttgatttaagctttagatcgtgctcctcgttgtgatgttgctactttcctttcgaataaattatggaatagcacgattttaaagtgtcataagattttctagtggagcattctctctaatgcccttccactctgagctcttttggctaaaagaatacagatagaagatacatcctgccctttgtgtggggcaggtgaggaatttatggagcacatgttcctctattgtaactttgcattccaattgtggagatcttctcatggggcattatgccagttatagagtcagatggccgtgtttgggattggattgaatttttttggggtcttaaggccaagggtgtcaatgttcatgaggtgatcttccatgcctcagttgtggtagatacgatacaacatgtccgaaatgataaagtacacaacaataatctgaatagcatcaaacattatattgactcaatcattcattgttatgcagattataactcttatttgtttcctactccgccagttgtcatgtctttcctttggtccccaccctaaaatattggatcaagattaatgtgatgtgaaaaatagaggatgggggctatgtgtgtggcgacattagctagagatccctgtggaacggttttggtgggttgctaataacatgctcaatttctctaatccccttattggcgaagctgtgacatgcttactagccctggaaatattttctttgaagcaccatttttgtgatacttgtgaatgaatctgagatagttgtcaaaattctgaaggagacatgtcctgtttggagtattgataactacgtgcagcaatgtaatagactctgtaatttgttttttgagttgtaacttctcatttatttctagaacttgtaattttgcgatccataatgtggttgattgggtgtttgcacagaatttaactggaattattgaggtatcaacaattctggcgaaccttatttataatgaccataaaatttaacttgttttctttaatgataagcgctatttttttttaaaactaaaaaaaagtaaattaattttttattaggataatgtgaaaaggagttttattttcatcccacaaaattaaagtacactgaatattatttttttttaaaaaaacaacataattaattttaaaaa

SEQ ID NO: 380461 - DNA, 1752 bp, Cannabis indica
atgttagtcgattaacaatgcagtcatagagaatccaggaaacttgagcatcttccaaattatcgtcttgagtatcagccatggctttatggtaggccattatcggcccagattcatttcaggtggtctctaggaattcagtaagcaaaggaagaaaaaaagaaaaaaaaaaatcctttgtactccatggcgctggatgaaatttaaattaaggataagccaaaagttcagttatctaacagcaaccttatctccaaggctaacataggaatagggccaaaaccataacccctttcagcttatatgaagctgaaaatatgtcccagacggccaaaatcaagggggcagatacattgtgaaatatatagtatatatattcctgtatttacatttcccgtaatataaacccttaaaagttttcggattacaattaactaagcaagcttcatacaccaatctgaaagttttattttcactcaacaagaccccatatccgcattcaaccaatcttagtacttctcaggttataaagcagatactcaattccatattcttatcaatcttaattgcatcactatacacaaacttgaaaggacaaaatttaaaccaaatgaagcatgatataagaaaataaaggttcaaaattacatacctatgcgggaaagtggagtacttggtcaaaggaacggagatgatattccttctagcattgacggccgacttctggacagccccgataacctccttggccttaccaacaccaaccccaacttgtccttgcttgtcacccaccaccacaatagccctgaaatgcaattgctttcctcctttgaccaccttggtgacccttctcacctgtacaaccctctcctcaaacccatctctgatcttctctttcttcacttttgaaccaaacccaccaatctttttcaccttggaatccattacatatatatcgtttcccagaacacttaccccactgtaagccgggccgtacagctcctcgtaagctgcggcgatttcatcttctgtttcctcagggccctcgtcgaagggggtggttcaacgaagccttcgggaacttctggggggtcgtaagtgacctcctcttctgggtcgtcactgacgaggaataaggtctcgggttcattggccttggctctgaagtttgcggtggagcgcgaagaagatgaggagaaagaagaaaaggaagaaaatggtctggtggaaatggtggttgtaattgtggtattgggaaggagagaaaagcgcggagaggagtggagagagagagaggatagggaagagagggctgtggaggttgtgcttgccatggccatggtgatgagaattggttgtgaaaagggggaagtagaagttattggcagtgagctttgtcactgatcttatctactgagttgcagcccaataagatggataaacgacattcgtttgaactatcatcactccattccgggttataattaaacaaaattttattctgcaaattatgaagggatttattattagagtaaaatatgtttatgtaagaaagtaaattatattctaattaaataaaattatgctagaaaaaaaaaattaaaacactaaaaaatatcaatataaaaacaataacaataaataatacttaatactatattatcaataatttttttctaaagcaaataaatttatttttgagtaaaatataatatttatacatgtatagtattacaatttagaataaaatta

SEQ ID NO: 380462 - DNA, 1698 bp, Cannabis indica
taaatcagaggaatcaaaaacacgaaagtttgtacaaacttcaaatttcattttagttcacaaaacaatcttgtaagatgttatttgtcaatacttatatgttccgaaatttcatctagaaaatcgttaagaccgataagcagcgcaactcggttgaaagtcatggctttgtaaggtatttgctctaaacttagatgctagattcattgaaagaaaagcaattggtttctggattttgaaccccaagtcctatcaatttcactagcaatgcaataaacaaaaatatactaaattataagctaaacccatgataagttgacataatccaatgagaaaaaagatgagagattaccttaacggtgtcaaagggatgacctatggcgacggtggaaactcctgcgagtaagccggcgacgtactccttgtaagcgggagtgtcccccatctgaagaggctctttctctatatgcgactgagcatcatcactgctatcatcacggtatcctcaccttcctcttccaatatggaagatagaaacacgcctgtttcaattcaataggaatgacttgcaatgcaaatagtaaattagttcatataatagaaaaaatccatggatggttgaaacttgagagtgaagcttgagcaaatgaaaatagagggaaaactcgtaggggtcgaaaattacatttgtctgaaaaataattaagagaaaattatctaagaaatactctctatcaaagtatttttctctgaaatttcgaatactttaattgtaaccgaagagttcaaggccattaaacttactttatagtttgcaccagcggttctgatcgaggcttcggtacaccaggaatcagagaaatacggccataaaccctaatttcaggagcattgcgagaaagaaaatcaggcaaaaacaaaaaatttagtgagtaaaaggataatgaatggttggggtcttcctcttgtatttggttgctgtgaggtgtctagatatgaagaagaagaagaaaagatatggaaatattgtttgttttttttaagaaaaaaagagaaaaactattacagtacaattttttttttttaaaaaaaagttaaatataaaaagtaattaattgttattttcattaagctaaataaaataagagtaatttgcagcataattttttgaagtggcaggtttttgcaataactcctaattctaaaattttagtggtaaaacctcctaaactcgtgttctgttagcagtttaacatttccattcatttttagatgttaactgacctagtggaatatttacgtggacacagtgtacacgtgacacaattttattgattcacataaatgaatatttacaaaaataaaaaataaaaaaatttaatgtttttccttaaaaattaaaaaattttaaattaaaaaaacaaattttaaaaaaataaaaattaaatagactattccattttaaaataactattccagtataacatgaaaaaatttaataattttttatcaatttattatgctttaaattttattgtcattccattttagagtttgttcctataataatatcaagtaataaaaaatgtaaaatgtcattaactcatttgaaaggaacaaggatcgataaatccatatgttatctttatatattcacacacagagacacaccaactcaaatgacataaacataaacat

SEQ ID NO: 380463 - DNA, 2836 bp, Cannabis indica
tgttgctaggaatttcctatcagatttctacgtaattaatcaaaagaaatagctcgactatcacaacaacatatgaacacaaatatttttgatcaggtggccacttgagtccagcttaagtggttggccagttgggattgatatgcaggcgtaagagattgggattgttacactacacttttacttattattttgtttgttatgtgttatacatcatacaattgtacgtagttgtaacagagaattaattatttattttatattgcaatttcgtaacaggaaattttaagtaacctgcctttccacagccttccaccacctcaaaatcacacaaaactcaatattccagtcaattgtactgcttatggtaacataggcacttgcccctcaaatcattccactgcttacaatccatatctagatcaagatcgtccattgtcaccaacatgtccagaatactttcgttggatttatgaagacttaaagccatgggctcaaacaggtgtaacaagagacatggtagagcgagccgaaagtatgggccttgctaactttagactcgtcatagtaaaaggcaaggcctatgtggagtattataggcattcttttcaaactagagatatttttactctgtgggggatcttacagctgttaaggagatacccaggtagagtccctgatttggaccttatgttcaattgtggtgatctaccaatcgttcagtcagcagtatttagtgggcccaatgccccaataccacctccagtgtttaattattgtaaagataatactacacttgacattgtcttcccagattggtctttttggggttggtatgaactttgaaactgtaatttattatttttacaacatattgttacaaaatgattaaatgtgtatgtttatatatgactataaagaatgtattttcttccccttgtaatataggcctgagatagacataaagccatggacaccattgttgaaagaaattaaggaaggtaacaagatgaaaaaatgggtggagagagaaccttatgcttattggaaaggaaactcacatgttactcgcaatagacgagatcttttcaaatgtaaggcttctttattttatgactggaaagctcgtctttatgctcaagtaagtgtttttttatcttattgcaaggattttgctattagagatcatttctataaataaatttgaaatattaaaaataattaatgcattgtttatgtatgtattgacactatataggattggaatcgagcagcaaggcgtggatacaagagatcaaatttagctgaccaatgcactcataggttagtattatatatacactttttaattttattataattttgccaacactttttgttatatataatagattgagaaatgctaatgggtgtgtttagcattatcctacatatcaatatcgctattagtgcaattaaatattaggtcccatatagtttaatataattttaatataataattttttgaaatattgctaaccaatcgcaaagccatacatatagaatgtgctagataatgtccagtagtaatgctgcaatagaatatgtgctatgattgttagaataatcaattgtaattaatgctatttcaggtttaagatttatattgaagggaatgcttggtctgttagtcataaatacattctttcatgcaattcagttacattaactgtaaaaccacgttactatgattttttcgctcgaggcttgattccgaggcaccattattggccgatcaaagttaatgacaagtgtagatcgattaaatatgctgttgactggggcaattttcaccaaaaagaggtaattaatattttattttttccagccatatcatttattaaagttaatatattcagttttttcattttttaattgtctaattaattgtttctgtatttgatgtcatatatacatataggcacaagaaattggagaacaagggagtaaattcattgaagaagagttgaaaatggattatgtgtatgatttcatgcttaatattctaattgaatatgccaaactcttaaaatataagcccactatacccccacgagctactgaactttgttacgagacaatggcttgccaagcagatggcatagcacaagaatttatgatggaatcaatggagaaggctcccacagacactgtcccttgcacaatgccacctccttataatgtttcatctttagcgtcttttcttgagagaaaagatattttaattaaagaagtagagttatgggaaaagaagtatcaagataatcaaaactggaatccatagatttttttttgtttgtaatacatacatatttttttgacatacaaataaaacatgatagatttttattggggagttcatgttgaagtgtattttatgtattagcactaagtccttggctatccattctcaacacttcagccatctcaaacattttgccaaaatagagcgaaatgccaaagtttgtatgaaattacatcaacttcttagttagcatcaaaatggaggatgccaaccaccaacaatggcttttcgctgaagaaatgttgaagttttactatgttaaatggcaaaataattcttaagtacttatgtgtatatttcttctaggatatcattaaatatatgtaataagaaatattcaaaatagtttaataattttttttttcggaaatagaatgggaaatttaccattatattcttaaaatagatttacccattaaaaatatgctatcctattttgcatcatgcaaaatatgtttgcctaggatttttcatccaattttacccctaaa

SEQ ID NO: 380464 - DNA, 1979 bp, Cannabis indica
ttactttcacctatagcttcagactgagtgtgttatacttatatgttattattaatttaaataaaagagtaaacaaaatagtctttgttaagcttgaatttgtgtttacaaacctaatttagagtcttctacaaaaatttgtttgctctgaaaaattagtgtctcactttccatttttgtccttgcatttcatcaatatatagtcattttgttagttccttaattagaaagtgttttggaggagtgcgattcttatatcattcttgtgaaacaatattggagccacagccgtagaaggccataatagaattggggtttccatgttgagaagaaacaatattcactaattttatgttggcagcaaaaggaaccgatctcactctcagcttggagttgctaaggaacaagaacaaataggcaacattttgtttcttttgtttattagaagtattgtctcacatgaattaaatataaaagtattgagtcaaatataagaacatatgttactctactcatcactaattgattttgagatgaaacccttcctgacagttaacttaatctattttgaatttttttttctcctttttatttttttctttcaatgctaattagtttatatttttatatatgcctcaatactttttatatttaaatgtgggacaatgttctctaatattaaggtcaatgttgaatgatttcgaaagttcaatgacaatttcaatcaatgtgctagttaagaaaactttatttatttattatcatgattaattggtaaaaaaattaaagaacattgaatgatcttcactacgtcatatacatatatctacgttttcatgccattttattgactcgggaaagacatgttttcaacccaaaaaagaaatttattagtgccgtcctacaaatacttccaaagtacaattttacaatttcttagtgcaatcacatatgtgagtaattgtgtttactcaagaaaaatccaattaaaaaaaagttagtgaatacttagtgccctattaaaccccaattaaaaaactacaccacttatctaccaagtagctaaaaaacactaaaaagtgatcaaagacattcggctacacatttgagagcaaacaatgtcaaagacataacagaccaaccaaccaaccaaacaaacaaacacataaacaaatataaagattgaaatgggcaatgatgaagatgtttgattaatagattcaataattagtggttccatccatgcttccattaatttaactatgcctacatatatataaataactcccctgattaattataatatatataggtgaccaccgctatgtacgtcatcacaaccaaattcatcttattattttctctcccactatctttccacgttccatgtgaaggaaacttcaagtttttcataattaataatggatggattaacattaggtaataatatatatttctacaacttatatttgagttaatatatataatatacactaatcgggtgtccttgatggtacaaagtatatttatatatgtatgtacaatatacaattttatttttttggccgatgaaaatggtcctctaccgacgtgggatccagtggattatgtttaacgtgattttctccaataaagtttcatagagaaacctatccaaaagtttatcattatatattagttcaccaaaactataattttagtattttttttaaaaataaataataaaagtttcttcttaactatctgtcttgtttgttaatactaagaagtcggcaatctttattgccttggtgtttgcttgcggtgtgaggtgtcttgggaagacagaaaggaaaatattaccactttttttcttctaataaataaataatacatatcaaatgacacatatgaattcagtactgattttaatttgatttataatttatataataaaaaagagaaaaaatctcaacaagggaagtgatcatgatcaaggg

SEQ ID NO: 380465 - DNA, 3511 bp, Cannabis indica
tctagttcgagtaatgtgtacatacacaaagaagttgcattcttgcgactggcatgagtagaacttccgtcctctgttatttgctgtattggcagtccgcaaagcacatggtgctccgcaaatatcacatgagattgtggattcatctgcacaagatgaagttcattatagtgaaaccatatatggaaacaaaatgtaaactgaaatcatcaaatgtatattagaaaccaacatttgaaatggtgcattaacttgtccatttcctaaaattgagttttaatgctttaagattaacggtgagtgtcccagtattaaggctaggaaagtaggcttgctgatatgataatttatgcagccataactaattgcgtaatagtactaaaaaatagaaaaagatatatgagaatggaaagagacggcaggtatgaagtaacatacaagacttcgaaagaacaaggcaacagaggcatgtgaaaaatttcgagcatgtcagaaagagatacacgggaaagcaaaacaattcacccattctttcaacaaaaaatgttacttcataacaactgcatctctacattttaaggaacatcgaaaatattaaggaaacaaaagaatctactacctcaacaagtaaacataaattacaaattacaattttataaaaattattagatacatgcaatcttgcaaagacagattctctacgtgagcatgaatattctgtacagtggctggactgggtgtgaaaggttttttattattattagacactcaccactctgctgcacgttccttccacgtgatctagccccttgatgacctgaaaactgggaagggcaatcagttgaagaatgcccaccctgatgacagtatatgcaagcaccttgtcgactattactttgttgggcactgcctgatgatgcagtgggtactcgccctcttgctgaagataatattaaactaatgatcatattagattggtttcaaatttcttccatagtgacaagtcatttcagataagaatgtggagaatgtgggtgtgtgtgtctttgtttagggtatttttgtgttatttacttgggttttaaactcactccaaggtataatgcccaaaacatttgcaaggaatttgtcaggtgagtagatatcgtttttgtataataaatgaatgattcaatctatgatcctcaaatactgacctccactctattcactagttatgtaaaatattatatggaagtctacatacataattatatgcatgcacatattgttgaaaaagcaataaaactacattgtgattatttgtacagcttctagaaactcaaatgagattgtctcagaccttctggttaccttttctgttacagttttattttcctattaccttgtacatgtctcctatattttgttcaattccaaggtcaattccattaaagaagaaattggtttcattgtgtgacaccaaaagtgtagatattttataggtgtgccaattataattgataatatcaaaccttgtaatgtatatctcaagattgtgaatagatacaacactcaacgaaattactagtgtatcattgcgtactagttcagaatggaaataaatctatattatttgacatggcgagatgaattatctggacagctaattgagtttaagtatatagcttaaagactcctacattgtgaatgaagaacccctagagatgtagtataaaatatctctggtctctctctgaacttccctgtaggttttgcagagaaaagagagggccgagatcagatctacagaattgctgccccctgaaatgggaatagccttactgtggatatcttctactgatgagaaagatcaaagctagcataataaagacctcaaaaagaaatggcatggcatacatcttcaattcgagaatctatcccctttctcagaagtgatataagaacatcaatattaaacaaattctgatttggttggatgctttatttatatatattttttcatgtatacacaacaaaatattgcagagacgacgaataattcggaataaattagataacgaagaaaagtaactataatgataggtatatcaagttaaatactattgtgcagagatttctcaggaactaacacacaactacacaagtgtacaaattattgttgcacatattatgttatcaaaataagaaaactacttttcttcatgtagagtccaattgaaaaattcagaattccatttaaaacacaaaaattagagcttgagaattttgcatcatgtgtgtcttagtgaaatatgttcacaaactaactaaaaaataaaacaaacctgacgtccggttaccggttccacaaatttcaattaactgtttaagaatctcatcacagcctccaatgcaacctaatttatgtcaagaaatgcagggttcaacttggtcaaataaggctgtctttaaaaaaaaaagtattctttactactatgcaataatgtcaacacattaatagttaatgaatggtatcaatataaaattcgtccaaatacagccaccatagtattcctataatttgtacatacccaaatggctagcattgtagtcaggaggaatttccagccggcgaaacttaaactgaatcaagtaaactggacctattgaaacaaaaattgatatgattaaggaataaatgagatttcaaatagtaaccacataccaaactagaaaatagtgagagtaaatgctttctagaaccatgctataaacaataatcatatagggggtatcaaaaatcaacacaattatggtgttttaatcttgttttttcgttcatgttagtactatttgtagttatagcaaacctcctgtaagttttcatcctttatggcgtccaaaacaaagttcaaacagcttcttgcactcgtgctcttcatttatttattgttttgaattctgtttttagccgggtaaactattcacaatttttcggaaacttacaagagggttactataactacaatgaacactaattaaaacaaatttggattaagacaccatatttctcaattatatatcgatacattattttattttgtcagctgaaaccttacaatctttgggaggtaagggccgctggaactttacagcccatgggttggaaaaatcaccccagtgcaaaatattgatagggcaggaaataagatgtactaacccggaatttgttgatgaacacttctaagtatatgcgtattttaattacttccaaatgacttctattaacagttgattataattcaaatatcataccaatagaaaaaataaaaaatataccaataaatcattgaactttgccattactcacaggggatactatacacagtttccacattttaaagtatacatcaaaggatgaaaatcagattaagacaagaaacaaaaaacctaaaattaggcattcccatttggactgtagaaaatagtgattcgaattgtgcgttgatttcatagaataatacatatt

SEQ ID NO: 380466 - DNA, 4524 bp, Cannabis indica
gtatgctattttattattgtactcttcttattttattgatgattttgttatttgtatattatttgattttttctatgtaatttttatttgcttcttatgttttattaaataacgtacaaatagtaaaataaaaaaaaaaaaacctaaagtataaatatttactaaaaatttacgcaattttcctatattattttatatatgtaaccaactgttattatttttatttagtataaatgtgtaaactataataataataataataataataataataataataataatacaaatttcattaacttacaatcatctgaaacaataaaaaaaaatacaataagtaaagtctccctcctatatatatgaacagcctctaatagagaagtctgcgccaatgtatacacaactttattagcagattgttttacaaactgaaaagaaattgaacacaaaccaacaaccaaagacttacaagttacaatccatcatgagaacacaaccataaggagaagctatatttttacaattatttaaatcactaataactgtaagactatcagatatatctataatttttaattagggtgtatatcaacactaataaatgcataaaaagaatcaagttttccattatatttggtcatatgagtaaccagtaccaccgtacgtagagtgagaataagagaaccaagtggaaagcaaaaaactaattatatattatataaatatttaaataaatatatatcttataaaaaaaattgtttattatatatatttatgtgcaaattgcagttccaaaacgtaaagtctgaatttctttttgatagaagtgttagcttattttgaggagtgaaaattaaataacattgaaaaagtccacttataaaataacagtattagtaatatccaaaaaataagaatgagtagttcttgttggaaattaattgattagtcgttgatgcacatgatagataagacttttaacggtttatattattttgttaggagaagattatttgcaaacttggttttcttttcttcctttctttctaattgatataatttataagctagttgggagttcatattataaaaattatactatgccgccatattagtgtgaaaggtgaacaaattagaacatagtaaccactaaacaatgggaaatttataatttctatgttatattatatatataacatatatgacttcttcccccattcttctattttctaattttaagaatctttggaaagagcatggaaacaaaaatatagcataccagcggacacaaagatagaataaatatgagcatattgttattggacacccaaaacattcccgcttcaaacctctatctcatacctacacagtctcaaaatggtattatagcaccaaaaataccaacacattttaaatgtgtcaccttataattggttagcgataattaattacaccaatgataagagtcgtaaataccacatgtcacttttgacatttctcaatatatatatatatatatttatataaatatataaatatatccaccagcaaatgacgactatggatataaaacttacaaaatttgaagtcaaacaattccaatttataattgtcaaagaaagtattgtttccgtacaatgttgtaatcatatcatagggtaaagtaaggtctatctattcaaataaacaacacaatctttaaacatattagcacaaaaaatacgcctaataatactatattatattaccggaaatataaaatacagctcaactctccacaacaataataaaagaatgcgttgctaaactctctctctctatacactaccaaaaaaaaaaaaattacaacgaaaagaccgctatgagtaacattagctgtccaggacttctaaaaaataataacacaacaaattaactgccttttttatgaaggactagagaaaaagttacaaagatttaataatcatgaacacagcacaaccattgaaacgcccattcagcactttatgcagctacttggatcggcacatttgatctaaacccacgtccccttccccgggttcccctactgaggcctcgacctacaaagaaatttagtaacaattcagaagtgggcacacaatgaagaacttttgcttcaaatgaactacatatcccaatccctcccatagtcacatgttctaaaattcagaacaagatgacaagaaagatatgggtctaatgtgctgaaaaataagtttagcagaatatatctaaagacaagcctagaatatgatgactgatatataagccaaactaccagtttatgagaaaaatatacagcacttgtacataccacgaccttggacagggccttcttgattgtaatctccatcttgctgtgtatcaacataagttccattataccctacccttccacggccacggaaacttcttcctctccctcgacctctgaaccctctacctcttgaattgttccgactcaagtcccaactgccatcttcataatcaacggaagcaaagccattccctgaaacaaaatacaactgctacatcaaaaatattatcattttgcagcccccaagatcaaccaaattgaatcttatattctgttaaagatcaacaagataaaccatgacaacaggtgcagaaagaaataaccactgaaacaaaggctaaatgaatccaccaatttacatcatacttggtacaacaggaacaaattatgctagcagtacaaccagcaattatattatagaagcatggtagatacatacctctggcctttgaccgtcctcgatagttgcgaccacgacctcgaccacttggtgagccctctgcagcacaagatattcaatttatttgaaatggtaaaataattgcactgaacaaaaaaataaagataaatgatctttacctccatcgtaatcaaattctgttgatggcttcacctggtcagcaggtatgggaggctggtacctgtaggcaaaaatagttcacgaatactaacagaccacaagtaaacatatttatacatatatatatatatataaaggaaataataataatgtacgatgttcctacaaggtcattaacctcataaagaacccattatgtactcacccaattaaagtactgttcaactccttctttgagagggtgattaaaatcatggaaacatgtcttgtcgtctccaaactgtgaggttaaggggagaagataactaagactcaagtaacaatgacaattaaaaccatcaaagagtaaattattatctaacaagagacagtgccaagctgtaataaaataacagtcacgatagtttaagatgcgtccttacggcaagaggccttcctctaagggctcccatgtatcagtaatgtctgtggatccaattgacgtattttggtgaagaccaacaactcttctctggaattaataacaaaccatttttcaggctcagagtgatgccgaacaagtttaaacaatccatctgacaatatacaaacaggaaacaggaatcaaaccttaattaactccactatggtcactgtcttgttgatagctcttcccattgccttaaaaacaatttcatcggatcctttttcctacatattaatatgtaaagagtaagaccaaaaaaaaactaaagatattgcattatattcaatatacaccaactctacacttccgcactcttagcagccaaaattagtatatcaatatttataaaatcaagcaaccagcacggccatagaaacgagttagatcccgttaagcgatcaagagcacaattttctcccatgagttctgtttgaatcctaagtgacccaacgttaaaactacaaaatgtatcatattcaatcctctcacttcgaatttagtatcaaattacacaactaaacatttcaaaaattatgttaatagccttttatcaaattttggccgttagacataacatactatactgcataattaattgttcaaacaagccttattaatttctcctttaagggttcaacactaccttcctaaaacccaaacttataaacccctgaactagaaacctggttacttaatgagatagtagcattgtgtcattaacacgcaaatacattaaaagtaaaagaaaaagaaacacaatataatcaattaattaaaaataatttatataataattaggaaaagcaagaaacacctggagtagagtgatggcgtaagtgatatagttgcgcatcctcccctgactcgtaatcctaatctcattttcatcaattggcttctcagcttttggcttctctactctctggtaccgatccatcttcaccgccaccaaccaaataaataaaaaaaaaaaaaccatattagcaccatgcaatcaagaaaagaaaaataaaaaaactagccctgaagtagaggagggtgcagagtgtaggaatttggtggaagaagaggcagagtgataaaattagggtttagtcagacgaggaggtcgacaggtttaccgttggtgttggaaaggga

SEQ ID NO: 380467 - DNA, 8444 bp, Cannabis indica
aaggaactgttaaagtaatgaacaaaggcaaacccctgcagcattatgattttgtcatcaaagtttatctttgtaacttacgagcacatgcacgcactatagagttcacataatctgattttcttgcgaagaccttgcccggaatgtcattataacacatatttggctgactacgaattgattttatatccgtctgcatacaacagaaaagggtgtaaaattacaatgttttaggcataaaaagagtttaagaaactgaataataaaggcagccccgtgacctgggtaaatggacggtaaggatttggaaagtagcaggcaaggacagcaacagctgcttctctgtatgccaaccttaattttagatcctctgggatttcagtattatcttcctgacctgtttcaaatgtgcccttttgctgcaaaaaagattagacaaaaacaaaacagaaatgacaatatcaggaaacagctacacagaagttttagaaggcatgaggtagcccaggtaggtgatatgttcttggaaggcactactaacccttttcaaagcttctagcagctcatctcgaccaatgaaatctaaatctttccttgcagtcaaaattccagcttcattactgttattagaatgattagcataagcctttttaactattgatgcggaacagataagaaaaaaaaatttggattaagcatttacagtatgttctgcagttctgccccagtaaaatcttcagtaagctctgctatttcctgaaggagaacatccttctcctcctcagaacggaaatatttatttctagcgtgcacctgccatgctcaaagtattaattacaaaactaaaatggtatctataccaacaatgctgccaacaaaagaaagataaaatggggaagggggaaagcgtaaaaagaaaaagggaaggagaagtaaaccttcaaaatagccaatctaccatccttagatggcaaaccaactcttatgatcttgtcaaaacgaccctttcgcagaagtgcaggatcaagaatatccagtctatttgtggcacctattaccagtacctaacaaacccaaattgaacaatcaaaaccagttaactccattaaagccaagcagaatttgaatataaacctgtgaggtagaaactttaaatccatccatctctgtcaatatctgaagtagaccttgttccctttctgcaccaccctatacaataatcaatcacaattttagatagcattatacaaagtaagagctataattgttttccacatggtatgtttacagagtaaatatggttttgcagccagtacctcatcaactttgaactatatcacactaaatgaagcttttcaagtaccaagttagaacttggagataaatctcaaggtgatcctttaaaacatatttatgcacattttaatcttgtcatttaaagctttggaagctctatttacttatttattatttttgaaaagaaactgaactttgtcaggctctaaatagattctataaatccaataatttcataaaaccaccactacccttacctaccttaccactagttgtacaacataattgctgttacaatgttcctgaacaaccttaaaaaccaatttttttaaagtaaaataaaggtacctattgatatattgatattagagtaataaagagaacaagtttgttgggcattcgagagacccagctctctcccaagagctaatgctcactttaaccgaataattctctccccaaaacccctctataactctcatatatatactatctcaatactccccattacaatgaccaatgtaccctttttatttatcctaaggcctaacaataccggccatccaaacttgaccttgtcctcaaggtgaagaacaacaagctaccacaacagtgtttgtccaaaccaaccatttgcgagaaagcattggaatgagaattcgggccatcgccctctatcaaaaatccagcaagtagctgtgaaactacccgcctggtcgtagcacgaatctgaaactataacttgtgctcgtcctctatcaaagaaccaagccagcaagtgcattcggtgagccacagccatgacatgcccatatagaatgctattgaagatgtgtaacacccactcacgatatgaagctgaaaatgatcatttgtcacaaacccaaaagcaaccagccatccgaaactacaatgaagaacgagagattccagtcattgcacatgaaacaagaattcctagtgctaaaatgtaagttgaagcaagttgcaattccttggctctttcaaatactcctaggccaagagttcacaataatatttctttgtgtggcagaaatccaatccaatgaacacagtgaaagttggaatacttatgtcatcaaaatacaatgtgccctggtagttgtgtctatcaagagcaaagggttcacaacaatatttccttcttcttctaatcgcacgaagcttcttttagagctgcgacttgtcgattgcgactcacaaccaccagcgacggagcaaagggtggggatcgccgtgagggtggacgaagggatgcatacttggccaaaattaattgacaaagagttggggaagccattttctcgccggatttctgtattcgattgatcatcatgtctaacagtttcacgatgggaccaatcgtagcctcaagaactgatttcatcagttccagagcttgctgaaactccgatcgaatttttgtcacaccttgccccatagaccaacgtgctttgataccacatgataggaatttttctatcaatttggtatgaataaaagcaaaatagagagaatggagcccaacaacgattaagcaactgatatattgatgttagagtaataaagataataagtttgctgggtattcaagagacccagctctctcccaagagctaatgctcactctaaccaaataattctctccccaaaacccctctaaaactctcatatatactatctctatacctccccattacaatgaccaatgtaccctttctatttatcctaaggcctaacatttacttaattcaaaaacaaaaaattcaacactccaacaaacacttgtatgttcaacacttgcccattggacacatttttttttcctcctgatgcacttatcctccagttgaactgatggaagcgagaaactctagttaattgctaggtgagtttcaggagggaataaccattcaacccaactctcacgattccttttgactttcagatagaaaagtctaattttcaatgaatctaacagatcatccaaggacctacttatacaataacaataaaaatataaataaaccttgcattccatgcatgtatctcgccctgtgcattacatacctgtctcgcaacataagtttaaaggatcaccaaccaaaggttcaactatgctcataaggcatacaagagatgtatcaaaaacctcttacaacatgcaacacaaaatgaaactcgagccacccgaataaattccacttctattttaatttgcatagaaattataaacataaaataaatacaagaaagaaataacaaaccaatacaagtttctttaggttatttaaattttgtgaggtggagtaaaccaacagaaagatggggcattaaagaatatggtttgaggaaagaatggtatgtattaacctaccccaccaatgtcaggcccaccacgtttgctaccaatggcatcaatctcatcaataaatataattgatggtgcatatgatctagcactagcaaaaagatccttgacacgagaagctgccacacctacaaacatctggagaaattaaagcgttaagaagtttgctttaaattctacaatgtccaaatagtaaaaggtcacttgtcttagactgatcttcactcaaaatatattaagaacctcaattatggcagaggaaaactgtagtgacacgaaaataaattaaaataacaataaatatcacgaaggaccttgtaattttattttttgttacagaaaaaaccccaaatttaatatattcatcaaatctatgactggcagtgacttatcaaaattgcaaaaaggcaaaatagggcttagtaaaaaaatgtttcaaatatatgcaatttgaaggcaatgtttcttccccctttggaaaattgctttgttccttatatgaaactcgcatgaaactccttatatggataaacattttgttatatatcccagaaaaagtgcataagtatcatgtttcatgctattttaataatataaactttaattaataatataagttgatcaggcctaacctctacaaaatcagtgccatttgccgcaaaaaaaggaagtcctgcttcaccagcaatagctttcgctagcagtgttttaccagttccaggaggaccatgaagaagcacaccttttgggcagtagatgcccttatcttgaaattcttcatcatcctttaaaattctaacaatttcctgaagttccctctttatgtattcctgaccagcaaaatcatcgaaggtgataccagtagattcttctgctgatataaattttgccctggattgaaagcaaaaataaaattatctgagctaccaactttatctcaaattcatctcttttcaaaataaataaataacgttctttttccagaatacgatgatgatctaccattgccaagaaagaacatacaagaaacatttaaaagtaagagttaataacaaaatgtaaggctctggttgaaataattaacatcaaactgattgctccatatgattctgataagaaattatttccatagacaatacaatttatatttcatctttagttttgtacaccattggtaacttacgaacctagttgtaatttgaaacagatagagaagcaaggtactatattttgctaatctagcataaatacataagaactaaaaaaaatacagtttaagcttaaattcagaagccactccaccagcctaagtacactcttaatagacacatttttttttccctctaaaatagcctcaaagaaatgttttgcctggcgaaccatgaaagggccaaatacaaaatgaaaatttgatacataaacttgccattagaaaatttaacatttatatttttttgatatgtaattttgcatattcctaataccaataatgcttattgttttttaaactaggctctccgcctaacctacaatatttggagagtaagaaactataacaattgttgtgtgggtacccaagaaggacttgaacgtcaaactttgtggaagcaaatcacccatttgagctacccttcttggtcatcccttagatatcaagttgcaacaacaagcaaatttaaactatgtcgccacccacaaattatagaaacagccatccgaaataaaaatagaagaagaaaatacttgtaaaaagaataaagagtatttttccaacaactactgctcgagaaagtcaaaaacatgccaatggaaaatcatcctccacttaccgactttttcctaatgatccaagtgcacggcgcttaaggggttgcctaatttttttgcctggttttcctagatcactaggaatcaactttgcatatattggtcttgtcaagttatcaatccaaatatataaaccaatagaaagggcaagccgcatagaccaaatgactgcagttgcaacagtggtgtatacttctgcaggtactgtgtccacattataaacatcaacatttactatctgctggtgcaacttctgccaaacttcattccagcaatcaataggcatgcggtcaactacatgacgcctaaaaacaatttccttattcgaagttacctcagattctcctgttttctcatctttgtaataaggtagaatcactgtagaaataagggaactaactttcagagcaatattctatggcaaagttgacacccaaatgaaatgagcagatcaaacgtcttacctgatattgtttgaccataatttgaatactccataaattgcacgttatttgagttaagaagcctccaaaaatcactaaagtcaatcctgtgtgagatttcaggatcccactcagttcctttcaactttccgcgcatagtcaacaagactctactccaataagaagccatcacaagttgcctttccaactgtacatttgctttgcgatcaagttcttccaattcatcaatccgttgtctttcaagatcctttaatttctgtgaaagaaaattcaattcaacaatgaactaattacaaaaatggcataaaattttaatgaacagacaagaattattttcagcaagtttatgtaaaatatatatatctaatgaaaaaggatgaaaagatgggcttagaaaacaagttataagaaagttttagtatcctgtcactaagattgacaactgaagcgaaaaatgtaaggaatgaatagaacagggataactaaattggagtgaatgccaaaacattattctttgacttctttgataatgtaagaggctaacacattgtaaatgtacagctcacatagacagggagaactctagaagcaaaactcataattcaatcactacaaagcagtggacaaggaatcatcaaaagataagtgtcatgtcaataagattgctcccatattagataatgtcaaactttataatgttaaatgcttcacaagaacacaagtaaatctgaaaagaaaaatgtcacattgagtaattataatcctccaaaactcattcagaacataaaaagacagcactccgtacaaccaccccacccttccattggaatttattggagaataaacagtttaaatgaatccaactccgaacattataaactttcaaattcaatcaccccttctaacaagttcatgtaaaacagttttcatctttacaacaaccgattattatttcgtttaccttatttaccaacctaccaccatatcccaagccccaaaagtcatctcaggagacataaccgatttcactttgttttacaataacaatttccatacataatttcatttgaaaattcgaaaaaacattttaccagcaacacggcacattagtatatatacccagctaaatatgtcactgcactgataaaaacgacaataatttatccctaactgatgatattatctacaattaaaaaagaaagaaacctcgaatagctgagcagactcaacgtcttcctcggcgttcgcgggcactacagccgagttcgaactcgaaacagaagctttacaggcgcgaattctgagcttcgttgggttgagaaacttagcaatgtcaccataggcctgaaacttagctcccaaacaacgtttaggacgtattcgataaaatgccggaaaggaattaagaggggttttagaggggtataacaagcagtttggtggttgaattatatcacttctcgttaatggttgggaattcattttccaccattaaaggacgctgttgttgtggttgtgaaagtatttttcttgctcttttctactgtttttcctttccggtgtggaaataatgggaggagccggaaaatattatccagcatctattatatcccttttttttggaacactattacaattatgccgttttcaaagagaacaaaaatgtgggttttggaaacaaattttaaaatttctaaatacttcccctaacttcaatgttttacattcttttactttttctttttcactttaaccttatgtatgtttacaagttacattttagtggggaagtcggaagaaggtagccgtattggaaggtgcggctggctcacctctttttaagagaaagttaatgtttgttaggtattttagtttgacattgcttcacactcaaaaaaaacaagttaggtctgagttaaatttggatatggaagttttctttcattcctcgacggtttagtaagattaagctcacgaacttattatccaaggtcctttttttttctgctttaaccttatgtttagaaattatattttagtttttataagaggctttcttaagaaagaaaaattaattattttgtggtcataaatatagtaatgtagtttagtagtttcacatttcttttaaggaggtcttaaattcaaatctccgtcccctaatgtgaaaaaagatatattatatggaaaaattttaaaaaaaaaaaaacgttaaaagtatgagaaaaatagtataagataacacttgattcaataagttttttcatgccaaacatgaaaaattaattcttttttaattctgagcacttttatttttttttgcatttgctttatctttttcttctttcactgagactattttcaatgcaaaatgtaaaatttgtgctaaatttggcacaaaaattgagtttgtattatattttagcctactatttacaattgtgctccaatgtaaagatgtaaaa

SEQ ID NO: 380468 - DNA, 1913 bp, Cannabis indica
aaaaagaaaacccttaactagctttaataaacatacaaattagccaaaaagaaagaagaaaaatatattaattgatcaagaacattatgccttaatctcaaaccttgtacactttatagaccccatagaaatgtcaatctcaataagattttcctcttcattcatctcattaatatctcctaaaagatccataagaccttgttttgactccaatttttgttttgactcattttcttctacttcttttaggtcacttgaatctctttctggcaagttaatctcaataagattatcataatcttcttcaccataatcatcttcatctgagaaagaagaatctgagattgaaaaatcttgttctacattagttgaagaagaagaagtacaaatccaattgagctcaaaactttgacttttttctgagtcaacactactcccttcactttcttcttcataatggatttgaccattttctgatattgactctaaacttggctcataaaaatcacacctttttagcttctcaaactcttccactacttgggtttttgttattacctctttttctagtgaaatcccacttgggttttcatctaaagtgatcatgatttttttggtcatgaagaaaatagttgagagaatcaaaattggaaaggttatgaggattggagttattattagtccaaaccctagaaaccaagctaaacatagtgaaggaaaaaggactagtattagatatagtattgagttaaagaagtgattttttggtgttttctccataagaaagaaataaagattggatttttagtatagaagaaggtgtaaaggtttgatctttaagtgtgagccaaaaagagactttttttgtagcacaaaaaaggtctaacctttacctttttatttttgtgagttttgttgatccaagattaccaatgaagaagtctctgcaaaaagatttcatacaaaatgaaaatcatgaaattaaattagaaaaaaaaaagataaaaacttgtggatttaggtgatgaacttacattgattgaaatgagacttttgaaaagggtcctttttttttttcttgtgttttctcagcttccaaacactttgttcttatctgcaagtgatgattctcttgagaaaagcaaaggtcttgtttcccattaatatcaattgttttctatcaaaacctcaaaggctttggaattggctaaatccatgtgcaccacatcttgctccccacatggccttttttatttaatttttcttttaaaacaaacaaaacccaattacacaaatcttctcactatttatatgtatactcaaaatgagaattttaattaattaaaaaacaaaaaaaagtaaaaaaaagagacccttttattttcttttcaagcttaattaaaaactcttatcaaaaaccaaactttgtgaatagtgaaaaagtagacacaatatggttgtcaatgaattattactgcacctgcaatttgtcagctaccaaataaaagaaaaaaacacagtacttactaatcataatgacccatttcctattgtccataaatatatttttctcaaacaaatttaaataaaattttaaaaaaaattattttggtatctctcatttgttttcccatttataaaaattttagttcattttttatataaatgtgtaatttatatttatttaagattattagtaaattttatttttttataaatattttacagtgttaaaataaaatttaaaagattacttaatatatgtataaaaaaaaatagtctcacacgtaataaaatatttattaattattttaaattttttaaaatttacaattaattttaaaaaattataacatgcctgattctaaaataaaggagaattactttatatgttatttttttaattttttttt

SEQ ID NO: 380469 - DNA, 3249 bp, Cannabis indica
ccaaacttcaagaccgtaactgcaatagaattaatcaggtttcatccttttagaaaagacattatctctcactcgtatattgcacagatggccaatgttgttacttcaatgaaaaaacttaccggaggcctggctttgatcaaagacacaatgcattcccacgaatgagtatggaggttcaacaccccgaaatcgtgggcgatcactatcactagcagttgagctaaaactgtttctgtgacttgaagctggtttgccactttgcatgtcctgtacacaaccgaaatcatgaacttaatgggctggttcttattgatactcttccaaccaatttacatacatattgcataaaagaagtttccatacccttacagaactccagctctccgcttcatacaacagggatagtggacttggaggtatccatcgcccgctgatttatcaaccagaaaattaatccaacatcagaattgcatagaaacatgatttaagatgtcactcacaaattaagtagtctcattttagatagaagctctaaattattctcctttcatgattgagcaatatagataaacataatcaaaggcaccaaatgcacaccactttaaaccttacactaatagagagaggtttttcttttttcgggtaagacgcaagttcaaatcaaaagcaggtaacattttcccaagttcacatttacacaaaatcaaataagtttgcaaacactagaaaaccagtcaaccaatcccattatagccgcaatcccaacaatggaaaacaaggaaagggattctcaatatcaaactgtaaacagcagatgattataataatcaaagtagtcatctaaagtaaatttttagcaacctgttccctggtgtgctattgaggcttggttgatgcatattttcccaattccttggtctgcgaatgtaatttcggtaagccacataaccttttccattgcatctccaatccttcacaaatcagtgtaaaaaaagtgacaacataaaccatcaatgaaataagcaaacccaaaatggaagaataagcaagctcataaataaatcaactgttcatataatttaaattgaagaagtcatccattaaaagtcaattgcatcccaaggagtaaatatagtgaatcaaagtggtcaccatctcatactatgctccaaacttcagtatttcgacataacattgtgaaaaaaaaaaagaaaaataagagaatcaatttgattcgttagtttcgcctccgtaattcaaaattcatatagaacacttaaaacttcacaaaattatcaaaaacaaaatcggttgaatctaatttcaaatttcatcaaaatttcttgcttcaacaatcataaatgagaccaagtcttttacaatcaaatttcataaatggcaccacaacttgcttatcaaacttctaccgcctcaaattccttggaaatcttcagatcacgttgaattttcatcaatttgaaacaaggcgtgaaaaaatgaagcttactctacggcgaagaacaccggactcggccttacgatggagaaggaagcgacggattccgatgtagttaagatcggcatcggaagtagttggctgaagcaagcagctgaaaaattcgggatctacattctccttggccacttgtaccggatcactctggtccgccattatcaaaggcttaagtggcgaatgaatccacccattcagagatcagaacattccttcaattcaaacacagttgaatttgaatcaatggcgaattgaagtcggtatggggaatctgacaattggagaggacccgagatttgatgaattatatggcgtggaccggtgtagtgagcggaggtgagggcgtgtttggatggcgagaaaatcgtgaaagaaaattgtattgtcctttttaactcacaattcacaaatgtaatgcaatgaaattgaataagcgccaaaattgtattaaaaaaaaatgtttggcagttgaaacttcaaacttcaaacccaaaatgttcatctctttatacttttttgaatttttttagccacaaattattggatttaaggatatttatctagttttattttattatattaattttatgattgttcatgtactaatttacgttctttaaactttgatatctactaaattatacccctcgaattttgacatgtatcaaatcaaacctcttgaattttcatctaggttagactttcattattaaaattaaaaaaaaaagtccttaaatctagaaataaaaatttataccacggggatgggtaactgcggggacccgtctataatggtgtgaggattctccgtcttagcgggcggtggtgggaaacaatttcaatacctgaagtggggacgggggaggatcaggagtaatattatccgtaccatatttgatcccgatatagatatttatagtttcattttattttgaaggtatataatatagagtgattctacaatgcacccccttaagggaggtataataatgcaccctctacttgtttcggcattcaaaaaaaaaaattagtctaatttttttttcatattcatgtacattataagtatttaagatattttacaaaattttgaaatattcggaataatttacaatatttactaatatagaaaacaatgcttaaacagtctattttacacatgtatacaataaaatagtcacgcgtgcaacacactgtttgaacgcaattttccgcgtgttaaaactttttcaaatttcttaaaattttgcaggatgtcttaaataactataatttacatgatcatgagacaaatttgactaaaaaataatttcagatactaaaatggatagagatatatcggtgcatcccttttaaagagtacattataaaatttttctataatttatacatatcataaataattaaaattattttgattatcatccataatcatatcatatgcttaaatcatgaaaatctaatgacgataataaactaatgatcattgtagattacaagtgtaaatatattttattctcgattcttagtttcatctttatttattttttaatttgttgggagacttgagaagtatgagactatgatactatacttaagttttttttttcaaactttgagacatgtttattttttatcttttattggactatgtttttttttttttttaacttatgaggcagatttattttttattttctatagattatgaaggtataataaatatttgcgaa

SEQ ID NO: 380470 - DNA, 2676 bp, Cannabis indica
atcgagtaagtttgaaagcatattatcatagcgaattacagttatttaagcgatccaccaggtagctagtttccagcataacataatgtagtgactgtaaattataaaaagaaaaaaatcataaattaacccaaaaaatatttattaattagtataatgaccgtacgaagcgcgattatactttctagtttaaaaatatatataatgatatttgtagaaataatacaaatttaatgacagtttgaaaatacttttatatatttgtaagagtaatttgcagcgaaaatacttaagcttaactcgcgattgtagataaatacgtattttaattttgttttcatatttttttaaatcatatatctatattattttcttctaagaaaattttatataatttttaattttaatttttttgacataatttttaaaatattaatttatttttgtttgataggttaatttgtaagaatatgtattagaagaaaaaaattagaaaacttaatgaataatataaattttgtaaaaaaataaaaattattaaaatagagtgtctttataaatttttgggtgtaaataacatcaccttaaaatttcattctttctcaaaaaataaattaaaaattcatgtaaactaataaaatattatttattggaggtggaacatctcccaccttttacaccagtgagagtgaatccaagtcctatatataaacaaaatcatgtatttataattaacactatcaaccatacacatatatatatataaataaatatactaattactaaacatttaaagaggcaaaaataaaactaataaaaataaaatgtcaaaccttttaatttctggtaaatttttgttattctttcgccattttcaattcccattaatgttccggctgacgtatctcaaccaatacttaaagcatggacaaaaaataaaaaaaaaaaagaaaagaaaatgataaaaaaaaattgtaaaaaaacattacatgtcaaataaaatggtagtggaatgtcggttgacggtagtgcaatggtggttaacaatggtaaaatggtggtctttttagaagaaaaatggacggaggaggaggagaagaagagaaaggggcaaaacaaaaataaaaaaataaaaatttattttttgagtgaggagagggggatttgtaggaaaacattaccagcaggacccaccagtatttatcaggtcttccccggtaattgtacaacagtcacaattcattattaataccggcagatcccgcctctaataatttgtcggtattaatattttgaaattttaggcagtcaaattcccgcccttgttattaaaggtgggaattccgccggcattaattattttttgccgtgtaataatatttttcatttaataaaattaaaattttattttaaataactattaccggcggatggaatattccgcaagtaataccctagttaatagaggcagaatacctccgccgacactaataatattttttgtagtgagtttgaacactttgtatcccataattagcttgatttctattcttcaacaaatggtacacatggtcaaatgtcctcgttacaagttcaaatgtcctagataaaaccttataacgaggacatatctttgttataaaatccttgttagagactcgtcgatagaataaactttctgctaaggacagattttatattctcggtaaaggctctaatgagaacatgtgttgtcggcaaaagtagtaatgttctcagcaatggtctttcagtttggtccaattgattcattcatatcaagaaaaatgttttaggtagaatctgttaccgagaacatacccaatttatatatattaagtagatattacgtgcaatgattacacgtaacgtaagatttttagtttcatatgataaagatttttatagataaatttttttaaaacaagatttttatagataatttaaatacataaacaatatagtataataattaaaaaaaaactttttaaaaaaaaatatttgttgaatattttataattatttgataacaattataattataaaataccttgaaagcactaaatatgtactaaatcaatactctaacttttcttagaaattgacaaaaaaatttacacgagataattatgttgttttgtgcccatcttatgctgcaaagaaaaagttaattatagacatcttgtgattaagaaaaaatttccaagagttgtatactgcatagtgcaagaataaattttataaattatgcaggacataatggaattgcaccatcaaatcttattataacagctaaaattaaaagcacaattgaaaaataataattattccactcctaaaacagaacatgaaccatttaaaatatttgaacctatactcattacatggaactcaacataatcatggttaaaataaagttcccaaaattatctaaacattatttagcaacaaagaagctaatgtaattaggattatattagaaatataacctcttatctttcatatgtagtagattgttcagatataagatataatatgatcaaagacttttgtagctaagagtattaaccggatgctttgtctgtaatctaactcattgcaatattgacttgacaaatgaaagaaaaataagagttttcttacatattaatcagatta

SEQ ID NO: 380471 - DNA, 3092 bp, Cannabis indica
aactttctcttcaaatcagagactaatttaatctggaatgacaaaatgaaaataacattgggcattgctcgcggcatcttatgtctgcatgaagattgcgagaataagatcattcattgtgacataaatcccaacaacatattgatcgatgagaattgtaatgccaaaattgcaaattttggactggcaaagctactgatgtcagatcaaacaaggacacaccgaaattagaggaacgagggggttcattgctccagagtggcataagggtcaacctattacgaccaaagctgatgtttatagttttggaattattctattggttatcatatgttgttgttttagagttgatgttagtgttcctgagaaagaagccatcttagtcgattgggtttacgagagcttcataaaataataagtcagcaagtctaatgcttgttgaagaagtgaacgagcaagagtttgacagattgtagaatattggtctttggtgtatacaagaagagccaacaattcgtcatcccataaggaaggtagtggccatgcttgaaggaactttatataatattgtaattgtgctttctttttctaagaaaggaattatatttgtagtttgatctctttttcctttttccttttttcattctgtgaagtgatgaaataatagatcctataatctaattatttatcgctgtacacatcacattctttatttgcaacagcatgcatttgccatgttatatgcaccaattttcataggcaataaagcttttaacagagctaccaagaaagtgcaacatcagcagcaaccaaccaacctgaaccccatatttgctatggatcatgttgtcaacttgtcaccatgcctacattgtaaggcattcaccacccacatgagatgataaagaaaccagttgaggagaagttgatcctttagagcatttgtttaagcttcgtatactgcagatagcttcagtggaggagacaaagctcagtaacactgcaaaacgagcaaaatagattaagcattcttgaaagaaaccaccaatcaaagaattgttttttttcttcttcatagaagtagatcctgtaattaaaaggaaaactaaactgaagaacagcaagaaaaacacctgttaaatttctaaatttccaatttcgatcttcaatatgactcacattaaacagaatgtagccttaaaaacaataatgggtctctaagataatctagtgaaaccaacgaagaactgaataaacaaataaactacattagcaacagccgtaaatgaaaaggaaaaactttaataacagtcaaattagcaagaagttagtaacaagtgttaaccataaatgtggaaaagcctaccatcttacacagtagctacttctaatgcttcattcttctgctctaccatgtaattgtgaacccttttagtattcaatctcataccattgatcatctcctcacttgcttcaattatctgtttcggcagagcaatcttcaaataatcaaaccactcttcaagtgtcatattctccaaatctggctcctttccggattcacccaacttctcattagacccaaaagctttatccttttttccctcttcacaaaccccaccattgatgccacaaccatctctgccatgatgatcctcctcttcacagagctccatcaccgtagcctccaccttttcacactcatgttccctcaaattcaacttgtcaatgtcttcatcatcattaactcgtcttgacttgacttgtccaccttccacttcagaattctcttgaattttctcccatctccgagttcgcctcgttctcacttgcggcagctgttctttctcctcttcaaccacactcttcaaaaccttaggtttccttcctctccttgcctctgctttctccactcccaaaccacatccctcttccttcttctcctcaactcctccccgcctagttcttcgcctcaaaaagcacccatcgtcgactccaatcttaacggatatggaagtggaatctccaatcctgatgcaatctccgtcgctgagctcgacggggacgtcggtttcaataatttcgtcattgaggcaagagcgattggaggtgctgaggtggtgaagtagccatttgccagattgagattggatagagaggtgcttagttgagatggtggagtctttgattgtgagattgttaccacggacaagacgaccgattctgacggtacatccgggccggaagtctagggtttctccggctcgaggaccttggatgatttcaagtttgagagccatgaagaagaagaatgggtttgtttgagctaactaacacagtttgttgttttttatttcatttctaacttaattaatccaaacccggaaaatgaaattataagtagaacaaatcagactttttacttttacttttatcttttatttgctgggttttaattaacatcaaataaatatgctttttcttttctttttttttttagaaaaatgcatttataaataaaagtgaagttaaacttcatagttattacaaaagatattaacaggtatagtagatatctctactattcctgtaacattgttggcaaacgcccattaaaccacattatgggccgcatagttacagtttctagctatataagaaaaattacaattagtcatagaagcaaagaggagcttgcaatgacgcacataattctcaatcccccaaatagagtcatcaaataaatatgctaatttttaagcattgtaaccagattaattagatttattgcactaaaactaataaattatgtatattattattatgagaaatactaaaacaaccatgcctaaaaagtaattatgtgtagatgcatcaaatattcatgtcgtgaacaatataaaatttctgttatgtgaaaattttgatatggaagatctaggtgaagcggatgtaatctttagtatacagatcactaagtctgaacagaaaatttctttggatcaatctcactacattgagaatatcttaaagaaatataattacttaattgtaaacctgcttgtacactatatgatcacagtgtaaaatta

SEQ ID NO: 380472 - DNA, 4853 bp, Cannabis indica
ctctagtgttataaactgaaattaaagttagaataaaataaatattagagataaacattacacaccaagaaatcaaacacatcatctcacatctctctctttgtcttggcaagatccaaccccaaggaacccaaagcaaaaccaaagaaattttaaggttttcaaaccaaattcaagagtttttcaattaaaaattcaagtgtttattcacgagaaattcaaaggtaaccctaattactttatctctttaaatttcaaagctttggttgggtttgggttaagaatttgtattttttcttctgttaggatctggggtgtttgggaatcgttttgagagcttgtttggagtgggttgttgatgattttgttagtttttgctagttgggtttgagttgaatttgagtttataaactcaaacttagctcaataatgatattttttttatttcagaggatggatgatggtttaatgcttgaattatattattgtggcttaattgggtatattttggaagtttgtatgtgaattgggataaaattgaacttggaataaaagtttatgtgttttctgcatgtaaacagttaactgtttttgtaaaaataattagtcatttgttcatgcagaacctcaagaaatggtccactatttgggatccggttcaccagttggggtagttttttgggtgcctcagttttttgcattttattgatatatatttagagcattttcacactatttatcaatagaaaaatgttaagttttgagtttaagtccctgaaagtgatttagcaagttacttaccagttttacgtaattatggcttaggacttttaatcgtcgagcaacagtttccactcaagttgaccgacacatctaaatttaaaatcgaggtaagattagtataataggtatatatgcgtacatatttagcttacatgtttttataattgcatatcagataacatatcaagaagagcggtactaatgtacatatagttacaatggataccgacggatatatgttgggcaatttaataagtatggattgatgctatcacatcaatacgactagagtattgagtataggctgatattatagtcaaacatactatcgttaagaatgttcgagacttttttgcgttggacgcaagttaaagagtcgtgattaagtctatgagcaactagttacggtttaattttatgtttatgtcttatgcttttcttattgagtttatcaactcacatatatgtttacatgtttaggtaagggcaaaacaaaggctgagcaatagtgaatccatagttcaatgattattgttcatatttggacagttaggcctcgagtgttcgaatctttgtgacagtttgagctcagattatgttagtcgtcgagtaacacttttgtatatgtaatattttgattattacaatttagtataagagccgccaggttgtctttcaaagtttttcaagatatgtacaatcatcatcagagataagcttaactcaatatgacctttacatgttttagtagctttaattaattatgtttgaatagaaaagcatgttagtagtttggtagctgaatcgaactttaagttcccatttgtacggtagttagtttacaattttaatcgcaacctgactgcaacgccctaactcgtaaagacgccacatgtgtacttttataaattaatttataataataaactaataatttgagtaaaattgtagattaattaaaaatcttacaaaagtattacaataattttttttattacaaaataattatatctatatatattcaaaatactgtaaactagagtttcgtcaacaaggcattacatgtcggttgagctgatatgtatatctatcaagagaagacttctgactcatagttgtcataacttttctttctccttatctccaccacaaagcatccgtgagttacaaagactcaacaagaaaagcagttttacaaaattatttatgatatacagttacaaccaataatattcatataatcaactacgtatccatatatttaatccaagcaggaaatcccaatataatataaatttaacattcacaacatcaagtatttgtttaataaaataacctattctcgttacttcataaagtaataattaactctcattaccaaatgaaacaactaatatcactatcattgcctaataagacaatcaataaataataagcctaacagtggtttcaagttagagtaataaatttttcttacaagggtaattatcatattataaattaacatgctatgtggtacaattgactttgaaccacgaatctaaattcaaatgtgttggccaacatgagtggaaaacactcgacgatcatggtcttatgtcacaacaacagtaaatcaaataaataactcatttactcacgttctaaaacttaaatagaaaattagaaattttagcatggaaataccttaaatatcgataaaatacgaaatctaggcaccttacgatgaatttaattgggaagtatagtggtaaaaagaaggcaattcgttagctcgggataaggtcaaaaaaatttttacgatcccaaattagaccaattgaattctatatgctttgctttaataattatttagaacggaaaaatctattatataatgaattattggttctaaactatctctgacgataaattaacaatttgaagtaatcttttaaacaggatgtactaaaaatactctaaacggttcactgcttgcctagtttcagactagaaaaatgttttattgtttctacataaatggttatgaactgtttcctttgcataaatggcaaaactcaagttccacttcttagatattctcccaaattcaaccaaaatctacttaacttaacaaaacaaccctaacatcaattttaaacataaaccataggtcaatttacaattccacaaatcatcatcagagatcaagcttgagttccatgaactcaaacttaaactttcaactataacaacaactatctagcatcaaaacaatcacaaacaatttaaaattgagcttaaaaataaatctaacataaacttatctatacataacaaaatttgtgaaaaactatacttcaaaccaacatgatcttccaaagatttcaaagagatgaagagattataaatacgttgaagtacctcactaactcaactcaaaatcaagctaaattccttggtttaattgagtgtcattgtttatcaaaaatacggccatttccattctctatgttttaaactaaatatatcgaatatttcataaaagaatagaaaaagataaaaaaatatatatatattttttatatttgctagatgtgctgtttattttttaatgtgttatgtgaattattttcgcgacatttttatcatttatttggattaaaatgttatcactcctagtttatttttttttttcattcataaataaatatataataactatacttgttatttatatagttttataattacatttttcttgtgttctttagttttctgtgctgtacattattacttgattgttcataaacaatataaaatgaaattgttaaattgaaataaaataaattacttaacccgttacataagaaataataaaataaatgtttgtttactaaacttctacttttaatttcagtttatcaagaagcaaccaagttagcttataattaataaaaactctttgaaatttttaataacaataaaaaagaactatctatccagctatggtgatattgtttgtggatctgcaattggtttaattcttgacaagagttcgaagtttattcttgagccacttttttgtttttgttcccattgtttcttcctttttcgtgaatttataactttgaagaaaaattcgtctagaagcgtagtatttttcatcacgagactttgaaccattacaataaggtattgtaaaagatttattgtcgtgatgatcttcttcatcgttgaatatgatcgaatttggattaggagacattaaagttggatcctcaaccattttcttggtaactaaactttgatcggccattatgaaagttgatgaagtgttctttgtaaatttgtaattgtatggtttattatgggtgtgttatggtttataaagtgtgtttactatacgtactttaaacctttaatttcaatctcttctaagtaccttttataggcaatattttcttacgtgtttatataaatttaagatattttatttaacaagattccttttcctatacttttttttttttgaatgaattttcctacaccttttagaacttagattagtaaaattaaatatatctttttaaaaaatcctccgaatgtttgatgatacgtggcattttgatgacttccatgtatatatataatataatctaaatagaattgaccaagtcaaaggagtctactataacaaaacatacatacacaacactgaactagtttttcgttcaaatgtaatttccaacaaacaaattaaaaatataatttttatctcttttttttttttttgaaatctcaaatgttaactaaatgtgaaattattgaaagattttttttttttttaaatgggaaaaattattcaaagattaaacttaaattcaataatcctcaaaaatattttataacaacaatgttaattataacactacaaaaaaaatcttactttaagtcacaacaaaatttgtattacaaaaaatcttactttaagtcacaataaaatttgtgactaaaaataaaaaagttgtgattaattataaattgtcatttctacattatgactaaaaaatctgtggctaaaaatatta

SEQ ID NO: 380473 - DNA, 2189 bp, Cannabis indica
tatatgcaatgcagaggagttgcacaatatttatgggacaattttctgggagggcaatcaagttcaaggccgctaggtgatgcagttcttgatgggattgatttcgatatcgagggtggcacaactcaacactgggatgaacttgccaaggctttgaacgagttcagtcagcaaaataaggtttacttaactgcagctccacaatgtcccttcccagatgcctggctaagtggtgcactgaacactggtctgtttgattatgtctggatccaattttataacaaccatccttgtgagtactctggaaacgctgacaatttgaagagttattggaaccagtggacatcatccatctccgctggccaaatatttttaggcttgcctgcatcgcctgatgctgcaggaagtggctacgttgcgcctatgtgctctcatctgaagtgctgccaacggtcaaaaattctcccaagtatggaggtgttatgctttggtctaggcggtatgaccaaagctacagcgcagctattaagcctaacgtttgattcatcattactcttatatatagttttatgtatttatatatttatagcagcaaatattgacagaatgatttctgtggagaacatgtggcctgtctaatagatctgcttataagaaaataaaagccaaatttattcgctgcgtgtatcatatatgtatttgttttgtattgttaagtaggactctacttatatgcaacacaattcatatactatttatgttaaaaatgtgtaattgcttataatgtaatttctggttaacttaagttaaatttttttaattttgtaagttgctgtccattaagtgtcattattgatgtattattttttattagtatatttaaattaattcttaaataaaaaataaaaatttaatgatctcaaccaattaaaaaatgtcatgtgactcttaaaattttaagtacctacaaaagttctaacaatataccttaaataatattaccgtcaaaattaaatttatctatttatacaataaattactctaaaaagaataattactataatttaaatgtcattaatggggataagaaaaaaaaatagctaaaaactataaatcaatgttttcaaactattcgtcaaatttgttaaaaaagatcaaaacacaagtaagccaaactagtgtaaagctacatgttaaaatatcacattttaagatcttgcttacgcttttcataatttcattctcggaagttgctaaagaattcaaagcaggtagccaagaattcaaggtaaaaacctcctcctccactcctttcaactccattttggtgcaatactctatttttggttcatttaagttctgctttctcttgattaattagtctaaatctttcttctttacgtccacattgatttgagtttcttgatgtttaacaaagttaatgaattttgtgtcttaatgtgtaatagggagagagtcccacatgaaatatgtgactttgtttacaaaattattgaattaaaatgtttatttatcaatatttttatataacactattttttagacaattttttataattaatatcctaacacaatatataagatgggatcaatgcaaaagaaaagaaattgtacgtagctagtaaattgaaacattatacatttttattaacaaatatttaacaaatatagatatatgatttgattttgtataatttaaaatttttattgatgattattaattagctatgcgagataaaaagaaatataataacaaataaaattgtatagcaattaattatttgtaaattaaaataaaaaatgaataaaaaataaaaatagagctaaaagactgtttacctacttggctcactcagttttcacaaatgttttattaacaacttcgtacactttatcaattatcaattcctttgtgggtgcaatactgtgtttgagaaacagagaaaggcatgtgagtttgagaaaggcttcaagattaacttattctgtattattatagcatttcgataaatgttaattttcttttctatcaaccaagtttaaacctgtacactgtacagtgtggcgtgctgccccatggcacacccacactagggccattttgtaacatgagcatgccttggtgcctgatcattagtcaagtctcgcaccaagcacctcattggggt

SEQ ID NO: 380474 - DNA, 1424 bp, Cannabis indica
tttttttttttgttaatctttatttatgagtaaacagattgatgtttggggatttcgaacaccattcttattccttgaatggattggaatgaatgcaatgctagtgtttgtgttgggagctcagggcattttggctgctttcgttaatggatggtactatggaaccccagataaatctttagtaagtacttgcccaaaaataactagataaaacactatccataaggcataacccaatataacataacttttttttgtgacttaaaattgtaaagaataaaattattactaattgcaaactagtgtttattaaataaaataccaagtattggaacgttattaggtaagttatgtaaaaacaaaaatgagtatattaaaatgtctatttctctgaactagtctttttatattttattactgtttatcttttcatacataagaactaattgagggattaaaaatatgatgaacaggttaactggatacaagagcatgtctttatcaatgtttggcattcagagcgactaggatctcttttatatgtcatatttgcagaaatcacattttggggaatagttgctggaatcttgcacaaattgagaatttattggaagttgtagagaaaaaaaaaattaacactacaaaatgatcacggaaggctcaattctctacatgtatttcaattttttatttgtttattattattgttattattattaacaataatattacagaatttcttctttggtgaacttctattgattctatgttttatctttttatgtgataccaaatatagctaagtaaagaatttatatgtgataccaatcgtatatacatggaatctttggataaatgtcaaagtttaattacaatgttgaaattgaagcctgtcttcttttcatagtacaactgtctaaacttatcatcaaaataccaatgaaaaccgtttatcttcccataaatagacaaaccgaaaagacaaaagatcattaattaatgacatttaactttccttgcctccttggctcaaatatcttgctaaaatatctcctctataaaaacacatccatgattcattaattccttggggtacaaataaaccattgtatgtatataatatgccaatatatatatcatattcaaaacgcaattgtatttttacacaaccaaacaaaatacttgaggtttttcattaccaagaaaaaagggaaaacatatatctgatgttgaattttagtgagagtttttttaaaatattttgagaaaccctaaagggtaccggtggtgcctagcactctcttatgtgtcagtatcgctattggttcatcgggtctcatataatttaatataataacttttaagaggtatcgctagccaatcgcaacgcgacaagtcgagaaagtactagacaccactggtgc

SEQ ID NO: 380475 - DNA, 1156 bp, Cannabis indica
aatagtgatttttgtagtagtgtgtggaaatatataagactgagaagaagttggctaaggttgacaaactcttgcagaatattgagaataaacttaataatatgtgaggatcgatgttattggcttatctttatgtttatgttgtgtactcctagtttcatataaaacaaaagacctcactttgtatacatggtgatggttgtagtactgtgtttcttttctttgtttgatgttgtaatgttatattaagtatttcacttttcaaggtggtactgctaagttatattgtttggtacgtaatatcatatataaatatatgtttttatttcttaatttttgtgacttggcaaatatataatattattttatgttatccccaaaaaaattgtgatgatcaaaaaatgaaaccacacaagaggaattacattctgatttaaggctacaaaagtaatatttttataataataatatatttaatatactgtagatatattctccttataaatattggcataccctcttcatgataaacctcagaatgaagagaaggataaaaaacttactcttttttaaatatatccaagtgacaacatggctcccaaaacaaatgcaagcccaaaataccacactcctatgaagtgttccccacctccaagcacatcaaagataggccaatcttcccgcagtcgctgaatcgatgttacggacgaaaacacttgcagcaactgtgtggttctagaggggttgctgatgactgagaggaggttgctactggctaagaagaaagcaaggcgtgatgcacacgctaattgctgcgaagttggacaacggtgcatggctctgggcaagatcctatttaagcaagagcaacaacaacagaaggcaagcgacgagatttgtaccattgaagggttcatggactcagcttgtcaccacactggcgaggagtatgttccggatgtcatcaccatagattgagcaacgtgtctctcggtcgatgattgttccattttattttatctgttcttcgtgttagttttattatgcgtgttatgctttagtaatgtaaggtttcattgttagacattttatatgtatagactgaaacatatatgattaagtataaaatgcggaaataataaaacatatatgtact

SEQ ID NO: 380476 - DNA, 5302 bp, Cannabis indica
aaaagactattgtattaacttggaaataaattacataacagtcataagtggaggtggaatttcctccaaccaaatacattcagtatccaccgtaagagcaaactttgccaacaagtgggcttcgttattagtagatctgtaaacatgagagatctgtgctcgtgggaaattggacactagaaggtgaacatcattaagaatggcatgaaaaagtgtgagatttgtagatgacttcttcaaattttgaacaaccaaaagagagtctgtttcaattagatgcactgatagttcaagttgaagaagagttttgagactccagaatagtgccatagcctccatttcttctggtttgagatgccctttgattgatgttgtcatagcaactatctccccatgggagtttcgaagaagagcacccagaccaatcaaacttgaagacatgtttatggaagcatcagtgtttaatttaagtttaccagaaggcggtgcgatccattttgcttgagtctttattgttgtggatgtagcagtaggcacctgggtacaagtagaggataaatgctgctatgtagatggtgatggtcgaacttgggcatgtcgataatcatctaaatacttaacaacataatcttaaatgaactgcaccggtttggtcttttttccatggaattcagcattcctctcactccatatacaccacataatagttataaaaacctcaaataattctttagagaggataggggagacatgtatcatgaaatctgaaatcgaagtgatcctagacagatgcaaacctgggaagtgatcccattgattcgatacttgctttgctctcttacagaagagtaaagcatgtggaattgtctcattttggagcttacaaattggacacaaagagtctgatgcaatgtgtcgataatgcagaactgctgctgttggtagtgcatcatgaaaagccttccaagcaaatatttagattttttatggtaatttcaagctccaaaaagtttgccaccaatatatagaggagccagaacaaccaggagcagaagtgtcatgagattctgcagcaaattggtagccacttttgactgtgtagcagcccgttgaggagtaatgccaaattagaaatcctcagatggataaacgcacagtggagtggaaagaatgttatcaatatcaggttgtgagaaatgattttgcagagcctccaatttccattgtctcgaatcagtaatgaaattggcaactgtcatagcatgatctccaaaaaccagtggcaaaaaagaagaatgattaggactccatggttcggagttacataagatttttggaccatttcctactctccatcgcaaacctcttttgagtagttctttacccgagactatcgatctccatgtgtaagaaggggtattacccacaccagcatgtaacagatgtccattcacataatatctgttctttaggattcgactaaggagtgagtttggagatttcattaggcgccatgcctgttttgcaagcaatgcttggttaaaatgtctgaagttccgaaatcccatacctccattaattttagcttttcagagaaaattccaattcttccaatgaatagagtgcccagatgctgaagaaccccaccaaaaccttgccatttgttgttcattttgatgacaaagttttgccggtagttggaagcaactcattgcgtaagtgggaattgcttgaactactgccttgagaaggacttccttccccctactgagaatagttgttccctccaagagttgagaagcttccatattctatcattgatgccactaaagagctggtttttatcatgtcccgagaatgatggaagtccatgatagcgttcatgacatggttgaataggcatacagaggaggtgctgaaagaaattctgctcagtaactcgtgtatttggagaaaaagagaggacacatttgtcatgattgattacttggcctgatgcacgactatacaagttaagacacctattaaccgtagtagctgaggatctagaagcccgacaaaataatacactatcgtcagcaaacagtaggtgtgaaactggtggtggagatcttgaaacattcaatccttctagattgccttggttctcttcatgttgcagtaagcgtgagaaacattcggaacaaataaggaataggtagggagagagaggatctccttgactaattcccctatgaggagtaatgttaccatggatagcaccattcaaaagaaatgaataggaaactgattgcacacatctagaaattatctgaacaattgtatcaccaaaccccattttgagcattacttgttgaatcaaatgccactccaccctatcgaaagccttaatcatgtccaatttcatagccgcaaaacctttgttacctctcttcctatttttgagtgaatgaagaacttcaaaggcaacaagtacattatcagtaataaggcgttgtgatagaaatgcactttgaaattctgagatacccaaatgaagaaaaggttgcagccgaagaacaatggtctttgatactagtttgtacagaacattgcaaagacttataggtcggtattgggtgatcttggtaggctttttaactttgggtatgagggtaatcaaggttctatcaagcaaggttggatcacagccattattgagaacatcaaggacaacagaggttacaagtgaaccaacaacaggccagtaattagtgtagaacattacagacataccatccaaaccagggcttctatcttcaaacatggattttaaggcatgataaacatcttctgatgtgtatggctgagacaaaatagcttgattctctattgaaatggtggttggaatggtggaaagcactgcctcaagagcgaactgatcaattccttgagaagaataaattgcaaaaaaataatcagcaatgatttggacaatctcttgactactggtgtgagtaacaccaacagaatcttcaagctttttaatacgattgtttgagtttctgttattggcatggtggtggaagaattttgtgttggaatcacccaattttaaccaataaattcttgacctcttgtgccaatttttgagagcagtaaaatgcgattgggaagtgtcagtagaattctgtaaggcagccacatgctcatgggatttcttaatttttttcttcatcttaccaaacttctgatgatcccaagtttgcaaatgagatgcacaaaagaccaaattgttagtaatctgtaggataggatcaggtgaattctcagtccattgcctctgaatcatatcaagacgttgatcatcctggcgccaaattttctcaaatctaaaccttgatttaaaggcaggttttagttgctgctccctaagcgccaaaacatgagttttcaacgcacggtggtcagaatgataaaagttgagatgctgaattgtcccaggttcgaaaaagttgtcccagaactcattacaaaatccataatcaagcctttcctttacatgtccatcgccttgacacttatttgtccaagtacaaagttcaccttcaaaaataagtggagtaagatggcatagatcaatggtagattgaaaaggttgtatttgatgttggtttctaataggaccaccaatcttgtcattatttgaaagaacctcattgaaatcacccatgacaagccatggtctaagaggagctatattaaaacatctcttgagcttagtccgtgtatgaatgcgttgattgacttggggatgaccataaaaccccgtaaagtgaaaagattgaccatcatggaattcaagaaaacaatcaatgtggttagaagagtagttgttaattgcaatgtccttatccgatttccatagaagcataacaccaccacttaagccaattcgaggaacttcaataccatgaggaaagtgcaaactatttcggaatttagaaatactaccagattgtaacttagtttccatgagaaacaaaacacagggagcttgctcaaaaataagcaagcgtaaatgacggaatgcagtcgggttccctaacccccgagcattccagcttaggatattcatggcgaactgcatcgatcatcatcgatcactgcagagttgtcaaaatgatgctgaacagaatccggagcagttgcggaaacatgtaaacattgggagaggctgctgatgaggaggatgcaaattggcctgagttgttcgaacgacaacgtttaaggaagctttgcagagagtcagattccccttgtcttttagtgaccttattaggatttatgttttctttgaaatgtaatgttgacgaaggaacttgattgccaatatggcgactttgactattagcatgcatcgacaaatgaggaggaattgtaatgacagtggcagaagaaaacaatgttggttgaggggtggcattattgatattgtgaccattgaaaggtgaggctacagtgcgtgaggatggaggataagtggaaaaggatggggtacaagttactggaattatgggaggcaaagtgagtggtaagtatgagggaaatggtatctcagaaatgtcatggtcgatattatgtgaagaagtatgttgttgattaggtaggttatgattaatggattaatgtccaaaattgatattggtagttgtatgagtagaggattcaatatcagttaatggaaaggaatggggaggtggtcttgatgtaagtttaggaacagcaacaacgaaagatttctttgcaagtcttatcataagaggccaagcattacccttcccaaaattagtcctataacggtcatagccagaggatggtattggggatcccatgagttcagggccataagaaagggacggtcctattccattgtagagttggtcaaggaatatagaacaactttcaaaagggtgtccaataactccacatttaatacaaaattctgggagacgctcataccaaaattcaaccaacaattcatctcttgagtcacgaatcctagccatcttgcctctaagaagaggatttgaaacatcaatcatagcctgaaaacaaagaaagggtccccacccttcattcaaggattcctcgtcaacttctaaaaaggaaccaacaatattaccagcccatacagcaatggctttggatttgctgagaaatggtagacggtggagttgaatccaaaatggagagtaatgcagagattctactgtgagattttgtaatggagatggtgaggccaatgttgggttttatgccc

SEQ ID NO: 380477 - DNA, 3734 bp, Cannabis indica
gaagagattaaaaaaatgattagccctactaaaaacgagctattatagataatattatttagtgtaaataaaaactcttagaaataaatattaaatgaactcaaaactaaaaacctgaataaataaaaatccttataactaatacttgattcttaaaattagtaaaataattgaaagagtggagaaaaaatctacaccatagtcctttattatttaaaagaaaaaaaaagaacaccttacaagttaaagattaaaagattaaaataattaaaaatatatatatataaatttgcattacatatttaacttatagcatctctaattgtatacctattttactaaatatgaaatatttatttagtaatatatttaatataatatttagtataaattattaaaattgttgctaaattaaattagtgtaatcatggagattgtcttaatactccatgaatagttaataattttttaagttgtttagtgggtagttaataattttgtataataattataaatttaaaataaataaaaattaatattaaattatactaattgacattttagttaggtaatatatttttcagcaatccttagacttaatggtaatgttaggtaatgaatttattattattattattattattattattattattattattacaatttttaattattaataaatatatgtaatgaatttagaagtgcatatattttatttgaacaaaatcagttctctatttgataaacctgatcaatcgccaaagcaatcacagaacgtcacgtggtagaagataaatatcttagacagcgtcacagcgatatttccggttctcgggttgacacgtagcaatctcatgctagttatggaccgtcggatcagataccctctgctcaacaagaactggaatcctgagagagagaagcacgggcgtgaaggtggcaccgccgataatggcaaccacattgaaatgtcaaccgcgtagcctgataacgccaattaccaacttgactcgatgccacgtcaagcgggccccgcttaatatgagaacttctggctaaaaaatgtgatatgtaatccagccaaccctaggctgactcagtcatgacacacacgtattcactggaacccacctctcttgaagatttttttagtttaataaaataatatttaacagccaaacccaagtttaaagggtttaatatagagtctctcctggcgccaacttgcatggaggactgaatgactgacatgttttacttgcttttactttggcgtaaaataatgacacagaaaaaattatattattaaatagaaaaaaagtatgaaaactaattaatagattttcaggtaaggactcaggttctccgaattctcagggaaggacttccggccaattataaataccatacttgcccaattgcaaatgcaaacccaactccaactccaactctctatttctctgtttttttcttgtgtttcttttattatttcttgtccgtttctcgatccaggatgactattctcattgaacagcctcaccaaattggtaattttcaaacttgtttaactttattttccaatgtataaattctttaacgttgttcaatttaaacatccccaaagcttaccataattttattctccgttttttatttctttttttacgaaattaaccaggcttattgagaaaaatatatatgagaattaatttcaaaaatcaagcctttttttttaataataataattattgtatttctattttttctcattcgtaatctttatacaggaatagaagcagaggaaaagaacgcccttatagatgagaaagaactggcgtgggatggcgattttttggtgccacagactaactcttttgggcacacctttaggttatctcctttgcatttttcaaaaagaattatagtgtgttgccccccttttataagtatttttgactaggattataggcacctgttcttgtcatatatactaatatataatccaatcatatacacaaaaaaaactataatttgttcaataaaaaaaatgtatgtatatcaaactctaatatttttatttattcttaagctataaatttgacaaattaactatgaatttttttttcttttaatttaatttaatatttttatgtatgtttgtatgttttaatgaatgaataattttaatttaatataatgataataatgaataaacacacactagaaaatctttttcgtgatgcgaacagtctttatttttacttttattttttagttccaattttgacggaggttcatccataaaattttagggaaccaaattggaataataataatacctcttaatttgttcgatatttgatcattaatccttgaaaagaaaaaaattcaaattttttgaattatattacccattaagtcctaataatctttcacaattttttttaatgaaattcttaacaaacttggaatttttgtcaattttataaaaaaattggggactgaacgaaaaataatatcttaaaaaccttgataagtgataataacaacaatccactatagaaaaatgcaatcaacatgggccctgtggcccattctttccttagccttattttgaaatctgggtttccaacaaagctagcccaatcaaattgttttcggcccgtgtaatcaggccttggcccacagatcctcattatccttcgaacaagtgtgccatatgacaagaaaaatagtgtcacaagtgaagtgttaggaaagtgttatgttaattagttagtataatacaaacttgcttttaaacttattgttgcgttaatttaatacaatacggagatggtgtagatgctcttaataaagtatatgtgaatgaaaataacagggactatgaggttgaaggagagaggcagccgggtgtggagaacttctataggattaatcacctcaaccaaacatttgattttgtaagtatttggtttcatttttttctttaaatgaaagtttggtaactctttttttaaaaaaataaataattaaatttaatgtaatgtaggtaaagaagatgagggaagagtacagcaaactaaacaggatggaaatgagcatatgggaatgctgtgagcttctgaatgatgttgtggatgagagtgatccagacttggatgagcctcaaattgaacacttgcttcaaactgctgaagccattagaagggactatcccaatgaggattggcttcacttaactggccttatccatggtatgtatttatataaacctattgttgttaccattcaagatttgattttatataacaatggattacctaagtttgtattctgtattgatttgttttagatcttggaaaggtgcttcttcttcccagctttggagggcttcctcagtgggctgttgtaggtaaggaataagggttacatacaatcactctttttagtttaccacaaaaagcttatttgttttctattatcttcaactttatacatcatattaatcaattgtgattcatattataggcgacacataccccgttggttgtgcttttaatgactcaattgttcaccacaaggtacttttaacataaaattcaagttaagctttctaccaaatctagtttattatctttattaactaatagatgatcccttttttctgtgaagtatttcaaagaaaatccagattactacaatcctgcttataacaccaagtatggagt

SEQ ID NO: 380478 - DNA, 1673 bp, Cannabis indica
gaacctctaccatttacaaacatacattaaataaaaccttttcgcaaatacaactcattgggacaaaatgtccataaaccaaataaaccaaaacaaattataatgatcaacacacactcaaattacacatttttttcacacaataatatgtataataacaatgtgcaatttaaatgtgtatctaccattactccaaaacaaaacacatatacaagataggatatttttcattaacaagtccttgaattacaccactcattacaatttggtccctaaaatttcaaataaaaccaactaaacctccttaatttttcttttcttccaagttttctcttttataatatgaaattttaagtaccaaatacaattcaaaatacccactaaagtaaaaaacacatttacctttttcttttttcttttcaaaattcataacaattttgaaaccaaattaaaaaaaaaaaaacttcgatattttatttatcttttgaattaattaattaattaaaagcgagcacagcaaccacctcgaatacttttccgaaacccgaaacaaagaggagaagtcggagacttattaccgccaccgccgccattaccgtcaccaacacggccatattcatgatcttctcttccacctccggaatcgaaagacgaactcgaactcgagaatcggctagcagtagtggaccagatcgccgatgaattattattattaggcaaagaagaagaagaagaagaaaacggcgtcgttttgttgaggtaattgaatttggggaatagtgtgtttaagataagactagatctggatcgtttctgatgaatcgtagatgaagatgaagaagaagaagaagaagaaatagttctgttgatgtaattattgttagttatggaatggtatgaaggaggaggagttagaggtggaattagggaatcgtactgttctgagaatcttgattttggagttcctggacatgtttcccataagaaaggtactgaaccaggtcgaccgccatagtaaagtactgaagctgttgatgatgatgatgatgatgttgagatttcttttgaagctttgggtggttgaatttggagcttcaatatcatcttcttcttctggcaactattctcatcatcacctgtgctcaacatcatgtgtatatatatatatatgtctatatatgtgtatgtatagtttggttatgtatggagagagagatgaaggtaagagtaagctttttggtttgttgttggtgttataaataaaagtaaagagctttgctctgctgaaacagagtatataatatatgtatgaattgatgtatttaactatttatgcatgtaatataatttgacttttttactctttttgcttgaaataaaaaactatggtaatttatttcaaaaaacaaagaagaaaaaaacaactatgggtaagtgtatagtacacttctaaacaagtgttgctgtagactctaattttttggtttgatttttttttatcggatatattatagttatttaagattacggtgtagttagggtcgctcttgaaaatatatgggcctaaactataacattatataatatgttatacacttcaaccaattaaattatgtctatttgttgtttacaatacatttattttactttaataaaaacttaataattttttt

SEQ ID NO: 380479 - DNA, 3088 bp, Cannabis indica
ttattatcagctatcttcatgcctaaaaattcatttgattagtggtgacttgttcaatttctccgtttaaattccacaaccaaatttacatgctctgttgtttatttattacctgtttgtgtaattgttcttgaatgtttaaaaatatttataataactatcaactgtctttgaaagtcaccagacatgtaattacagtagccaagagcatgggaaattaaattgaaagatgtcatatataataggttagctgctacaaaatttaatgccaagaaatagacaaatcaaacactctaaccccaataaccccatttctatagagtaaagcttttattatattggctagaacctaaaaccattacccaagctcaagtttcctactctttaattctttcacacagtttcacactaactcagtactgtttcactctctctctctctctcctactcatcaatttcataaggagccaaaccaagttcacatgtctttgttttcttgtgaataaagataagttttttactcaatatagttgtatatcatctcctcactcaataatctttaatttcccttttgttatccactcactcaacaaactcacctcctatactgtgtgaatgtgataaatggtctcagctcaaaaactaaactattcataaagaaccaatcttggcttcaactcatctcaactcattctcatcatctccaaaactttctcaatgaagtcaatagtactactattctttgttgtttcttcctgcattttaataaagtctcttcttttagaggctaggcaagttaaatccaactctcacattgttgtaatgggttttgtttactgtgacatttgccataacaacaccttctccaaacacagttactttttaccaggtaatacatatatatctcaagtacccagaagctagtttcttgtttttattaatttttgtaatttttaaccaaaaaaatagaaagaaacttgtgtttgtgttttctgttgttctatattacttgtgtagtgacaaaatctatcaataaagaaaaaatttctgaagtgcccaaatgaatgaacaggtgcagaagttaaagtagattgcatattcaaagcaatttcaccaagaacagcagaacagatatcattctcagtgaacagaacaacaaacaagcatggactttacaagatggaaataccatctgttgagggtattaaatgtgctgctgaagaatcagccatagttaattcatgtcaggcaagcttaatagggagttcttcttcttcatgcaatgttcctggttataaagtcacttcagatcaaataacagtcaaatctaaaggagccaatctatgcatttatagcttaaatgctttaaacttcaaaccattaaagaaagagactaaattatgtgggaaatcaaaaaaataagtttttcttttcaatatatagtctcactattggatactctactcccatttttcttttccctttatgtgtttgtgtgtttagttggttttagctattatatatacatatatattgatgatacatgtatagtttttggttgaagaaaaagcattgattttcccctttttcctattttggattctcagtagaaagatatgctttcactgattgtgtcaaatttacaaatatgattttgtaaggttttaaggctcaagccaaaacaatatcatttaaaggcaagcttttattattttattttttattttttatagctatggaagagttgagagtgtgatatttaggatcatggttgtaaaggcctggaatctacttgaaaagtaatgaaatttcattaattactttaatatcaattaaggaaacaacaactaaaacttttaatgtaaaacttttatgtcaacattcaaactctttcaaacataatacagatgacagagaagtgagaactcagagtaaagtatttaatagtaataataattaagacaagcagacattttaaacaaagacaaactatttgcaaaccattttacttttacatattttgctcaagaaaccttttcttttcttcattttattatagtgattgatgagaagtaaaactagtgatgatttcttggaatgttttcatggctggagctggtaaaccaactagaacattaatgcttttcctctctttcccatgtgaaaggaataagatcacttccttctctggtagagccactggacctgataaaacaggctctccccaaccgaaatctgtggagtgaaatgagagcctagaccaagttgtgatcaagagtgttgatgccaatgaaggccttgctcttgttacttcaaaataatctatagctgatctcatgtaaccatcagttaccatcttaatggcatcctgaactagtccaaccgcgaaagacaatggcttttccaagagctcaccggcttgacataaggaatttgttagcacaattccatttccaaagtacccttttggaagttgtggacaaaactttggcctcccatcaacagcaaacagaagttttgtctcttgttctggagaaagtctaagagccttggttcgagctttccacacaaatgctgagagtgcttcaaatgtagtacatttttcaagagctccattctccttagctttgttctttagcttttcaagcatttcaggatcaaaacaaaaggacttgtactgcattttctcttcttcataaaggttaatgctgctagaaatgtctttgatttcagagaattctctatgaagattttcaatcttaggtgggattctggctttgagaatagtcctgtctaggaatggagggacagttaaaggaagccctctagcagtttcaccccatgagttgacaaattccattgcagttattccatcaaccatacaatggtttacacaaaagcctaaagcaaagcctccacacttgaattttgtcacctgtatggtacataaataacaacaagtatagccaaatatgaactcaataacttctccaacaaactcttctttacatatacctctcaataaataatggagaagtaaacatattttatatttttttctttcttttttaattaatttttttattct

SEQ ID NO: 380480 - DNA, 2110 bp, Cannabis indica
ttttttttttttttcagattttagttttcattattttcgttgaacctttaactttgtgtgtttgtggttctaaatatcatgttttatctgctataataaaactttacattggaaaacctcaaagcagctcaaatagttcagtcctaggagatgaagtttcagtaacacaaaatctaacgtgttgctaagtgagctttgaggagtgtggggagttttgtatcagttaagagctttgagagggaatgatggtgtagccttctatatttgtagaagtttcaaaaaggctattacatctgcttaagatattaatggcagagagtttttatgaggttgcctacagtgattggtattgggtgtgcagcaactaagtgagataatcctgcattatgccttggttggtttaagcatgctaaatagtaggttgtggtaggcctttgaggaataacagtgacaggatctttaatgctgaaagcagcatctgagtatcccctatgaactgtgatgtccagcttgctctcaccagatatacctttttatataaatttgataattattttgaagaaatttattttctttaaatttaaagcgtatttatatttgggcttagattttttttaagccctttcgctttctttaaatgtatcctcacattgaatgtagagattcaagcaaatgtcatatttttgcacttgtgtctggcagttgttttacgcatgataagcttcggttatgattaccattgggcacatcaagattctcggtctaactataaggtactttttcacgctaaacttttatcagtgttcttaattgaaaaaagtctattttctccctctccggagtttttctataactgaaagctttctgccaagattagttggttcttactttcacatgagtgaatgcatgtttacttggcattattgtatgctttatatgtttgactgtcaaatatttaagagacatccaccctctcagttcatttattttcggttgattgcagaaacacattcaacattgtcatatctgtaaatcagggaaaatttgctaccaagttttacaggttagtttggtgtttgaaaatcaacactcctttccaatgttatttatttgtttttaagcataattcttgatagtcatatgaattgttgttacatgtacaaccttaatcaaaatgaatttttcctaatgtccaggagagaagtgttccggatgacaagttttcctttaacatatacctgtcttatttgctatatgcacctctctatctcactgggccaattataaatttcaatgcatttgcttcacaggttagtagtctttttttgtgctgtttatacttgatcctgtttctttgtttcaaggttgtgaaaatattcatacgatggcagtgttggtaattccctttttaggtagaaataggttctttgtctcctctctgttgaaagcaaacttttgatgttttaggatacaaaattcgatattttgatttctacaggacctttctttcacctaaacatttaaactaatattgttgtggacatcctaaatgaaaattcaatactttagtatgtgtgattgagtgcttccactgcaagtaaacatatgcactcttaactgtttatttattaattttttaaacaaaaccttacacttgtatatttttttttttgtctattacagtaggttgcgctgctaaaagaagaaaccttaaacttgtattaacaatatagaaataatacaaggaaaaatgagtgaaagacacccacctaaacagcatatgcactcaactagatttatatacaaggatcatcaacaagattaaatattcctaatgcttaagttggtatcgttttttaatcttaccttgatttctcttttgctatattctttcagctagatgtgcctcaaaatcatttttcagtcagaaatgtggcttggtatggtgttcgttgggtcttcagtctactcctgatggaagtaatgacccatctattttattacaatgcgttcgcaatcaggtgaatcttgtatatgttgaatggtgtactgtattttaaattttgcattgtacaaagttttttaatctagtaaacatgttgcccttctt

SEQ ID NO: 380481 - DNA, 1454 bp, Cannabis indica
aattataatcatgaaaattgaaaattgaatttcagattttgtgtgtgtaaaaaactgaccaaaccgaccgttgctcactcctatctccaaattccctggagtggcaatttatttcttcttgttgggcacgcattatctgagtctgacggtctatccactcctggaattcacgttgttgctgctcgtacgcacgattcactatactacaagttccttcctggctgctatggggcagaagccgtgcaacaagattaggatactacttgttcaaagaaacctgaacatctggaccagtaaccattggattttgaatcattggatttgactcttcttatttaaattttgtgtcgattcaccagaatcaaaaattgatcagagcaagaaggtatttcagactctcaaagaaagcaccaaaatattgacttctctttttggccaacgacggagagtcaataaagaatcaagtgagaaaagaagttttttgatctctctcaaaagcttacaaatatttctaagtatttccccctttgttcttagtgcacgaggttgaagaagcggtcctccttttagtgaatatggctcactatttataaagaaaaggctctagcctttttccatttaattaaagaatattgaatatattttttcctaaaataaaaggagaaaatcatgagaaagggaattcaagcataaaatctcacgaatctctcagcctggtaatcatatcccacaaaaatagggattctcaacaagctataatcgggggagatatttgaaaaaatatctctaaagatcttcactcggtgtatgctactgtccggaaagtgacacttgtctggcatgcctgatctactacgaggcttggggcctgttcggatggtaaatattgaaggttcaaacttaattgctctaaattaatctggtcagaattataagtaggtatactctgtccaagttgagatgtacttcaagaaagcgtatcatttcgtccgtctgtctaaatgacccatccaagtaacttgttcccatctggatatttctctgcgtaatatctttcaagctacctgaaaaggcatacatcatgtttcagatgttactcatatgataccaaatgccaaatgggtattgtctgtgcatgtttcgtttgacatcatccgagtggactatttatttatcatttatgcgtccattgctaactttacttgccacatatcgtataacatcatgcgatgtcatcaagttgattttcacgaaaacatgattcattttgattaccagaaaaatttataaattcaaacccacaaatttaaagatttgatagcgattctaaagggattttttctataataaattaaaaagggaagcaatttacatttataacctaaaaagaaaaaataaacataaatagaaaacaaaactttctatttacaaaaatacctgccaaccacaaaaaa

SEQ ID NO: 380482 - DNA, 3758 bp, Cannabis indica
tttttttaaaaaaaaaaactaaatgtcaatagctaagtgcttcactaggttcagtggttcagtggttcacttgctcttacgggttcatttgactatcggtggttcactcgatttgtggttctcttggagatttttccctctcctgttttgatttttttggatatgtgactgagttcaaaatttagattttgtggtcacatctctatttttattttgtgtgtttttggactgtggttgccctaattttttattttaatttttaatgtttgcctcagtccaagaaacgcatatacaaaaaataatttttatatttgttagtgtgtcactattacagaaagaacctttagctcttaattaatcaatcattaaaaaaatgcgtagtcatagctaaaaaaaatcgtagaacccttttagctacaattatttggacataatcgcagccatagggtaaatggccttctattcataataaaaccctaacgaatccctataatcctaacaaaaatttagcccctcagccataagaaaatcctaaaatgctaacccatctctgcttggctcaccaaccatagtcggccgccatcgaaggtatttttttcttctttttctaaccttctttctatgtgtcttatagcgcagtcactatcgtctttagcaccgccgatgcctcaacctcgaagaacctaccgttgccaccctagaatcgtttttttttctcttcttctctctctattattttttatgatctcaccattatttatattcttgtttgcatgtggttttcttatttttttttaaagaaaaataattttttgtgctaatatcattaaggattgttaacttattctggagtgtttgtgtcaaaccgggctctatttctctgtagtaatcattcaacatcagactgaaaattaagtgaaaataaataaaaatatataaataaataaaaaaatacttatggcaacagttatttggctaataatcaaagccataagggtcgaaaaactacatatatgaccccttatgggagcactgccgccatagggttccttttggttgcggtgctttttgacccctttagcgatcccagcaacgctaacaattgcaaatttcttcaacgtctttaaagagttgaaaaaatctcttctaaaggccctttttgtagtagtgtctattgaccgtctgtttaccgacgcaaataagcactaaatttcgattattaatcgactcaaacattcacctcttttgcgtccgctgaatatacgttagctataggaactgaagctaaaagtttatatgtcagttccaaacggatgtaaaaatgattttttttgtaatgttagagtataaagatttaaatttatttattgaaaatagaattggaataaacattggaattgcaaaaaagaaaaaaaaaagccctatgatttggtttaaatgagtataattaattagtttttttttttttgtagaaaagaaagccaaaaatgacaactaaaaaaaggacaaaattcccaatttcggtagcccagcccaaccattacccaatatacactatacactcacctgtacccgtacccaaacgaactgtacagtgtggtacatgtgatgttgacaggtgcccatacgctgctgattgtgcacaataaatgcagagtagtgggcgctagacaaaaaataggttactttttgtgttgtgcacctttttcaggtctaaagtggggaagaaatccctacttttgtaggattctatgccagaatgccatgttagacccatcccagtggatcaacctccataacacctcttcgacttcctctcctctccaggacgtccatggagcatccgtttatgtcttctttggcacttgatagttttggtcgagttagccatccagattcgttgttctgactttgcttgcaatcaagtcttaatcaaatttggaccactcgttcgacttcctttgtgggttgggttactgtctgttagggccttgagaatgggcctataaactgatcatttggggacattggatgctcacgtgtcatccgtcaagaaatgcgaataacatctaccccaagccttcaaaggtcgagagtcgcagaggctttcagccaccatctggacttgtggtattacacagaaccatgagcagcttaggccctttaaaattttaaagtgaaagatcgcataggctcataggcctttcaaattcaatgactttgagtgcacgtgttatcgatttcttagttcctgtgtgtcttgcatcataaggacgtgtgtgtgacctcgatttgcaaactgaagactagacacatcagtgagatttctgaggaaaatgtcattattaatgtgtctcagtttcatcaatgcatttaatggcaacctttggtattctcaaactattggatcttggaaaatgtgttctttaaagttaatccgagtcattggatcaaagacacgcgaatcaccatttgaatataaataagtgagggttcatgtgtgatcattttttgccatttcaaatttttactcaaactttttgagagagaaaccccctaaaaatctagaagtttttcggtggatgtccgctcatgcgactgaacttcaccatcgtctcctccaattcaaaacaaagtgtttgatttctagaaaaaacctcactttcagagaccgttttacccatgatagcttcatcgttgaacattccagcagacgccaacaaatttataaggcgtatcaaagctttctaaacaaggcttcatcctactgttcaagacccgatacccccagtaccaacccttacttgtaagtgcctctatcttgtactcgtaatacgactattttttgggtaggtatgtaggttctaggtagcatgctttaggctgtgatgctatgcatttttaggattttttatggattttatggtgatcatctatcgcctccaccaccatataaggcataaattttagggtttttttttctcttagaaacttaaaaattgatagggcgaatgagcctagaaattttttccatgtcttagaaaaattaacattcttagtatcatgtattttccactttgcattgttgctgaacttatgaggtccgacaaggtcttggatgctattttcgtgattggaatccttatagtgtcgaacaaagcaattttgaacctttctttattttttttttccttttgttcctgattctgttgtccaaaaactatatgttctagtacataaggtctggtgaggacctctccaagtagttactagggaggactcatgacgtactaggccttccttattttgggatctaattgcttaatgtctactttttctttttagatcgtacgttgtcagaaaagaatcttcctgcagaggacaacgaagaaaatattggagaccatgcgaggcccgggcaaaacatactcgttggtccagagatagtggaaggcctataacgtccccgtttcaagtctccattgggcccttacacccacggaatgatggctcttacatgtgagtacgtcactctggctgcttcctggattgatgactgtccctacaaactaatacgagtgttttcagcgtgctttgtccttactcacatgcttcctgagaaaacttcccaggaggtcacccatcctgaaattactctaggttaagcactcttaactgtggagttcttttgtgatgagctaccaaaaataagatgcaccttgttaatataggtagtaccaatcaatccatttaagctc

SEQ ID NO: 380483 - DNA, 4404 bp, Cannabis indica
gtcgctccggatcggtattaatttatactttctcttttacattaatgtgttcatggaagtaattatacctttgaaatcctttttagcttgaattattccaatatagattcaaattagtttaataagagttaaataatcatcaaatgtcgaactttttctttgttctttttatgagcttttcttatctgatataatgcatattagtcctgaagagactgttgtagtcttgtagagagagataataatatttatgggcttatatacctctgattactgaggctatgtgcatatgcaggctgctgattctcagattgtttcagattatgtgcgtttactttcttcatcagcacacgtgagttaattatatactttgtttgtttttagataaatggttacataattttatatgttgatgcctttattgttgttataattattatgtaatgtttgtgaacaggatacagctagggcaacctgcaactgtcaaagttgactgctaatctcatcaggcttttgtcttataataacaaggttgggaaatttagcctattcccttgtcagaataaccttcttctgctaaaaaaaaaaaaaattgaaattgctccttcatgatctttgtacactctgctcttaaaacaatgtggatgtagttattatattcaatggttaaatttttattgtttaaaacatagctttttatgtttttgttgtatgtatatagcttatcattctttttcgatattgcaggatatgttacaaactggtatgattgttggtggatgggacaagtacgaaggtggtaagatctacggagttcctcttggtggaaccatagtagagcagccattctctattggtggtatgctattcttcttgtctaatttccctctcaattttttgttatcaggctttacaatattttgtatttttttcattgttacaaatcatttgaacctctcatttgactctactggtatatttgcattgcattggctttcattcttaattggttgagactgaatgtccctcaattattttggatcatttcattttttatttcataaatagcaggatttagcatcacgttgcctgatatttaggaccttgtaaaactcttctttgtgatggttgttaccatacttctgttaagagtaagttaaactagaatcctttttgcataaattttggatatcatctccaagccagctctactgttttattgcgtcaccaaagatgacttgtttgaaaattatgttgttccaggatctggctctagttatttgtatggattctttgacgaagcgtggaaagaaggaatgaccaaagaggagtctgaggtatttatttctatcagtatgcaaatgttagaagcaacaatttcgtagtgtttacagtctcaaagaattaggcttcatatgttctaatgtcataatgtgtcgaggtttgatcattgtattaccaaatggtttttcttctccaagaatgtgtttggaagtaactgtgtaattattaggtagtataattactagaatgataattacttagtctagtaattacactttattttaaaatacaaggtgtgtttggatatgagatggtaattacatatgaattcctaacatcttatttggcaaaattgttagtaattatacgggaaaataatattatttagtagttaatgtttaaaatgtaaaatttttagtaattacactcaattctcatgatgcggccatgagaattggagggtgtaattggaacccctcaattacctccaattacacaattatagtgtaattacatgatcagacaaacatgttaaattgtgtaattacctctaattacacaaattcaattacaccgtgattttccaaacgcgctccaaaagtgaggtttcctaataaacttggggaggtcacatatgacatttgtctcattttcaatttaaaaattaatgcttgaagcaacaactcctttgaattgatttttggtgttagtgggttcctgatttttcacgagccttgtccatgctacaatatatgcatttaataactagcatggtgattgtatagatatcttgattgccattgctaattcccaaatggtagtcaagggattttttttttctttttactttcctaatatttattttattctctggtacaggaactggtggtgaaggcagtttccctggccattgctcgtgacggtgcaagtggaggtgttgttcgcactgtcattgtaagagtttccctcaaaactgtgatttcgatagtaaggagaattaaaattttgcaagatagcttacaagttttatgcttttgcagattaattctgagggagtgacaagaaatttctacccgggagaccaacttccactctggcatgaggagctggagtcccataattcgttactggacatattgaacgcttcgagtccagagccaatgaacatacaatgatgagcttgctatcagttgttactgtttacctcttctcttctgcaagactttagtatactttaaactagaacagatatttcatctcagctctgaatgaattattattgtattgtgattttagattatgtatggtgcttaattttaagcttacactttcttctcgttcttgccctatacacttgtaaattcttatagttctctactgtgttgaaggtggtctggttgtttattatagaggtattatctttatagagtgctcgagtttgaatattgttttgtttagttttaagatatttttttaattcacaaaattacaaagaaatgttttttaggttctacatattatgtacatgttgatcttacaatacgaaaacaaataacaatgcacacattatattagaatgtcacctcaaaccggagcgaaaagcttaaccaaggattttatcaaatttttattgcaaattgttgcaaaactatcattaagcatcattttgttatcatttgttttttgcttgaagcgtctcttgtgttattgagattttatagtcgtcgctaaactatcgttatgcatcgtttgattttaataacatgtttttctggttctccttctgtaagggagttagcacctgctgttactaacatgttttgagttgtgtttttttaaataaaggtcttcgttttagcaaaaaaaaaaaaatatccgcatgacagattttttaaatggtaatgggaggtggtaacatctttagaatgaattagatttgcttcaattggtgagggtaaatgagaaactatgaatgtatgaaagtttagaaagagatttttaagagtgagtcccacaaattagagagactgtgaaaaatgacagatgaatgatacatgttttgcctacaatttttaagattggcatattttaccctagtagaatatgcctatatgataagtttttgtccatttgaaaaacaataaataaaaaaaaaaaaaaaaacctagactcaaattatataacacaatccaatgattcaaaatagtgtgaacaaaaatactaattaactcaaaatattacaattcaatacacatctaacttgaattataactcctaataatttataggagtccaacataaaataatacattctagttaactaaaattatatacatctttgagagagttatttttgtctaaatttctgagataatttggtcttatataagttgctttgtagtgactcatattctgactttgtatatctttggttagacaattagcttgttgactgaaagtttctctgcgtcagcgattatcatagtgtgattttaatcactctttcaaaaaaaaataaaattatatacatctttgagagggttatttttgttgtgtgttttgcttttgagaatgttggcttactatttcaatttttacaccagaaagatattatatgagagactactatatatgtaaatccaagatttttattatatatacatgtaaataaatatcacataagaaaataaagaaagagtaaaaactttatagccattacaattaaagtttagaacatatctttgatgggcagttttgttaaaattactacaaaataagcatacaattctcagcaataaatcaatacaaaattatgcccatattatccaacatcaaacattttatttagaacattgatttggaaataaacatatcttttaaacttggcagtgtttttccaatgaccatctcaatattctagcaattgcgcgcaaatctctacaataaccacaaaaataaatagaaaatatgcaaaaagttttatgaagagcaacccttaacacattactattctcttccatttttcacccaccatccaatatatacaaatatagagaaatttacatacattattaacatttctcaatttattacacgcttattgttacatttatacttttt

SEQ ID NO: 380484 - DNA, 2397 bp, Cannabis indica
tttttttttaatttatttaagaatttgagatgtaacatttttttttacaatgcattctgtattatgtccaccacgcacgctatttcaccaacaaagagccataacttctcatcaatggcgggcttggcgaagacaatgacagagtttgattattgctgagtgagctccgacatcaattctaaattctctaaacacgtcgttgatgtacgtagccgcgatgccactgacgacgacgaacaaataaagcacagaagaggtaattcatatcaagttttatatattttataatttccatatgaatttaattaattttatgtatgcttttgaatttatttttatttttatatgttagtttaattttgatataatttaggtatacattgagtatagttttaataatacaatgatgaggattgaacacaagttaatagattttgagtaagccataatcaaataattagaagaaaaataattgacacgaaatttattgtggttcaactcctaatttcttaaaagttatgtttttcaagagttattttctcaaaatatacctctttacaaatgagcaacttagctatgtagtgtctctaatatcttccattttacttgaaaaatatttgcaaataaaactaacatttcaatttagatatctaaccaatccaacatcagttataatattaatataaaatttaccaataaaataaatatctaaatttaaactctaaatactcctccaagaaattcttgtgggatatctgaaacctctagactattgaacaattactctcatacctgaattggatggatcaaatcatttaaacatcatgccaaatatatgctccaagacctcacatttaagccatatgtactcgaaccccactttaggtgtgtggttggatgtaataaaatagaaatgaaataatttttattatttaaaagtattagaatgttattcccattctagatctagttatgttttcatttcttctaaccaaacaacacctacttggaaatacaaaccccttgtgggacgtttggtatgagatttagatttgataagaatgaaaatataaaatttcaattaattaatttgaatagagggtttgtgtttccaagtaggtctctctttttaaattaatatggtggtaatattaatcccctcaaatgtatgggtttcatattccctccaagtctactcttttcaactcaaactcacgtaacaaacatccaattaggtggcatttgattggaatgaataaaaacatagctagaataaaaatgacagtctaatactttaaaataaaaccaaacaaatgaataaaataaagttatttccttctattccattttcatttcattttctctaattaaaccctaccttagtcattaaaatttaatttaagtttgacattctctatttccatcaaatttaaacctcataccaaacaccttaatgattgatcactcgggtaccattttaatattgctcccacaatgccccgagaccaacctaaacttctcatacccaagtctttcatactagaattaagcccaggtaccatattgcccattgctccatgtttgtcaattttcttgacacataaccgagccttacatttccttttaagggctcgggtacatgttgatcatgtatgctctcataagagagccatttgttgaccatatgtgctcccttatatgggagccctttgttgatcacgtgtgttctcttacgagagctactttttgatttaagcggttatatattacaaccatgttttacctgggactcgaacccaggacctccaagacacacacgcacccacctatgaccacttgagctagcctcaagtggtttcttacgagagctactacactttagaaataagctcccgaattcgagtcacttctctttggagtgtgatgggatttgaatattgtgacttctcattataatcaataacacattgtattttgagcataaatttagttatttttgtacgtattatttcagtttcttttgacatgttttaaaattgtaatagtaatttcttttgaggtttgttttattatttttttttaattattttgtattgatatctgttatttttaataattatcttttggtatggtattgcaatgatttgatttatagttgaataaatgtttttgtttattttttaatgcaatgaagtgatgtatataaatatatatatatatatatatatatttatatatatatactagataagagttacggggcgagccacttaaatattagttttatataagttttagtggtttttgtttaagaatccagtaactgagcaacggcaacaacaatggtagataaatctatttaagttttcatatttgtaaagattataaatctaaact

SEQ ID NO: 380485 - DNA, 2321 bp, Cannabis indica
aaacgcacaaagatttattatgactacaataagcatgtaaataagttattagaattataatttctccagaacatatcttacaatatatattcactaccatagtcatgccaatcaatcatgcacactatattctaagaatgaaagataattttgccaaaaaaaaaaaaaagaaagaaactctttggtgggacttttaatcactcttgtaaattatttatgattaatttaataccctttatgacaaaactattatgatttgaattctgtaattaaacaagacttgtcccaagtcttacctactatgcatgcgttacgcaagggttggatacctagaattaccaaaccttatgactcaatcttacccattcctttctataaagccttaactcaaaaacatatttcttttcaactaagctcttgcccgaaacgacaccacaccacaccacaatccttatggctcgtctagaagctcctcctcccaccaccacaaacgacaatagtcacttccctttcttcaaccatacgacaccaatcaacatggagctcagagacttcaaaccaaaaccaaaaccaaaatcaaaaccccacaccaaaataaacccatctctcggtgagcttctaaaacgagttgaagagtctcaaaccaacaccccaaatcatcagattctcgaccttagttcggtacctcagtcctatcctttcgtcctttcctttcataatctcacatacagtgtcaaagtccgccggaaattggctctccccttcacaaaatctgccgaaaacgactcctcctccggtactggtggtgatacagaaacttccttatgtaaaaataacaacaacactaagattttgttgaatggcatatccggtgaagccagagaaggcgagatcatgggcgttcttggcgcaagtgggtcagggaaatcaacactaatagatgcattagctgatagaatctcaaaagagagcttaaaagggttagtgagtttaaacggagaggttttggagtcaagattattgaaggtgatttcggcttacgttatgcaagatgacctcttgttcccaatgctaacagttgaagaaactctcatgttctccgccgatttcaggctccctcgctcactctccaagtccaaaaaacgagccagagttcaagctctgatcgaccaattaggcctgcgaaatgctgccaagactgttattggtgatgaaggccatagaggtgtgtctggtggagaaaggagacgagtttcaattggtatagacataatccacgatcccattgtcttgttccttgatgaacccacctcgggtttggactcaacaagcgccttcatggtggtgaaagtgttgaaaaggatagcacaaagtggtagcatcgttgtcatgtcgatacaccaacctagttacagaattctcagcttgttagaccgtttgatcttcctttcccacggccaaaccgtctacagtggctcccctgctaaccttcctctgttcttctccgaattcggtcacccaatacccgaaaacgagaacagaacagagttcactctagacttaatccgagagcttgaagaaaccccaggtggaacaaagagtttagtcgagttcaacaactcatggcaagccaaaaccaacgacgaaaacaatcccaacagaacaacaaatagaccaaagctttccctcaaagacgccattaacgcgagcatctcaagaggaaagctagtctcgggagcaccaaaagatcccaacaacacaacaacaacaggttcattccccactttcgccaaccctttctggatggaaatggtagtcatatcaaaccgttctgttacaaattcaagaagaatgccagagcttttcgggataagactcggagccgttttagtcaccggtattatactcgcaaccatgttctggaaccttgacagctcacctaaaggagtccaagaacgactaggcttcttcgcctttgccatgtccacaaccttctacacctgcgcagaagccatccctgttttcctccaagaacgttacatcttcatgagagaaacggcttacaacgcctaccgccgatcctcctacgtgttagctcactcactaatctcaatcccatcacttgtgtttctctccttaacctttgcagccaccactttctgggcagttggactcgcaggaggactctcgggcttcttcttcttcttcttcacaatcttcgccgctttctgggccggaagctcattcgtaacattcttgtccggagtagtaacccatgtcatgttgggatacaccgttgtggtggccattttagcttactt

SEQ ID NO: 380486 - DNA, 1930 bp, Cannabis indica
tataatttacttataaatccattagtgaacaattgaggaaattgtctaaggacaacaaaatcatttttctattaaaaaatcttagaaggagtcaatgaaatgacacgataagtaataaccgaactacttttaataccattagatatcagaaatcaaatgttctcatatgctttcatttagccaaaatgaaacaaccaaacactctttttctttcatatatatgtagctaataatgccaaaaaaaaaaatatgccaaaatgacttgatcactccttttcattagttctatttttaataatcttcttcttcactgaaatcttgaggttgcatcttcctcactcttctttgaaacttccattcttcttgctctgatgcatgacaatgtgctggttttggctcagtccaagatgaacatggtgcaggtttatcacaaacataacaatagcactgcaaatcaaatcaaatcaataaaacacaaatattgactcaatttggtaccacaaacaatatcaaaaattaagttttaccaattcacaatagctttcatgagaggtttggtcaaatgggtatttcaaacacaaatgccttgagtgaggataatccctacaagccacctatttaagaaaaaagcccaaaatatcaaaagggtatctctaaaacaagggtttcaacaaaacccaagtcgaaagattcaatcttttttcaaatattttctcgggaaccaaacagaaaatttgaaaaaaaaaagaaaatcaaaccttcccttttcggctagaacggttaaatcagcactatcaccaccaccaccatcatcaccatcagcttttcttgaaacagaaagattagatatatcattagatggatcataatctagaatgaaacactcctcagtctcttcaaatcgtttcacatcgtaaggattcttgagacaaaggatttgttttattggggttacggtatctccctccaatgtcgttttgacaaacactctcttctctttctccgatgaagatggtgatatttcgatcacctcaattgtttcctccattttcgattttcggtctctgatcattgtcgaaatttgaatcgtcggaagaatctgagagcaacgcaactgaactgtggagcgtctcgtgtgtgtggctttttagcagaccaaaacgacagtgttttaaatgttttaaaccaaaacgacattttaagataaacgacagtgttttaatacaagcgacattattttaagccaacgacagaaagtgaaccagcccatacttgtttaaattgggcctgggctttaacattatgggaaatttaataaatacctaatttacattacatttattgatatttacccatgttattaagtttattactttttttacccattctatttttattttatttttttatggaacttttatttttatataaatctttaaaattaaccttccgtcacttatccaaaattattattatattttcaatgaaaaaaaattggaaaaaatatatgatttgcatatacatgaattagaaagattaataattttacttagaagatacaaatagagttacataatgaattaagttgtgggtaagaatgttgaaatgaccaataaaaatgtattattgttaagacaactttcacaatccatttactgatatttacccatattattaactgatttttaaatattaaagacttttttttttctacataataacattttgaacattttgtatgatcgtattaattaaggtaaactagctaatgttgatgcacatatctacaactgaactaattaaaggtgagcactataactggtacacaataaaaacgaagaaatagctaaaaggtatacagtggtgcctatcaccttcctatgtgttaatatagctattgatctaactaagtattgggtctcatataatt

SEQ ID NO: 380487 - DNA, 5018 bp, Cannabis indica
gatgaagaagaactgaaggccaaatgaaaaccatgtctgagattatctattcttgatgtttgcttccacagaaggagtttgttggtcaagaactgctgagaggcagacttctaagatgagaagaaagtatctgaaatctgttctcagacaagaagtcggtttctttgacacgcagatagctggttcttccatgacttctcaagtggtgtccgttatctcctctgatgctaatgcagtccaagctgcgttgtgcgaaaaggtttgtttttttttttgttgagcacctttcattattcaaatcaaatcttagtaaaaattgttaaacaagagtttatgaacatttcttatgatcagagagtggtgagatgccaaattgagtagtatctcagctaaaaatcaaaactaaaaacaactcctatcagttataacattctcacttatgttttaatattctaatgaattcttatttttacctgctgtagattcctaactgtttggcttacatgtcaacctttcttttctgccacatatttgcctttgtattgtcatggagactcacattagcagcaatacctctttcgattatgttcatagctccaggtctcttttttgggagtgtcatgatggggtatgtcatgaaatcaattgaagcttatggagttgctggtggtatagctgaacaatcactttcctctataagaacggtatattcttatgtaggagagatcaaaacactaagtagattcagcattgcacttcagaaggttcaggaacttggaataaaacttggtctcacaaagggactgatgttggggaccatgggagtcatttacataggctggggtttccaagcctgggttggaacttatttgattactcaaaaaggagaagagggtggccatgttttcgtagctggattcaatgttcttatgggaggcctgtgagttatttttctttttaaaacatttcattttttatggaatataatattgacaagattcacttacttcaatttggaactcacaacttcattttgttactttaggagtatattgagtgcactcccaaatttaactgccatcacagaagcattagccgcaactactcgtattcatgaaatgatcaatcgagttccagctatagactctgaagatagaaaagggaaggctttatcacatgtgaaaggagaaatagaatttaaagaaatttactttagttacccatcaagaccagatacaccggtcttacaaggtttaactctgcatgttccagtaggtaagagggtaggtcttgttggaggcagtggttctggcaagtctaccatcattgcgttgcttgaaaggttttatgatcccacaaatggagaaatactcttggacggatacagaataagtagacttcagctgaaatggctgaggtcacaaattggtttagttaaccaggaaccagttctttttgcaacatctatacaagagaatataagtttgggcaaagaaggtgccactatggaacaagtaattattgctgctaaagttgcaaatgcacacgatttcatcgtcaagttgtcagatgggtatgaaactcaagtaagcaaatgtctagatcttcccttttcatttttcaataccttcttttctccatgtttgctaggtgtatgaaaataaagaagctgtaaagtatgcactcaaattaggattgacaagaaagaaagttcttctttaatgcaacaccaatcaatattattaatggcctctagttaaaagttagttttaaaatcttctatttatttttgttctgtgtttttcatctaggttggtcaatttggattccaaatgtcaggtgggcaaaagcaacgcattgccatcgcaagagccttattgagggatccaaagattctgcttcttgatgaagccactagtgcattggatgcacaatctgaaagagttgtgcaggaagcaattgatcaagcatcaaaaggaagaaccacaatcacaatagcccatcgcctatcaacaattcaaacagcaaatactatctttgttcttgaagcaggtaaagtaattgaatcaggtacacacaatgatctgatgcaacgaaatgggggacaaggaagtgaatactcaaagatggtaaacttgcagcaattgacagcacaaaatgattcgagtacagaaatagatgaaacgcctcgacgcgggaagaatgtcaccccaagcccacatagaactccttacagtgttagatcaagtgctccaggcactccaacattgtttccttttagcacaacaatgtctgcctcaatgggaaccccctactcttactctgtccaatatgatgttggtgaggaaagcgaggaagaatattcgaagtattcatcccagaatctttctcaaatgcgtttactgaaaatgaatgcacctgagtgggtaccaaccatacttggatgcttaggggcaattggttctggcgcagtacaacctattaatgcttactttgttggatctcttatatcaatctactttcttaaagatgaatctgaaatgaagtccaaatccagagaagtatctctcatttttataggtattggtgttttcaacttcttcaccaacatcctccaacactacaatttctcagttatgggagaaaaattaactaaaagagtaagggagaaactacttgaaaagttaatgacgtttgagattgggtggtttgatgaggatgagaatacaagtgctgcgatctgtgcaaggttagctactgaggctaacatggtacgatccttggtcggagacaggatatcattgcttgtccaggcaattttcggatctgtctttgcttatgggcttggactagccctcacatggaggctaacacttgtgatgatagcagtgcagccaatagttgttgggagcttttatgcaagaagtgtcttaatgaagagtatggctggaaaggctcgaaaagctcagaaggaaggaagccagctagcaagtgaagctgtcatcaaccataggactatcactgccttctcttctcagaagaaaatgcttgcactcttcagtgcaaccttgaatggtcctaagaaggaaagtatcaagcaatcatatgtttcaggatttggcttgtttagctcccaattctttagcacagctgctacggctttggcttattggtatggtgggaggctactagttcaaggcctgataacagcaaagcacctttttcaagcatttttgatattgcttttcactgcttacatcattgcagaagctgggagtatgacatcagacatatctaaaggaggcactgccatccattcagttcttcaaattttagacagaaaaagtgaaattgacccggaaagcaaatgggggattgacttaaagaaaaaggtaaaaggtcgcgtggagttaaaaaatgtattcttttcatacccaacaaggcctaaccaaatgatccttaaggggctaagccttattattaaagagggcataacagtggcgctagtaggtgagagtggttctggaaaatctacaatcatcgggcttatcgaaaggttttatgatcctatgaagggatcaatacacatcgatgaacaagacattaagaactataatgtaagaactttaagatcccatattgcacttgttagccaggagccaactctttttgctggaacaattcgcgaaaacattacctatgggacagacgaagcttcagaatctgagataaggaaggcttcaagacatgccaatgctcatgagttcataaggtatggaaacgaggtctaattattagtttcaaaataaaaataagtagttcacaaaagtatagtaaaatgattgttttctttttaaatttgtatgaaattacagtatcaggacacagagatgtgatccaatgttgctggctaaagaaatagttttcttaatcgaaggacatgccaaactcaaaaaaaatggcttgaaatttgaaaaaataattatgaagaaaggattttaaccatgtcttcatttttatagaatgagactaaaatatgaagccatattttctagtgctaatattcatatattttttgttggtttaattttcttttagtggacttaaagatgggtatgatacttactgcggagaaagaggagtgcagctgtcaggtggtcaaaagcaaaggattgctctagcccgtgcgattttgaagaacccgtcaatcctcctactagatgaggcgacaagtgcccttgacagcatttctgaaaatttagttcaagaagcacttgagaagatgatggttggaagaacatgcatagtcatagctcaccgactatctaccatacaaaagtcaacctcaattgcagttatcaagcatggaagagttgcagaacaaggttcacacaatgaattgatttctttaggacgtaatggggcttactgttccctgatcaaactacaaaatagagctttaccatagtaaaccgggagtggcaaaaaattatggaagtttcttataatgcacaaccttaattatcatgcatgcctcctatgaatatgagacgactctagataggtttttataattaatagtattgtaccattaaaatttctcttgttatcaactatatgcatccaatgtttttggttgagaatggtggacaaaaaaacaagttttaccatgtaatatttttctatagaaaataatttgattatttttctacgaagaagtagcaggctcattgtggtatctgttaacccaaaaactttttttggtgacgtggatataaatgtttgccacgtgacatgaaggatgacgtcacagaattgagcagacccgaatcatagcagtcaacttgggaggggaccctagccctgcacccaggttgactccgggatggaagttcaaatttcaataacttgaatcaaacccactaactttccatattttgtaccatgaagacaaggagcaacctaatccaagcctccggagataaaattacaccaacctactgttggatatattttac

SEQ ID NO: 380488 - DNA, 4343 bp, Cannabis indica
ggcctacgttaagttttcgggggacccaaaaattaaaagaaaatgacatattatacatacaataacaaaagaagaaaatatattaattttacaaagcaatattgtcaatatattaaaaatagtttaaatggttagattgcgttcattcatgcaacaggtcttgtgttcaacacttgttgtgtgtatttttcaaattagaaatttatagcatttattctctattttattctatttttttatctttagtaaatatttatgttcataacactaattcaaatcttttaagagtttttaaatattcaaattgtgagcatgtatgcccttaaaaagctctgtggtagttagtttcccttttttcattttaactgttttaactacctctcctttgatcattatccctaatatttccctccatcgtttactatcacctcttaatttgaatattaaccgttccctcctcttgtccctttgaatttctgcacttccatttcctgtactcatgcaatttctctgatctctttcatggaccacctcttgcacgatatgaatcattctttaattctcactgaatctgaaagggaagtgcatacacttcctgctgggtttcacaatggcagttcttctcagtcgagccatgtcctttacgctagggtcgtatcttcacgggatatcaataggaaaacatttcgtattaagatgagtggcttttggaaaggccagtatcctgctacgattacagatcatcattctgggctttttcttgttacttttggatgccttggcaatcttaagaaagtgttattgctggagccgtggcatttccagaatcatcttattgtgttatcctcacctactactcttcaatcgcctacaccagaagcaatgtccctcaccccattttggattcaattgcataggctgccgtttctaagtaaaaccaaaacaatggctgaatgggctgggaacctcctcggtacctatgttaatgtccatgaagactccttgaatgaaggctggggtccttttctgcgctttcgtgccattcttgacatctccaagccgttacttagagggaaaatggtgaaacttaaggactcacttgatgaattttggctgcaatttcgttatgaacgcttaccggagttttgctttgaatgtggcatcattggacatccttttgaatcttgccataagtttctaaagaaaatttataatggaaatgatccctcccttgcctatggtcctgctatgattggttctcctcttcccgagtctgattatgaccgttataaaacagatattttaagggtggagcatgaccattaatgactagacttgctaagaaatcatttgcatatgctattcctaatctgtccaagagacctcttcctttgccacctaatatgactaacagagaaacttcatcgtcctcaaactcaccctcacattcgcatgttccaacatcatctatttccccatccattccttacatcacccgcctcatgcattaatcccactaatgatgtctcagttattccattcccttcatatcttcccatttcgcctatgattgccacttatccaccaaattctctctctgttaagtcatccactcgctcaccatttgcgcctgttacatctcctttgatgcctccgagttatagcaccattgtgtccaccaatccttctgctgcaattctgccatctccacaaaactctaaaggcaaagctattcttatttctgaagatggatctgaaaatatcaatcccaataaacagtttaagagacaaatagattcaaaatcacttcgaaatgttcttaagcattgtcgttcaaatgctattcaaatccagtcggattcttcagcaccgagtggtatcttcctgactccaactgtttccaacaccagcactctagattcagatgagtctcatcctgaaagtgcagcggttgtagctaagcaacacctcgctcatccatgattttcataagttggaatgcccggggtttggggaaccagagtgcattcaggcattcacgcttgcttgttcaagagcaagctccctgtgttcttttcattatggaaactaaattacaatatggtagtatagattagtttcgtagtaaattgcattttcctaatggtattgaggttccaaggcatgggcaagggggtggacttatactcctttggaagtcccatgttactctttccattaacaattactcacttaatcatattgattgttttttggaaagtcaagatgggccatccttacactttactggtttttatgggcatccctgtgcttctcaaagacatcttacttggacattattgcgtaaatgttttgatatagcacccttatctccttggctagttttaggagatttcaatgaggtcctttctcatgatgacaaaattggaggaccaagaaagagtgattctcagattaatgcttttcgtgctatggtagatacatgtaaactatgccaaattccttttgaaggacaaaggccaacttggaaaaataagagtcatggaagtgggaatgttaaagaacgcctggactacggtttcactaataaccattgggatactactttccttgcaccatctttgaagcatttggacttttatagttttgatcatagagctctcaaagctactgtcactgctcttatggatcggactgatgttactgaattcagatcacggtttagatttgaaaaaatctggttaaaggaagaagcttgcgctgatataatccttgccaattggaatcgggacaccaatagccctttggttcagttaaccaccaatatctcgaactgtgcatctagtctacagaagtggcatttttctaactttgataatctgagaagggaaataaaggagtctcatgaacatgttgcagccctccagaattcatcaaacactgaacctcagcattttgctgcgcttaaaaattcagagatgatacttgatgatttgttagctaaagaagaggattattggcatcaacaggcaagaatttcatggatgcaatcggctgattccaatacgaagtttttccatcagcgtgctaatgccagatcagccagcaatcgaataaaagagctcaaagatgcagcaggcaatacgaaaaccagtgaacctgctttgcttgatgtaattacaacttagtccatttttcagcagccaaggagttgatgatcatgccattaattctatactagaagttatccccactgtgattgatgcaaattctagagataccatctcagctccctatacaacagccgaggttcaaaatgctctcaatacgatgagtgatgacaagagccctggtttggatggcatgtcagttatgttcttcactaactactggcatattgtggggtcccttgttacggaatcggttttagatgttctcaacaatggtgcagatcctgctctcctcaatagaacaattatcacactaattcccaaagttaaaaagcctcaattcatctctcaatatcgcccgatgagcttgtgcaacgtactctataaattggtttctaagtcgatagtgttgcgacttcagcctttcttaccattggtgatctctgagtatcaaagtactttcatgtatcaacagttaataactgataatgttctcattgcttttgagttgttgcactcacttaagaatcgaaaatgaggctcacagggatatgctgcaatcaagttagacatgtcgaaggcatttgactgagttgaatggacttatattgctaaaatcatgttgaaaatgggttttggaattatcattgttgatcttatccttcgctgtctacagtcagtctcctattcatttctgctgaatggtaaagttcttggagatttgatacccacccgaggtatacgacaaggggatcctctctcgccatatctctttctcatttgtgctgaaggtctctcaaggttgctgcaatctaaagaaaacaatgggtctttacacaggttgagagtgtcaagaactgctccatcagtgtcacacttgttttttgctgatgatagtgtactcttttgtcgagctaattcgcaatcagccaggtctattcaacaagtgttggacatctatcatcgagcaagtggtcaagcagttaatctggataagtgtgtgctatccttttctcccaacacaagacatcataatcaaagctacttccaacaacttcttcatatgcctattcaaccttgccatgaggagtatcttggtttaccatccttttcaggtcgtgataagaccaagctctttagtggaattacagataaaatttggaagttgttgag

SEQ ID NO: 380489 - DNA, 3518 bp, Cannabis indica
gtattttacaatcaattaataaattaatagcttcaaggtactaagttcaaacccattaccttttcctttttccaaaccctccctcaccactaagctaaccttagtggcttaacattagtggctttgaataaattttgttggtaagtgcatatataatatattacatttttatgtggacaaagccatgtgatagatgccctacattggtatgtactatcttacacatttagatttttccaagattatggtacgtactagaaataatgttaaaaataacagaaatgctaaagaatattagtttaatatttttataaggtataatattattattggtgtaatttaatatcgaatcttatttattttactttaataaatattataaaaaattgctaactaattataaggtaacactttattgtagtatttgacatcataagtaagtgcctcataataatactctaaatataagttggtactcctgttttgtaaggatgaatttaagaataaaacattattagaagctagctaaaaaatatagcaccaatattattacattgaagaatcccaatttgtaaggatgaatttcttccttcttgccatgaaaacatttagcaaccatttaaaaagaattatggcaagacgaattgtatggagtagtgcaattacaatcataaccccgccccaacttattattaaaatcaaaaccacacgaacgacaatgttcatattattatttggagcgacaacacaaatagcgataacataagtaatggtcatagctgttatggtgacccacaaaatcacggttagaatccacatgaagaatttgcgacaaaaaggcaagcctgtgacgagtagtaagattatgcttaatgatccaacaaaccctacagtgttactatataagtatgaatgatataaaaaagttttgttcttgtagtaacccattattgactctccagcaaagtgatgattagatggagagtcggctattgtgacattggaaactggcgtagatgagttatcatcttgccagagaccgcctggaggatttgttccagcctgaaaagccatggtggcaatgagggatgcgacgaccattagtgattctcgctttctagttagccaattttctggttttcttactttctcttcttgaaatttctcttttcggttaacgtgatgaactttgatgttatttatgacttgattaggtctatgtgttggtaagggtggatctatggttcgtgaagctcccacagatcgaagacattctgaaatgtcaaaatctttctcgcttctttgactctgagccaagatgtctaaagctgtaaatttgtttgcgttgacatcattaacttcaattctagtatttgtaaccaaatactttattatctgatcaataagcaacacaaagaaactaattaagttattttaaattatgtagctatagtatttggtaaaatattgtttttagtgatcactttgcataataatattttatttattttgtaaaataatctttagacattctcagcacttttacaaaaattctcaacattccgatagaaggttatgataatgtaaaaaattatgggttaataccattttggatcctgtgttttacaaaaatgttaccgattagaccatctgttttattaaatgacaaaatagaccttgtattttccaaaaggacataaataggatcttgagcttaatttttgataatttttgtcaatataaccaacttgaataatattcctaacatgtacagatgcaataagttttgttataagacatagatcgagttattattaagttttattttgacagaaaattaattcaaggtactatttagtattattttagaaaatatagagtcttaattattatttattaaaacagatggtccaatcagtaatttttgcaaaatacataatctaaaatgttattttaacaaaaattaataagtaaaaatattaatattagaaaaataatttatttttcatccaatactcctacatagtgtaaataacaattgaaatataaaacaaatgtaatccccataaaaattagtttgtgtaacatacctcgatttgcttaagagccacagctaaatgtaaaatgttcatgccataatcatccttagcattcaaaaaatgataatcatccataacgttcaccataaacttcaaaacttcgaattgattatatttcacacaaacatgcaaaatattttcactccggcctgctaaataacttgacctgccttcggagccactctgagtagctctctcaacacgtcaatttttcctctcatagctgcaaggtgcaaagggtttctcccttctctatcccaagcataacacaagacttcatgatcaatatcattcgaaagtaatactttgatcgtctcaaggtggccttttgcagaggccacatggagcggtgatgaaccccacatgtcaagttctttggcgagctcaggcttgcgaatgatgatctccttaacaaaatctacatgaccgagcatagccgctacatgaagaggagtctcagagaaattattattattgttgataaagatgagcctatcgagaatcaatctgtcttgttgaagaagttctcgtaaagtgacaacgtttccttcgtgggcggcttcatatagcaaactaaacattctctccattgattaggttataaaagaattatgaaagctgagtttgttagaaggataatttgttatgaaatagctctttaaaaagcttgacttgctaaataatgataatgaaataatttcttgtaagagaagtcaatgaaatgaaataaaattattcacatacgttacatatatccacttcaacacttgttacaattttatataacctttcatacgatagcaaaatgtttcaataaaatatatgatatttttttttatatattaattttatccatttgaaggtaagtggacataaataattggaagtcaatagaattaataaattggcactagactataagaaaagttacctagtgaatagaatttttgtgactaaaaagtaatacactatttaaatacaaattattactaaaatttcattttattcacaacaaattattatcattattatgtaaaagaaaaaattaccctcactattagtgtggcactttttaatgataacataattaagaaaacaaatgtatatttttagttacgacttttttaattttacttacaaattttttttagtgctgcatagacagcttaatagttcatcattaattaatagaaaatttcaaatttgtatctctcttttctcaacatatatatatccagaaagaaatattgggcatcaattggtgatgagtttccatattgattttaaaagggttgcataattcagtcatgtttattatatactttgataaaataataataaaatataagtaataataatatatacacatataaattacatacaaatttgacatatatttataactcattcttaaataaa

SEQ ID NO: 380490 - DNA, 2585 bp, Cannabis indica
ctttggctcggaattgatctggttgatatcaactgctcatacttattaagactatactttaaaaacgtgtagctgcttgataatatctaactgtgtttgttgagcttaatgagtattgccggttgctttggtatgtgcgtattcatgtttcctgatctctcctttagttttgatcaaatgaacttcatcttggattcgtgccgtggatatattaactaatgctttgttatcctaggttcttggtgtagagaaatctgctactcagcaggaaataaagaaagcatatcacaaattggcattgcggctccatcctgataaaaatcccgacgatgaggttggaaactcagtttagttaatgcagggtcgtatgattctatagtttctgtatcttatagctgtaatttgctaattttctttttgtaggaggccaaagaaaaatttcagcatttgcagaaagtaatggccattcttggggatgaggaaaagcgagcaatctatgatcagactggttgtgtcgatgatgctgtaagtttcattgaagtttttccttaaaattattaaagaataatcaaggtcaatgctttcaaatttgccacagtaaaggttaattaattaaaacatacataatatttatgggccattgttgctacaagtcctttataaactcatttatccttgttacaattgcttctttcagtaaaataagtttcttattttctgtatttttaaatggccaggacctcgcggatgatgctgtccagaatctgcatgagtttttcagaaccatgtatagaaaggtcatatcatcttgtttgtagtaatcgtttctctttactttctaatattaaatctgttttctgtttgctgatgatagagttgcatgtcaactgcaggtcactgaagctgatattgaggaatttgaagcaaactatagaggaactgattcagagaagaaagatttgattgatctttacaatcagtttaagggaaatatgcctaggtatgactgtactagtataattcaatccttagtgaataatgttctaccaatttttaatcttccctggccctttttgtaggctcttttcttcaatgctatgttcagatccaaagctcgactctcacagattcaaggatattattgatgagacaattgctgcaggtaggccttctataataattataattaattttttaattttttttatttttttagagtggtgttgggtttggagggggaagttatgagattatttgcctttaaccttgtctactaaaattgtagctttgcccaaaccaaagatcatgtttgtcgtattaacaattcttctaagaatgaattattacccattccttagatctaacttgcaactagagcttggaatcaacattggctgattaattgcagcttaaaaatcccattacataattgcaactattgcattttggtttcagtttgagatggacacctagccttaatcttttctcatatctgataccagtgttgcattttttaagtgcatattccttatttttcattctactaacatctcttcctcataggcgaactgaaatcaactaaagcatatcgcaaatgggcaaaaaaagtgtctgaaacaaaacctccaaccagtcctttaagaaggaaccgcaagtgagtattctacttaagctttgtgctttatctattctgtggtcaaaacaatataaaaaaattaatacaacttgaaattttcacagatcaaataaagagtcagaatcagatctgtatgcacttatatctcagcgccgagtcgaaaggaagggcaaattcgattccatgttctcatccctagtgtccaaatatggtgggggtggttcttcttctgaacctagcgagcaagaatttgaggctgcacaaaagaaggtcgaaagccgcagggtctctcagaaatcgaagcgcaagtcttaactgtcatcttgtggaggttttggtccatttatgtataaatattgattctgtatacactactgtctgccaatgcctaagtgtgtgaagtatttggctgtgtcttgattcaagattttagagcagaagaagaaacataatctgacatgtcttgaaatgcttatgtgcttatatcaattagacaatataaattatggtgtgtcatggtacaatttgattgctaatgattcaagtttttagcagcggtgtaattagatagacaatctttatttgttgagatatcattgttttgagttgttaaatgggccttgaatgattcacaagtagttgcacttgaagctttttaattttttgttgaccaagtaatcctaaataataacatgaaaactatataaaaagggaaataaatgaggaaagtggaaaggtataactctccataattggctattagccagccatttgcataatgaattttgctaaatttggttgtagtattttattaagtgtgaagattttgtagcacgtgtaaagaaatccaaaaaatggggtgagtaagtgcgcatcataactaaaaaactatttttatttttaaaaacagaaaattattttttaaaaacaatttgacttgtttggtctt

SEQ ID NO: 380491 - DNA, 6534 bp, Cannabis indica
atattatcaaataatataacacattcttcacatttctataaaacttagttctaaatgatttatcagcaggtatttcagaaatcattgatggttattatgatctttgggtgatcctttgactgaaggcaggtgctgttgtttccagatataagccattatgtttcttatcacacccaatgctgcaaataaaatctatgtagtcaccactagaagcttcaggcagaagtccaagatatatggcttgtgtagggttgacatgtacagaaccataatcaaattctccattggaattgttaatattttttcatcaacaaagctgctactaaagagagacaatttggtggcacaaatgcacaaaagtaaaagctagacaactttacaaagatttttcttaagtattacctgtagtcagtatttaatggctgaaggagaacacaatttaaaccaggtgcaattatgtttggctgcaacaaatttgtgcataataatccaaggtaaattgaaatgcaatgagatcgaattagaaagttgatgaacgatataaagttaccttttagaatatctggcgtaatcaaattcggcccacgaaaagagaaggaagcaacataaggagctgaagaatctgttatgactttacttcttagaatggttgcttgaggatgtctgcaaagaaaaattgtagcaatacttgatgaggatagcaaacttaatcagcaatttctttttggcttgtgaggaaaagttattagattaaaggatacatacaacaatacatatacatagttcaattaaggtaggacaatattactctatagattgattggattaatgcaaagaaagggacaacaggagaaatatcttaggttctatcattcattgcaatgcagccaagtgcaccagcttcatagacctcactgattccagaaaattaatcacaaagtacaacatttcccttgactaaatctctgtcaaggcaagcttcatcacacctcctacaatgcaccaaatacatatacatatatttactctagtctataaaagcttgcatgtcttacattgtccccagtggctgttgtagctgtatggctgcatgaccttttctatctcttgcaaaatctgtttcatacttttattggatgaatagagccgaactcctatgattttgctgaaacacatgcatgattatatagaatcacaacatgtatataaacttgtaatcaagaataattttcattgctaaaacatgttggctctaacaaagggctcacattttttataatacaactcatttttttggggtgtttgtgtcaaatagcgagacaaaacaagcacatttcttcatggaattggaagccaatagcataacacacgcatatacaaatcaataaaattacgcagttgaaagctaacaattgttgatcaaccttactacgcctcaaatctgcttataatatataccattttcccaccaccttcatccatagcccagcttcaaatgatgcagtatataaatatatgtttatataaactgtacatatttattttattattgaagaagaacgcatgaaataataaacatacatcttggttacacaaaagtcatagcaaaccaagtaaactatgttcaaagagagaaccaacatacaacaaatcaactagattccaaagccaggtctcattttccattgatcctttctattactgtgataagtccttgagtaccaagttttccatcaccattagccaccatcccagaaaacaactgcttacacaatgcagccccaggcaaagccaccactctctcatgatcatcttcttccacaacatcaacacccatccccaaatccttcaccatatactcagcaaatccaccaggcctgaaatctctttcaataaccctctcgccaaacaactccatcaccattgatcctgccgccccacctctcaccgcctccataaactgtctcgtatccaacccggctcgctctgcaaacaccaaaccttcgctcaaaccaatcaaatttgccccgacaacgatctgatttcctatcttgcaactctgcccggacccagcagtgccacgtaagtaacctttcccatgatgtcaaacaaaggtgagagccactcaacaacgccacgttcaccgcctgcaagtatagccaatctcccttccctagcgccaatgtcgcccccagatactggggcatctacagaccagcaattcttctcacgcgccgccgcgaatatctctcgggcaagtacagggtggctgctagtcatgtctacagtgacgcagttgggattgagaccggacagaacgccattgttctctaagacaatcgacctaacatctgaggggagccccagcattgtgaaaacaacatctgtggagcgagcgagttcgaccggggaatcagaaagttgggcgccttgagatttgaggtagagggatttggaagggttgcgtgcgtaaacggtcagagagtaaccggcggagaggaggcgagaggccatggcggcgcccattacgccgataccgatccagccgatacgggttttggcaggggtgatgggatttgggtaaggggttgtcatgggtagagaggcagaggacgctgaaattagttgatcaaatctggtgatatttctgagtttggagcccaaagttcagagttcagtaacagaccttctccgattttggctttgatttttgggtgacgatcttatgggtctgtgtacagtgtgtactatttatcttgaaaatttggagacaaagaccacaaccacaataatttggcgacttaaattaactttttcttttttgatcaaattgatggtttcttaatataattagacgaaattcataggtaatgaaaacaaattattgataaattgatgtaattatcaattgaaatgacaaaattttaaattgaatcttctatatgttgtgcaacacaatgggatttctaacggtatgagtattatcagaccataccaatgatgcagaaaccatagatttatttgtcaaaccacctccttcaacaatcacactaaaagactttacctcattcagtgacttgaaagaaagaatttcaggcactacttttataccaataagagatgttgatgagattttagccttgtaaattgagtttgcttcaccaacattcttaactcttctctgaaacttaattttaaatggcttgttgactgggactctggcaatcattgaagggtaattgagatcctttggtgatcctttttctgaaccattggtgcaactactgttatcacctgatataagcctaactttattctcatcaaaaccaatgttgcagagaaattttatgtagtcatcttctaaagcttcatacactagtccaggattaatagcttgtacagggttgacatggccagaaccataaccaaattctccactgggatttcttgtattgtgcatgacagaagctgcagccaccagaaaaagagaaggatttggttaagttaagatgtcaggtgtgtgtaatcatagagaagagcactatatgataagtagtagtagtagtagtagtagcacctgtagtcataagagaggatttaatagctgaagaagaccagtcagggtgaaatgttttaacataggcagctgctccagcaacatggggacaagacatggaggttcctgattcaactgtgtattttacgcgccgtttatcattgaaaaatgttgaaggtggagtttcaagtgaatatgcagccaatatatttactcctggggcacttatatctggctgcaagtattttaacatgaggaaataattaaaatgctactcttaaaagaaaaattgacaaggtgatagaacagcatgaacctttagaatatctggtataataacatttggccctctagaagagaaggaagcaacagtaggagcactagaatcccttgttacttcactttttaatatcattgctcgaggatctctgtgaaaagaagaatggttttgccttgtttaagagaactcagtgaaccaagaacagttaattatcagactaaaaggtaaagcaataaaacatactttgtagaacttatgtaggacaagattgatgtataatctccatgtgtcaaagttgatgcagggaacggtacaacagaggaagcgccatttaaagcatcattgtacacaatgcaaccaagtgcaccagctttataggcctcaccgattcctttaatcgaatcacacaacacaatctttccctttactaaattattgtctaggcacccattattgcacaacctacaaatgcacacctttctttcccttattatcaatattctcataagaagttttactaagtgaaaatgatcaaatgagtttgaaaagttacccggccatcaaattggagcaatttcttgaagcgtcttttccatgtactagaggaaaatttgttccatttagtctaaaagtattgacagcactcccctgagtgtaaaattaaactatgaaaatgcatgacaagaaagccaaaccaaaacatctaaatggaaaagagaataagacacacaattatagttgttccatttccaagaacaatcttgtctatgatttgttgatctgtagtactagctgctactgtcatcaaccaaggcgcaacgcttgtcaaagtttgaagaaacgggccactgtttcctgctgagtttgtggttaatatccctttcttcattgcatggaaagcaccaatggagattggatcaagctcaagtgtttctagcattggagatgacattgatatggtaatgatgtcgacaccatcagcaatagcgtcgtcaaaagctgccaacatagcttctgaatagcaccctgttgggctgcagactttataagcagcaattcttgcagagggaactcctcctcttgcaatgccttcttttagtccatagaaactgacattttttacattgttcccagcagctgtggagccgtatggcttccatgaccctcactatctcttgcagattcatcttctgtgacagatggataataccgagctccaatgatcttgctacaacaaaatcaagacttcatagaatctcaacatctctaagacattggtaaaggaatagacaaatacaaatgtcaaaaacttttctctcaaggaacttcctaatggtacatgtatggtttatgtaagcaagaatttttcaatgaaatgaataggaaaatacttgttgcaggtgaaattttttcctccttgacatgcacctttccatttcttgggaggtggaccaaaaccttcatcactaaagctttctgattcaggccaaattccagtgtcaataacaccaactatagtatcactctccacagtaggaattcgactcgttgtctcgtgtaaacccatgaaatcccaagatcttgttgtttgagtatgaagtattttattggggaagattgaaactatgtcttgcctacctgccaattatggttttagagtaaataaaacaatattggcttactttacaaggttgttggattacttactggcaagattcattctctctttttcagtaagttttgctgcaaatccattgaaactccttttgtaacttcgaactaaggaattctcaacagaagtactacaacatatataaaattaattagtagaaaagacatttaaaagaaaaaaaaagactacatgaacatatgtatctacattactaccttccctcaagaacactttgtagcatactaatgtgatgagaagttggtgatgagtacagcttatgttgaagtgcccccatgtacacaatatagacctgtaaaatcatggcatttcaacaaaagaaaatgtaaattcagatgatattaataagattaattattggatgctatataatttttttatttagttatcaatatacgcttgcctttctatcttcatcactactaatagcattgcatgaaaacctcattgtgaggatgaaaatgcagagcaaacagtgaaacagaagaattccatactttcccatgcctcagaataatttgacagaactgagaattcttttacttaaaaatggtgcaaaaacaaaaactattttagaagattccatgccataatatcatatacatatgtcataagggtactcaaatttgttttccataatggtatatgaatatgttgtatggaaaataaatatatatgcgattattagtaaatttattgagattgttatttttgttcaaaaaagaataaagacataaagtaatccttctattccataaaccaccctttgggataagcatggaagttggtagtcattgttcgtttccatgtaacctgtcaataataaaagaaaaagagttgagattctacatttggcatcggtgacatggtaaaatatttaatgacgacagccacaaaatagataaataaataaatactccagcaatgagctatatgacagaccaaaaactctgtaatatttgcatctggcaaataactgaagtgcatttaccaaaaaaaaaaaaaact

SEQ ID NO: 380492 - DNA, 1943 bp, Cannabis indica
aaaataaaggagaagatccagaagaagttgagaagtctacaattatgcacgaggcgtggggaactagcttacaaatttttatttttatttttattttatttttataaatatttaaggggaaaaaaaggaaacagagcaatgatagcgatgaaatcaacgtacttgcttaccaataccatgattgattattgtctattgatttgagttccaaaaggaccaaaccgctccttctgttttttaaagatgtgcaattgtgtagtgatgacgaatgattatgatcgctggagatccaagattttttatttcttaaatttcattttggtttattattattattattaattattattattattattgattctgacgattacaattatttttttgaaaaaagattgcaactttcattcaaacaaatcagttaacaaaataacttttaaaccagaacgcaggtgtcattccatcaagacccgaaaaatttatcagaatgtatttaaaacaccgccgagcgaacttcatcttccaaaactggttgaagtaacatagcattatcatcatcacttatagaaggctgaatcttattatcataactaaattggctcccttagactgtttttaatattttagaaactgcataccttgcaagttatattaaaaagagaaaaaatagaaagaaaaataaacaaaaagagaaggtatatatattcatgaatacataacgaatttgttataaagtttcaattaaatatttaatttgccacctaaaattaggccgtttgaataagatccatttccatttttaataaataaaagtatattgtagttttattactttataccatcatactgcccatgatgagtatttttctttttagtaatgatatgttgaatgaaatacggttgtacaataataaattgattttttttttacttagctataaagtatgacacaataagagaataattttgtagattttatgccatttctcacgtaatactttgtagttggtccaatatataattacggacacaatctgaagtggatggatgatattggagcttaatagttactcactcttttattagatgacaacttttcaaggatgcgagtaaaagttgggaattatagttgtgaggtagtgatatcatgtttcaatcacttaatggacccatcatccaatcaagggaataatattccttcaaatggaactttaaaaatactcacaactagcttcttttactctttattacaaaatatttcaccaaaacattttattttttattttacttcataaattacattccatcatacatcagtttttatatattttttttacaatatttaaataattatttatttatttaatttaaaaacttgagaaagatagaaaaaaattattaaatatgcttaaaagataaataatatgtcgctgcgtataaaaaagtattagtgttgtggtactaaattatgtatgcaacaaaaatattttattataattattgttagaaaaatagaaaggggcaccttatggtgctaaacaccacatgaagaggcataccactatttgtacaaatcaatattaggtcccacacaatttgatttaaaaaaaatattataagaaattgttaaccacttgcaacgcgcagtaaagaaacaaaaggaaaggtgtgtactgctgtaaattgcaggtaggcagctcaaataggcctactgttctattgctttatttataacaaaggttagtacagagaaatattacagcagagggaaatacccttgggaccacaacaggtgtcaggcaattacaaaaaatatatctgttacacgaacaaaatagactaggacaaaatagcaaaacggaaatgagaacttcctggaaccctttggtcattatgttgggttttatgccctaaataaaatttatttcaatataatcagattt

SEQ ID NO: 380493 - DNA, 1600 bp, Cannabis indica
ctctctctctctctctttattgtcttgcggtgggtataattttttgaaattataggtttgatttttcttattttctgtgttgtggggatgaaattgcagatttatttactagaggaatagacatacaagcagtcaatgttgttattaactttgactttcccaagaactcggaaacatatctgcacagggtatgtggctagcttttatgcagatttattcacttctatagttatattcttatggtttattttgtattcaggttggtcgatcaggaagatttggacatcttggtttagctgtgaatttgatcacatatgaagaccgcttcaacttgtacgtgtattgtttagtttacattggaattttatgcctatcatttgagtagcttgtactttttagcttacacaacatgtaaaattatcctacaggtataggattgagcaggaacttggcactgagataaagcaaattccaccgcacattgatcaggcaatttattgccgataattgtttctggaggtcatgatgtgtggtcaacaatggtgagtaacatttaatgtatccgctacatacttttatgttacaagacaaaggataacaaggtttctccatctttctttaggttgatatagtccccaatcatgaaggagacagctctgcttcaagaaaacgaactgagaatttggtatttttgttgaaaactcgtggttgatgatgtggatggcgtcttccctcgtggaatgtttttattagtttattaacttttgtagccctgagacattaacaggcccttaagagaattatagattggcttataaaaatccccaggtagatgttgggtccagttcgcagtccctttgattttatatcatactggtttggtactactattttttttttccttcctttctagtttggtcaatgttaaacctgttgaaatgtgtactttatgcaaccagccaacactttgaggaaaaaaattatttgccttttttgttttttttaatattttctttctgctctgcttaatattattctttattgttaaatgttttcattacttgatacatctgacttagtataaacagtgtagtcgaaagccaactgttaaaatctcacaatttttttttaatcttttttgttcttgtgaaatcttataacgtgctttttctttttggtaatggtatagttggtgatggtgactgaaaaaataacccagaggtttagattttctgtaaatggtaaatccgagtctttaggtttgggatacaagtatcgtgaactttcttcttctcggtcagttatttcaagttaaattgctacatgcctggcagtgctgtgtattcagctagattagagcacgtttcttcaaattgcgtcaatcttcaaaattttgaagaaaacctactaaaaatgtgctccacttgatgatgtaagatagttttttattagggtataattctcactacttttatattttctttttaatcatttttgatacttaactctcaagttggttgtcaatatataggggtattgtctacattaacctatacatatattgatgcatgtaaataaatatttttaataaaaaattata

SEQ ID NO: 380494 - DNA, 931 bp, Cannabis indica
cttaataatggattattaatttttacacgtcagtacttgattctggtataaatttattttttaagaaaagagtgtaaaattgtacatgaaagtaaaacattgcatttgcatctttacatgactacaatatattaatttccatatcaattcatcattagaaataaaagttgagttatcttaaaagatcaattatacaagtttgggatgtggatgtttttgattggtagagactacgtactttataagagaaatatttatataaatacagaatgacactgaataatgaacgcatgctaaacaagaaaaagcaacaacatatttattaaaacaataaggcaataatgtaaaatgtaatgacttgaaacaacgaagcatggtgtttttattacatgaattgatcatcgatttttatctaataaaatagtttttttttttttagaaaaaggtgttgtaactttctctaaggcaatatctatgaaactgataataattataataattactggtgacatgtaggacagtgatctgaaagttagttttataatagatacatcttttttatatatattttgagagaacataaaatattaattattattattattatgtatatatatagcggtagatcgatagattatattggtggcccatctataaaagctttgctctccaaaaaagcgaaaatggactacactttcacatgtcaaacttgtacttatggtcctatattaatgcatgtttgatgttaacttgtaacgcataattattatgaataaatgataagctatctagctttggcaaaaagcttatgtggttaataaaggagtaaataaagggatttttatgtgtatattattccatcgtgtgattgttttctgactcacttgaaattgtaggatgtaggggtatacattttcctcatggaatagac

SEQ ID NO: 380495 - DNA, 3032 bp, Cannabis indica
  modified_base (145)..(145): a, c, t, g, unknown or other
tgtagtagcggataggtgcagccaaaaatgctagattgctagcgagtcggacctttttgtatcaaggggagggtaatcccccagtgattcccatctattttcctaatcaatgaacttttagtactttcaaaaaaaaaaaaaaatnttagcaagcccaaatctttctcattaacctactaacaatatggttaagacgtgattgcttacacgggatcatgtcattaagttaagcgaaatatgtgttagtatttatgttgttagtattgaattctttatttcgtttttctattttttcttcgtaaacaatgataatgatatcgaactttgtttaaatggtctcaagcaagtaatatgctctatattttatgaaaaatgtcgagtatattacttcgtctcacacataagatgactcataaataaaattgtcattttattgtgtcatcttatgtcttataattgtactagtaaaagaatatgtgacttaaaatatgaagagaaaaatgataggaagataatatacttcctcatgtagtatgttgaattgaaagttcatagtgaaaggtgggacccacttaagtagctgtgtccacttaggtaatgccctagcacatgataatatgtgacagttaacatagttaattaatatatatttattaatatatgagatcaaagtatagttcttctgaaatttatgaaaaaaaataaaataaaaatagaattgtatatgaaagcgaaagctgaaaaaaagaaaagcaaagatgaggatgaggtccctttataagagcattattattattattataaagttcaaaattctatggtaatgcttataagttggttggttgaatatctatgtactttttcatttatgcaacttttataattagtgcgtatttgaatttatgaccaaaaagttttcttatatactactgttgtatatgcccaataacattattataatatatattaatatatattattaggtaagtttatagtatactcctttaaatttttttaaagaagtatttcggtagatttttttatttgttttggcacttatgagaattttttagtcttacaggtatcgttaattattcgaaattttttaaaaatttacaaatagtcttaaataactacaacataaacgattatacaaaataaaactaagaaaattgtagatgacaaaataaataaaaaaaatctattaaaacaactctttagggtctacaaaaatgtccaatattctttttctttgatcattttcccttcaaatacactttctcaaactaccaccgacactataattttataattgttatgtgatggaaatcctccattacatattttaagaaagaagagaagaaaatattaataaataaaagattagacatgtgaaattatgggactatattatacacacaaaactaaatagttatatttaataatcttataagggcacatgtatatgttcctacttttgttaagtcttaatgtcacattatttataattaagatgattgaaaataaaattaaggaaaattatatatagggattttttttttaaaaaaaagtttactatgtgtgcacctcgcacttattttatacatgtgtaaatagtctgatctaatcttattttcagtattataaattgtttaaaaaaattctatccaacaaaaaaattgtttaaaaaattaggctaattaggattttgccccctgaactttgacatgtaccaaatcatgccccctgaactattaaggtcgttaaaaatgtcccctgaactattgagattgttggatttaaggacttttgtctaatttcatctaattttactatttcagtgattgtttatgtactaaatcatactccacagacgttgatatctactaaatcatgtccctcgaactttgacatgtactaaatatggcccttgaactttcatccatgttagaactttttactaaaattggaaaaaagtccttaaatccaacaatctcaataattcagggggcatttttaacgaccttaaaagttcagggggcatattttggtacatgttaaagttcagggggcaaaaatcctaattagccaaaaaattaacatcatcaattttcattagaagactataccatttgtccacatgttgaaaagtgaaatgtgctttatatatataaattattttttaattggtaacttttaaaaaataactataattaaatgtcaattttaaaaatattaatttttaataatgaaattttaattcaagactgataataaaaaaaaattagaatttatgtattttattttactatttaattaaaaatctctatattttacacgttatatcaaaaatatatttatatttagtattacttttatctctttttaactcaaactcaactttctttctaattcttttttggaccgatagaacaacatcaaccatatagtacaaaaataaataattttttttaattgaataacaaagcataaaaatttaaatattcttaataatatccattcataaataatatacctaaaatgcacttatatatatttggtgtatcataaaatatactagtgatgaaatgtttacatatatggacaaatataatttgtcacgtactcaaatatgaaattgactagacttgcatttgtttgcttaaactttcgattattattaatttactaacaattattggttttgcttcatgtccacttaaggaattaatcaacaacttagttgaattttttatgcaattatgaatttcatatattacctttcttatattataattaacaattttatatgttatattgtctgcaattttcttcatatttttttatatatttttctaaattactcaattattattgtgtaaaaaaaaagtttttctctaaaattttaaatttgttaaagtaaacataatatttgttagattatttttttacatgatttatatttttattagttttttaataatttttatttattttttacgataataatttgtaaatatataaataaactt

SEQ ID NO: 380496 - DNA, 4989 bp, Cannabis indica
gggctaaaaagggaaaagtagaaaaggtaaacggtggacgttaatattgatgaagggggggttagtacaacacgctagtctgtgatggtacgctgatagatgtggttttgacggcgtgatttggttttgtttgaattccaaagcccatgataatatatattgttggactttgcagacctgtctcttctactacttccattcatctatgtctttccaccagttgttttatgacgtctgaacatacaataataataaaatatattcttattattttttaagaattttccttcaattttattttatgtaccaaaaacacttgttaataaaattgaacagaatcaacttgtactaattagccttaaatttatttataactctaaaataataaaacagcactcccccaataattttgtaaatctacttctgtacttattaataattaatattggaatggattttgtttctgattcttgtatccaatgcccccttgactttctgttatggaattggaatgggctttttgggcttttactgggcccattaaagcaaagcaaaggccctgggtgtcttttcccatacagacaactttccacactctgactccatttggccgtgagctaaaagtccactctttttgtattttcctatctctttctttctttattttaccacttttaattcatttctctctctcacacaaacgcaaacgatccttcggatttcttctcacttcagtttttacaacgagtgtttttaggaataaaaatataaaaataaaaatagaactaagaatataatagaataaaatttaaaatgttaaaaaaaattaattaaaataatattaaattttttctgttgttacattaaaataataatttttttaaatagaataattattctactaaaatagtagaaaaaatttttattaaaatatcattttaatactttaaaatgcaactaaataagaaaaataaaaataaaaatatttactttccattccattatattttattacctccaaccaaacgctacctaaaattcttataattattaggagataaggttctataattagttaattagttaatgatttattatatttttattaaaataacatatataaaatttaatattaaataatattatacattacagaaatattagacaccatcagtgaattttaacatttttctttcatacttgtactttctcataatcttatacttaatactcccttgttcatggtaacacggtctacgaaatcttcttttcaatcagattctacattatcaaaactcgtaatgagaattgttagtgcacaacactgtatcttatattgtttaatgcctattaatttcgaattatacatgtcttttttgaaagatacatattttattattaaatgagtgatataataccattataattagtctcatgtcttttatagctcttgtaaatacttgctcttaatagtgtacaaaaaaattacttttaaatttggattacaatacaacatatttaaaatttatatcacaataaaaatattatttttatcacttttgatatattattattaaatttaattaacggattaaattataaactcttatatttattttttttttattattttacataacaaaataataataataataatagtgataaagttattatttttatatttttataaaaatattaattaaaaattaaattttacatcaaattttataatattatattgaagtacaatattaaagattaatacaaatatataataaatttattttttaacgcaaaatataatataatttttacatatctcttattaaagatagtctagctaatattgattatttctttaacgataactaaaaaaattaattcattaatataaaatatcagtaaaaaaataaaattatttaatattataaacattctgattttttacataaattattatattatatatataatgtttaacaatatttaaattaaaaaaataaataaaaataaattttaacctcattatgggggaatttcacaggttaaatttacattaatttataatcatgtgatactattttcaataaatggtaactcaccttttattttctttttttttttaataaaaaagggtctttaatcgtttttatatggtgggcgatacgaaagtgggggtataaaatggtataatatttgggagttgcacaagtttgtgttaatcaagtaaagaaaagcatttattctgtttttccttctaaattagctagagagaatagattcatattctcaaataatgcgttagtggagcattctgtattaggaagaatctaactcatttatttttagggagagaataaagattttgattgaaaattaactatgccttcttactttttacttgtacataataaaatcaatattaatttatccacagatttgcataactttttggatactttcaattctctttccaagcttaaaacatatttaaactttgttgtggctgctttactggtgcttcatataagacttaatataagtggttgaattataagtattttagactttatatagttatatatttatatatgtttgtgctctgtcccaaacatgtccacaaagatggtataagatgtatatatatatgtataagtgggttcatgatttttgtataatgtaatgtataaataatgaaaaaatttataaattggaaaagttttgaagcttggttgtccaacatcgaatcatttaagatttaagaaacttgtggtggagcaaacctagctataccctacctttaaatgaagtcaatgcaaaaccaaaaagcaataaaagaaaaaaaaaatctcatgaatttgtattcttactacaacttgaaaacaaccctattaattgccttttgtctcttatcattaacaacttttatgctcttttttttttaaaaaaaaaaaataagaaagctaatgttctctagttagtgttttttatgatctgtgtgtttttttttaaatattttatactttacgtgtttataattaataatctaaatttcagttagtggccattgaattttgacaactacgtacatattacaaagtgtgataggatttgcatcaataagagtaaattaatataaaatgtttggtttaaagaatatttatttttgaatttattctttaaatattacgagactttgtgcatgactatattcgtggtccaattatttaatcacattatcaattaacttaattctctatttttagatgtataattcatattgtagataaatcaaatcaataaaacgatatctttgtttgagactttattgaatgtgacttgatctcaggtaatcccacggctctagaaagaaatattccatatattgttgttaaaactagtcatcatcatcatcatcatgcatgtttaagtaatttaatttctggcaaataataaaacaaaaaaggaatgatgaagttgcagagggcattcaatggtgtgtagacctagacagtgtatccaagttgcaaagagggcctctccctctgctacttaatttataaatattatatatatatatttaaggaatttataaatatttttatttattattattagtaggtgctcttcctatatcctatcaactagataggtacttgagttatgtaattaataatagcaaaatagattagatttttttaggtatggaggatgattttgatggaggagagcagagcagagaccatagctgcagaagtgattaaattttagcttatttatttcaagtgtctgttgctcaacgctgccatcatgagaaatattctcactagctacggctagttttcaatcaaacatacacacacacaacacaaatgtcacatccacgtggttttaataggcaaattttaattatacaatattttttttctatttttcaacttatatttttttttatttttctttaaaaatttatatattggtccccctttaatctttattattatattttggcatcacatattttctcttgcactcaattagaaatagagtatttgtacttttaatataatttcttcccaaatataatcttacatttaaaaaaaacctctctctaactctctcacctgcgacgttgaaccctgacccaaaacccatactatcgaacccaaacccagaacatcagtcacaagccccgctatcatcttctctctctctctctatatctatatatatatatcccgaagcctcaaaatacatgagctcaaccactctaaaactcccaaaatctccactcatcactggagttctcaatccattgcttgttttctatatttttttcttttgatttttagttttttgcgatatcactaaacacatcgctaaatgtcgctaaatcacactcaagttttcacgatggttaatgatgtttagcaatgtgctttgtattttttagtctcatatcacaaatacactgctaaagtcattgcaaaatatgcaaaacatcacttaacttcactcctaatctcaaatttaatttatcattgcaaataccttgctaaatatcacaaattattgcaaaaatctggaaaaccaaaaaaaaaaaacaacagaaaagacaaaaaattcaaaattcaatttttgagcaaaaaaaatcaacaaaacacaaaaaccaatatatagatctgttaaaaataaactatatatatagttttagaaccccccaaataaagagcaagagaatgagaggggcgtggtagtgagtgaagaaaatcaagacattacaattatattgcaatataatatactacaaagaccaacaaatagattaaataaatgttacaacacataatatacaatatatatacactatatatattatatataagaaatgtataggaagatatatatatataaatgtatgtatacattcactcacaaccttaagtgtagaatagtgggaatcaccatgacttgaacaaggtatta

SEQ ID NO: 380497 - DNA, 4045 bp, Cannabis indica
ttattggctgattgtggacagaacttcactagtaaatttctaaagatagaattcggtagtatcatagggaggattcaacagtgaaaggagaggaaggggatgctacttcaattgagaaaaataagagaagactgtaaaaaaaaaaaaacttagtttgagatttacactcaaagagaagtgctttagaggcaaagatccaagcaactttagcttaaagtaggtgatcaaaatagtaagtatttccatgcttatgctactgctagaaaaaagcacaattctgtatctcaacttcaagattcgcatagtaattggattagttgactccggatttttaccgagcattgttggagtattgtaggatcagggttactggtgatatgccacacggtcttaatgatactaatatgattcttaatacaaagatcaaaaatctacttccatgaacgatcttagaccgacatcactttgtaatgtcctcaataaaattctgtccaaagttcttgccaaccgtcttaaggtggttttaccgtaacttatctcaaacaaccaaagtactttcgttcctggaaggttgatcactgactatgatctcttttgagataatgcattatttctcttaagtgaaaatgtgacacttaacacaaaagctttaactatggtgttcaaatagtttagctgaaaaagacacaagtttaaaacaaaagtgtgaccctttatttctctcatgataatatccaacttacaaaaaatttatttcactcggcatcacggctaagaacagataaaagagctatgaagtaaactactgaacatctcctatttatgatctctacctttttctgtccaactccaacacatcgtcgtcctggtcgagtgcttatcagtgcctgcgccaaatctacaaatgcagacttctgtgcactcgagcgaacgatacagttcatagtagaagtaacttgcattattagttcttgtagtacctgttaagtacttttctgaactcctatcgatgagcttcgccagcgtcttttcttagatgtaacctgaagcaaagatgagtaccagcaaatcagaaatggctcattaactcagcagcttacatattgaagaacaagattcaatagtttgggatcttgaaaataaaaaacatatgaagactgtaaatgtatctgtcatataactttctagacaaaatttcaggaacaaagtacttaaatataatgtattccatctcaaacccattactaatatcacagcaaaaatatgagttttcattttctttgtaacaaaatagagagataatgatgacaaagataagaaaaatctggcttggctaatggctatcctcaacaaaaaaccatagtttagacctgtttattattcatgcctcatttcaacacttacccaaaaaacaagtgtcaaaattggaatatattattccaaattataaagatagcaaatttacagtaaaataagcataaactttctatttgtgcaagtcattcaatttatggaaaggaaaagataacctctaaagcttgccaaaagttcatccaacataagctgatattgccatttgagaacaaagacatgacataagctgttaaaaaagcaaagtgacaaggggaaaaaaagttgaccttagagtatgcgggcggtaatgaagcttggcgctcaacctttccaggctcattcaattgtcgaatctctcgaagctggcccgctatatcctccaaaagttgcaactggagtttttccctctctctatgtccaacagagaaattaagtttctctcttccctcttgtactttccttaacctttccctaagccactcgacttcattctcgattttcaatctttcatagtcaactgctgacattgaatttcgtcgcatatcattacgtgcaaacttttctcgagaattcccttttggtggtaacccactactgcttatgtctgaactacttctgtttgcatcatatcgagtttcgaacatactcaatgacatactaccccatcttcttgcatgagttaaaggagcacttgcagactgactttcactttttcttactgtcactttattcgaaaccttagattcatcatcaataacatgaacatcgaaaacatgagactctgtatcaaccaccactttaggtggctcagtggattcgagacatggaatatcaaatgcctttgagggtaagtcattggttaaatcattccattctgaacatccatccaatctctctacctccttttgttggcaaactatattctcatcaatggtacattcttcctgctgtgattcatcgttggttttagtgctatttaagacatgagaatgtgaatcaatatcatcagccagttgaggaatttctaattctttcccaaaagtaagagtgttactttgtgaattgaatgatgctaactcataatctaaagagctatccacaacttcaacttttggtttctcactaaagtcatttatctgttcaagcatcaacaatggatcttgttttgaatatagagtagacgactcatgttcgagatgaataccagttgcatcttgaatctcgaaatctgattgttcatttcccaatatcatttgcctgtatgcttcaacctccttctccaagaaatgcttttctctctctcttcttaacaaaatctctttgaaaatgttcatttcctcagcatcataagcagctttggcttcaatcattctgtggtattgcctggcttccatctctatcgacgccttttcttcttgtaaacgcaatatcatggccattgcctcatctgcagcagtagcagcagcacttctctctttctcaagttcaaggtacagattcgatcgagcagcatgttcttcttctaatgcttgttccaacgttctaatcatattcgtctgattatcatcagaattcaaattccttagcgcatcacaccccaactctttaactgacatcacttctcttctcacttttgtattttcttcaattgagctactcaattcaagactaagtgaaactttatcagccgaaccatattctgttgtcgcttcccgaccatctaaaattagattattagcataagaaaacaaagcagtgtaattacttgcaaatcaacaaatcatgcaagcaagaaactattacatagaaacatttccaacaaggtcaaataaaatagctctatataaagatgagcattacctccataattactagaatcttcagcaacttccttcccgaatttactgatgctggaaggagaatgaggagtgttccgtgcatctgactgaaaagtatcatatgatgaaaacggggacaactttccataaccaactgaggctcccctgcgacgacgacgaagaccatgtctaagcctccgcccttgaaccctctttcccttaagattatcatactgatcttccttggaagcatctaagttcgcagtgccaaactcaccaccaccaagcttaatcgatgaatctctctcagaaagatcttgtaagctctgtggaaaggagctgcttgaggctgcaaattccaaatcagcatgcctattttcatgattgctctcatttcctaatttaacacccgagttttcaatttgttcgacatcccaaatggaatcgaaagggaacttactccttgctgtgaactgaactgaagagatcttctcatatgggcaatccactaactgtttttgcaagcactgattgtttcttgggttccaaaacaatccatcacaaggacatggcaaacacaatccaaataaacccaataactttgtggcaaagaaagcaagactcgatgcacaaagcaaaaaataagctattgagagatcaagaaatgcagccactaagtcacaaaatgtccatgaattcatagcttggcacaccataccatcaaatttcacacattcctgttccattaatcaaaacaatcgattaaaaaactaatcaacacaacaaacaaaataaaaccatactataaaccaactaagtctaagataagaaaaatcagtcattcacaaccactg

SEQ ID NO: 380498 - DNA, 3608 bp, Cannabis indica
agagagagagagaaatgataacaaagttcaaattttaacctcgctggaggttgtgttatcttgagcaaggcagagaaaagacaaggcaaagaggcgacgagtggagagacactgtaagaaagagaaagcaagctagtccttaaggttttggagagaaagcaagtcgggccttagtggggcattttggaagctggtcgctagagtagcagtagtaactgccatgagaaataaattaagaggcgattagataaaagggaagaagaagaggggagacatagctagggttttttttttcatctgggtgtgacttaagagggagggacgaatgtatataatgtgtccttttattttttattattaaaaataaataaataaataatttttagtgactcaccaggcaggttaagacacgtttacccaatcgcacctagcgaatcactataggtcaatatatatatttttctaaaaaatagttatagaaattaccagagttactctttagtgaacctacatattttttagtgacccacattgtaggacactaaagctgcatttttagagtctttttgtgcagtcctaaccttttagtgacctgcacatttgtgcggatcactaaagagtgttgctaaaaggcacatttgtagtagtgttcatataaatattatgaatccagttgacctaaaaattatcttttttggtggaaattacccaaagttacttacctatggcaggaatattctagttaaaactatcctcaaagccaaggattcctgctaatttcggtttacacaaattctttcaagaaatactaccaggactaatagatgcaactttcctggtccaaagaaaagctctacagatgcccatgatcttttttaacaatctcttcagaattatcatgatttggttcgagtaggaatgaattgataataacaccgaattgattaaaatgacattacctgtaaaagagatgtttcttgagcgccaacttcttatatgcatagttaatttctcaatgagtaattgaaaatctttagttgaaagtattttagagcattaggaaccccaagtatttgaatgcaatgagtttttgacaaaccctgaagtatccaaaattctctaaatatctaaagcttgcatttattacttgtattattgcttactataaatataaaattgcactcttagacaatatataattatatttaaagaattctttcttgtagtccattaatataattaatataagtagttcatcctccaatatattagttcataattagagctggtcaaaattactattttaccttttttaattatccctcgaattcctaattcataatgagcaattaatctataatccaattatagatttgagctcaataattgaattcattcccataattaacacttcaaaggaagtaatattcgatcatttcgaaaagcttgtatttcacttattgtataacatgttcctagtattcagatgcacatatgcacatatttagttatacatgtttatgatatcgtttacctagtatactagggatagtaatatggatgtacttatggatacacttagatactgatatataatgattctagagggcattgaataatatagaataatgattccaacatcagtacgactagagtattagaattaggttggtattatggttaatcatactacaggtacgaaagttcatatctcaatttacacgctagacacaattagttgatttatggtaaataagtatataagcgctcagttacaaattatttatttatgttgctatatgtgtgattttcttactgagtctgtcaagaactccaataaagattgtacataccttggcatctagacttagatggttgaaatatatgaaaaatcagctggcgcaacttttgttttgtcgttagacaactcttttgagaattaatatagtatgtatgtattttacgagattctgaattgtaaatgttcaacaaagtttactcttaagaaatttttaactattactaaatgttataataattacactttcaattcaaaattccattaattagcaaatattagtagaataattaaaaatcacgtaacgtagcttagatattagggcattacatatagaatcttcctcgcaaaatgagtagtaattcgaaagcgcatcttcccaattatcttatcttagtggcaaaggcctgtgtctcctagacactgatgaccccaatgggtgaacacattatgcttttaacagacatcttgagacttacctttgggaaaacctcttcctggaataggtttgactaatgcttttggtatctaacctggccaataggtagggaaatatgtatgtccttgacaaattttgggataacatcaacatatatacaaataataataggtatttggctttgagttgtaggtaattacaagttgtgttcttgggtctccaatacttaattggagtaaataagattgcccaagaaatttgagatcttggaaattgtcaagtatgagttttggaaaacatgtcgccagagagatatacctagatagaaagttattaacaagtaatttttatcaacaaaagaaaaatggttggccaagggcagggtcttggaatatagaatattatactagaagagagaaaattagaacttgggccagctatttagtgggagtgcatgatgtatcatatgacattagacaccatattatatataacccttagcaacacaagtaaattgcatcaatattgacaaaattgattgattcaagttgataatatatgaatttcatttgataattcacattacatgtacattattggcgttgacaaattgtgaggcaattaagtaaaacatttacacaggacaagttgaagcactctttcgataacacaaacggccagacgccctcacttgaaaaatgagaaattttctttttataaaaaaggatttttattcaagtaaaaaggcgcacttgtgttgttgtgcccacctctacctctaacaccacccaatacttttctctcttcattaattgtccctcctcagcctttgtatattatttatttatttaatactattagataacaatatcattataaagtattgcattgtaaataattagtaattttttatataatatttattaaattaaattatataaaactcaatacttaattatatatagttacatgatatattaggtagtactaaacaccatttttaacatttttatttatttattgttcattgttatttagcatcttaaattattcaccacgatataaatgtatcattttacaattagttaactatttattatattatttattaaataaaaatattatttatacaaatagcacgattttgccaccttttgtctcttataatttcttcatatttatttatttattctttctaaaaatagattgatcatagggtgccgactgctgagatcgattaatcatgctagtgattattatggtcccaattttaaaaaatattgtttacgtaaacaccttgggaatgggaaatttgaaattccatgctttaaataccctataatttttcccctaaatgtataatcattaaaa

SEQ ID NO: 380499 - DNA, 2844 bp, Cannabis indica
aaaaatatattctataaccacttttattttctatttttaaaagtagaaaacagaagcgtgtttcgtaaatttcagttgaggtccgggtctcaggttggggctatagggttcggcttcgaagtccgagttcagggttcacgttaagggacgtggttcgagtctagagtcaagtccaattcggggttcaaggcaagggtccgggttaagggacgaggtccaggtcggagtctgggggtcggtccacggtccaggtccgagtcagagtctgaatctggggatgaggcctgagtcaagggtcggggtcttgaccgaggccgagattcaattcttgatttgggtcctggtctgggttcggggttcggggtctgggtccagaggcaaggtctaggtacgggttgaggtgaggggtgtgagtcgagcaccggatccgaatcccaaagtcaagttgcggtcggagtccaaaatattgattaaaaaaaattaaataaattttgaaagtgatttttttagttttcaaaatttaaaaaatgaaaatagttttataaaatatatttttaattaaaaaacaaaaaattaattaaaaaaaatagtataaacgaaccccataacatacaactttaatagaacataacatgtcctaaatcaatcccctttacataatttcctaactcgttaaaatatattgtccttgggttaataaaagggtttgaattccaatcacaatttttttttgggagagattatatttatctttgagaaactagcttgtagtgacaatatcattaataatatagaattcttgattaattagccaattaaaagagaataaagtataagtcccttctaatttatacgttgtcctcaaaattgttaaaaaatcaaaagagtgagaaagagaccaacacgaccacaagaccacactagtaaaataacagtcacaaaataatatccaatatttgataactattttactctagaaactcttgtataattagattagttcaatgaactatatttgatattggacatatatataataataatatagttacaattacaaagtgtcatagtttgttgtttcttccttccttccctaattttttataatatttaactacgtgggtaatctagacatcctaactaaagtcatcaccaaaataaaggcaataaggctctttaaaccataatgatgtagagggctagctaacattatttaagattactgttagttgtagtataataatatgtaggaactagattttggtccccattttatatgttaaacacatatattaattggttaagtggggaataaaaagaaagcattgcatcattaggtacacataatacattccattcttaacccaataaaaatatcaaataagtaataaaaattatggttcgaggtggtcggtatgaatatatctctttgctttagacccaccaagcttcatgcttctaataataacaatcactaaccacaaaatcctccttttctttctcaaatccagataatcattcatatctttttcctctttatattataggacatagccactaaagcacaaatatatatatttataaaagtatttatatacattgtcattcatcaattcacataatttgatgtcacaaattacatttaaataaaattaattaaagaagggctttttgctcacctttaaatcattaataaacaattgactaattaagtaacttgggtaaggatggattcattcttataataggattttgtaacatttattttattttatttttaggaaagaaaataattcagaaaagggagtactaaaatgggccctaccaaaagagcagaggtggcacagtaggcggcgcgtgagagcaaattactaaaagtgaaaaggaagaaacaaaaagaaaacaacaaaaactatcctagagacagcgatggatgtaatcaatgaaatgaaagaaaaactatattatcaaatcaataaataaataaagggaatcatgaagaagagggaaaagggcaaaaatggatattatagtcattgtactattatggtcgatagataataatatacttatacattgagagaggcagtgaagcatgggccgcccttggtgtggtgacaaagctgagttttttttttgcttctttttcatattaatgagttacatgaagaaaattcttttaaaaacaaataaataaagttacatgaaaaaaaaataaaacttggttggggggtggggtacatctcccacaaactaaagggatatacattaatgttgtatggtggaggtggttttataagttggattggacttttgatgataagcaaaacgtgcccaaattataaaaattatattaaaaataaaaaatcatcaaaagagttaaaggggaattcccaatcccatgtcattttattagccatatgataattctagaaatttgcataaggtatcacagcgcaattagacgtggaaatttcttttattgattatataaaaaatgagatcaattgatgttgaaagcataaaaaaatgaacatttaaatgagttattagtttaacaatccctgaggcttgcttaaaagttaaaactgtattggcctatttgggaactttcacatgtaaagaataatgctttggtattaatatactgcactacttacttaattactcttcctttaataaactataagtctaaaaatttatgtttaactaattgctaaactaataatattatcaaaacaaaaaaattagctaacctaataatagtactaaaattgaaatatatatatttttaagattaaacttatttattattaaaaaatatttatatttatattataatca

SEQ ID NO: 380500 - DNA, 6011 bp, Cannabis indica
gtgcaataggcctaaaattcaaaaaaagattatcacataattttcattattcgatcatataacaatatcttatatataaattgtaattaacaataagagatgtccaggaattggggtaaatttattaaaagtgattttgtattaattagtacggacctgcgattgaaatgatgaactatttgaacattagggtgcagagtcgagttaatgactactcggtcaaattgagtggctggaactggaacttggacttgctgatggtacgagacattttggccccccctgcaatatatattttcaaaaagaaagaaaaaagaaaacaggcatatcaaattagcaatatgcttgtagcactaaaacaagcattaaaaaaattaatataaacaaaaaaagaattaaaatgaaaaaaccaagcaagcttaaaaccgaaaaggtacgtctgctaaactttcgaaatagcattaaaacaacaatatagaatatacttaactaaacttttttaatcaataataaatcgtaacaataatcatatatatatgttagatattctaataaacgaaccatcaacctaaatcatccaactcaattggcaaggctatcaaagattggatctcaacagttttcaactaaaaaaaattattaaaagaacaaaagaatcgttccagcccaattaattaaaatcaactcaacttggtttatttttttttcctaataatcataacataacatgtattaatcatattaattattacgtataatttacttaatccatgatatgaacttgttcttagaaccaataccgctgtcaagaaattaattgtatttttttctaaaaaaaaaacaatccattattgccacataaattgaaagcattaatttaggcctaaattaatataaacgtaagacctgagagacgctgctgatgagttttgaccgtatgggttgtaattaacgacatattgcattggtggaatttgggtattgttcatttgtgcatgctgactttgttggcccctgaaacaaataaccacttatataatcataaatactttttactacatatttatatatatatcattacgtagtgtaaaaattgtgtaatttgaaagtgtctcaatattattggtatatatctaatacttaacatgagtaattagagaacatataccaattatatcccggaggattaatgttttcaactgcacttaagttagcaccaatattgttcatcaccaattgaggagtgaaaatcacttgctgggctgagttatttatctgtctattaaattgatttacaactcccattccaccagtagtattcatcatctgctttaaaataaaaaataaaaattcatcatgacatgtacactaataattttagtaataaataacatcatgatgatcatcatatatattatacatactgtgtttggagagaatattgaagtttggggtggagtagagtggacgactgtggttgctgatattgattgttgccgttgacaaagtttccatagtttgtactcatgttgtttgggactaattggttattgttgttcattattgtcccaagttgactaatgtcatttgtacacataaaaattcattactgattattaaatgtaaaataatatattttgacaaatctaaacacttatataatatatgtttaacttactggggtgatacgttttcaggataaacattttggtattgatgatgggatgagtaaatcatattagactcatgatgattagttcgaccaaatgagtgagctattccattcacttgtgcagcagcaacaacctgattctgattctaattaaatttaaaggaacttacaattaaattactgagttatatatttagtgggaataataaaatgatcatataaaaaaaataaagtgtacgtagttatattattattaccgtctgtagaattgggatagttgagagtggtcttgttcctgttctattggaatggtttgggctctggaattgaacattattgttggtgcttggaataactgatcgttgaatgttatttctcatcatcacatgattctcaccgttgataatggatgagttaattacattattattattattattggaccaattatttcctgctgatgaccttacttccgcataatcctacacgataatatatttaattatacagcagtataaccttcatcaaaaaaaatactatattcaacaataacttttaatttattatgaaaaattgaaattttaattcaggccaattataaagagtacctctaaattataattagtagttattcattttttaattttcgtattaacaaaatataattctatataagaataattacattttaaaaatatatatacatacattttataaatttatttatatagaaataataattttattttaaattataatacatatataaatattatatgcacaaaaaataattctattataatatagtattaaagattgtttattggtattgttgttccattgatattttttttgtgtttgatttttaatccagagtaactctatttaagtataacctttcaattaaaatataatttgcttggttttaagtatactattaaatagaaattttactatattaataggtataatgagactttatatatatataattatatgaatgtaataaaatgaattaataccagcaatattggaggatgattttgggatacagtaggtggtggtaacacagaaccagttgagtgttgagagttagagtttggttgctcatcacgatggacattgttaacattgacaatcggaggaaccaagctagtaatgtctccactaatctcaatacttttttcatcatctataatatgtgtcaaagcctctaaattgtggttcattccggtatgttcttgacgcccaccatcacaatttataattccattggcatcatcgccagttttctgttccaaattatcctgatcatcacaacacataaataaataaataaatatatggaattaattaataatgttggaagtttatcttttaaaataataacaagtattggagaatattgtcccacgtagattaaatgtaaaaatattgagccataattagctttcaattaatttagttggaaccgagctattttgctcctttagttttcagttttaacagtttgttatcttgtatgagctacagttatgtctcattttatttcagatataacttgtactgtaaatgttaaagggagagagagaggtagagtgtgagagagagcttgagagagagtttgagttctttgagattaagaacttgaagggagagtactctgggttgagaagaactgctactattcatttggtgtgagtacgtacagagagcagttacaagaaccagttctagcacctaacaacaaggcactgatcaggtggatcagactgagctaggagactacaagttggctcgagacaggaatagaagggagattagaccacccaaaagatttgtagaagctgacctcatagcatatgctctagttattttgtaatctgaatagataccagaaccaacaacttatgaagaagcagtagcaagcaagtcaagaagaagtggttagctattatagatgatgagatggactcattaagaaagaataagacttggattgtggttcctaaatcctatggttaaaaaataatctcttacaaatggttgttcaggttaaaagaaggcatgacaaaggtgaaccacctataggtacaaagctaggttagtagttaaagacttcacaaaggtggatggaatagattacactgagatattctcacctgtggtaaaatacaagaccattaggatgatgctttctgttgtagcacattatgatttggaagttgaccagttagatgtcaaaactgtattcttgaattgtggggtttatagtctagtgcaggtgctgttattattggtcagtttgttataactgttagtttgttctgttgagttagttaagtcggttgtactcttgtttttcagcctaaatataaaggctattctgtaactcttttgagggagagagaagtagtgtgagctgagagtactttgtaaagagaatgagagttaaactcatgtcgctcgagtgaactctgtgttgggggcaagactccattgagtacagttctctggtgtccaaaatcgatgtaatctctgagttatcttaatcaagaaataaaggcaaagcctcaaggcggttcctcccaaggattagatccaagtgttaattcacttgtgattgaaccttgtaaacttttgtgttattattgtttttactgctgcattgttaattcttgttctctggtttattgtttgttgtttcattacttgttagcttcatttgatcttgtttatgttgttcttaattggtgttgaatcaccacaaatggtatcagagcacagcttgcaattgaggattcaagaactgtgaagatcaaagcttgaaacacatcaatggcgactgcaagattcgaaattgacaaattcactggggtgaatgattttggcctctggcgcattaaaatgaaggcactccttgtgcagcagggcatagtcaatgctattcttgaacctacttccaaagaaggagaagaagtaaagaaagtctcccaagaaatcgagatgaaggctcacagtgcaatcttgctcagtttgggtgatgaggtgcttcgagaggttgcagaagaagagtctgctcttggtttatggaataaataacttggtgcaatctatatgaaaaagtctctagctaacaaactgtacttgaagaagagactttacaccatgaagatggaggaaactaaagaactaaggaggcatctcgatgatttcaacaaactaatcttcgacttgaataacattggagtcaagattgatgaagaagatcaagcaattctattactaacttaggtacaaagctaggttagtagctaaagacttcacaaaggtggatggaatagattacactgagatattctcacctgtggtaaaatacaagaccattaggatgatgctttctgttgtagcacattatgatttggaagttgaccagttagatgtcaaaactgtattcttgaatagattcctagatgaagagatttatatggagcaatcacatggtttttaggtggaaaataacaagatagaagtggtatgtttactcaaaaggtctttgtatagtttgaagcaatcactaaagcaatggaacaagaggttcaacatgtttgctcaagagattagttttgtaaggtcaaattttgattcttgcttgtactataaggacctggatacaactagcattgcgtttctgatattgtatgtttatgacatgatgatcatcagtctagacaaggccaaaatcaaaatcatctaggataagctcaaatctgagtttgaaatgaaagacttgggacttgtgagggaaattttaggtatttgggttctaagagatagaaaggaaggaagaatgatactcactcagagaagttacattaccaaaatggttaagaagtttagttttttgatactgctaaagccactgcggtaccaatggctggacattttaagctctcaaatgaaaattgtcctaaaactgaacctagaagaaaggaaatggagagggttccctatgctgttgcaataagattttaatgtacataatggtcagcacaagaccagacattgcacactctttgagtgtgctgagcaggtacatgtctaatccagggcctgagtattggaaggccttgagatgggttctgagatacttgaaagggacatcaagatgtggcctaaactatgagagggatccaagaaaagtttccctaactggttatgtagatgatgattcttctaatagagataacagaaggtccactactgtctactcactacaaaaaaatgtacagttatatttagagacaacttttagtcacaatataatttttttgtgact

SEQ ID NO: 380501 - DNA, 5808 bp, Cannabis indica
attataataatattgaggagagagaaagcattgacttcagagccgtgactgtagagagactcttgtgctgtttgatgggatttgagagaagaagatggaaacatttcatttctgatgatgagatagagtatgagaacataagccccatctgttccattcattggatcacccaattaaggcgcgtctcttccacgatccaatcacatgactcattccaaagtttacgtggctctacgctattggttaccagggttctttccactactcataaaaatgctctgcccattgcccaatcaaacaacacaaccatttcaaatattaggctttgtttggtaaaaccaaataaagcggtaagaagatagaaaaaatatagatgatatcatgatcaaaattactgtatttttaaactgtatatttattaactttattatttaaaatatacataattaattagtattatttattttgtttaatttgattttttttcaaataaaggaatttcaaaattttgaaggagtctcctctccctcattattatcttatctgttactatccatccaaaatttatagcctaggtaccaaacataatgttatatttgactaagaaaaaaaaaaaagctaattaattgaatgcatagcctaattttaattttgcttaattcataattccaacacaacagtattcaataatgactaaataaaagtctctcaatttgaatttccttgttctgtcagtcttcatccaactgaatgagtcaattaagttgttgatatcaaaattatataaatatatattggaaattagtaatgtgcaaacttcatgataagattcgaagcctataaaattggtatctataatcatgatcctaaattctaggaattatcgtaaacaagaacaatactttattttgatattatttttcatgcgaatcggttcgttttttaactaagtgattttcaacaccaagcaatattcagattctaatcacaataatctttttaaagataacttaatcaaataatttttttgtttactttgtcacccacactagctgaaattaagggctcctaatttaagattagaccttaataattattatagataataataaagtacagcagaatcaaattctatttatacggttggggttaattgaagagaagaaaaaaattaagtggtggggttgggggaccaaatttccattataaattgtttcaaaaggaactaaatgcatacaatgtttcacaaatataaccacgattattggtttttttctttttctttttaatgtacgctttacagtctcttaaaaatatagccatccaaattaaaaatatagaggaattagcttaagttattggtacgatttgattaattgtacaatttttttttaaaaaaatataacttattaagataaatttagtgatataaaagaactcaaaaatcgtggacaaacacctgtctatatacactctcctaaactagtaacaaaggttattaatgtgtggcttgatcgtgggatgttgatgcaagaaccaccattaatagcagctaataataaattaatatctaataaaatggattgaaaataaaatttatgtaaaactttttaatccaaccaattatcataagagaattaatagagataatgaaactaaattgatgcgcaagagtcaggtccagtttaaccacactcgcagtatcacgtatcactccagtcaatttgacaaagccctttctcgaaaccattaaaacattaatcgctagaataaagaaatcaagaggagatagcatccattgatttgattaattgtacaatttattaaggaaatttgttatatatatattagatgctccactattcattcattggaataattcatagagatcttataaaattttaagttatgcaaatcgagtcgagttaattaaagtgaccaataaaatagaattataagctccatagtaaatcgatttacacaaatttaaggactttttctattaaaaaaaataatgacattaatagtattttttttatattgagggagagagatttaaatttgaaattctctttatgaggaaaagtatagaactattaagctaagcaaatgaccacgacattaatactattgattagggagaaacgagagctacattttgaatattgattatatttttttatataatataaattaaaaatattcaatttgtcaatatatattatatacgaggtaacaagctgtatcatgttagattcgttgaatgtatcaatttgtgtgaaaattatagtattttcaaagtaaaccgttaaccttttgccctagatagataacattaattgtgaagattaatatggcatgatacttggtatttggtattataggatatttcttactgtttttattatttattttttttttagaaaaaaaataacaataaaataaggaaattacttcgttctaattccaccaagtttgaaaactaaaaataagaaagttaatagaaaggagaaaaaccaaaatcttttggtgaaaaggaaggtttaaaaaacatgattatttttttaatagaaaaaacatgattaatctatgagctgaacccagggccggccctgaaaatatatgggcccgagacgaattaaaatttggggctctcaaaatatcaaaagatgagtgttatgggatttgaacccatgaccttggacattatgccattcacctcaaccaactaagctatgaatatttattgcttataatacacttaaattttacttagataaaagcttaacaaattttatttatttttttattttgggcccccagaaagtgtgggccctaggcacgggcctagcccgcctatgcctagggccggccctggctgaacccaacatagtttatctttatttgtattttcttgtgtgtgtgtgtgggaggggtaagaaattataaacatgccactgagaagtaattatcatagatataagcagtataagatcacaatgattcatttgatattattttgttttttccttctattgctttagactttcgtacaaattaaaattcacaaatgtcaaaaaggtcatcaatgcattcaagaatttaataaaggaaaaagacgaaataaaatagtaaagcgagcccatgaattatgttatgtataaataaaaattaactcatatataatatttctcaaattttcatattttttttttcaaaattagtatttgatactaatattatcacgtactaagctaagaatgtacactttaaaatggtccaattgttgagacttgagatagagactcaacactcaagcttacctgtatacacaaacattaataacaaaaattatttattggttgtcatccaaagaatttgttggtaaagagtgttggaattcaaagttttactcattaaagattaagcaaaccaaattcatgttattattgaaaagaagaagaaaataaggaagacttcaactttgcttttttcgttgtgtttcttaatgattaaaaacaaagagcaaatgtgctcataagttgttagacacggcacttataaattcacatgaatgaattaatttaatatctatatgaatatgcttttacacgaagaaattaatataagtaaacatgaacattatatattataattaaaaagaggtatacgagagaaattagccggcttgacttaagtttttaataacataatagtattaataatagaaagtggttattaggtggcaactttggtagttcttatgttatggatatatggctgtgaaaggtgatgacaaatttattaggtttgaaaataatttcaattctaactttgtaggcttcgctttctttctttctttcattctctttaaaattttgtcgatgcacatgttatcatctacaagtttaaactattgggaaattctataatgcactcccttaaaagggatacaccgttacatctctatctgttttagtatccgaaataattttttagtcaaattttttctcatggtcatgtaaattatacttatttaagacatcctgcaaaattttaagaaattcagaaaagtttaacacgtcgaaaactgcgttcaagtagtgtgttgcacgcgtgactattttattttatacgcgtgtaaaatagactgtttgaagtttgaacattattttctatattgtaaattattccaaattttttaaaattttgtaagatatcttaaatagctataacgtacatgaatatgaaaatattagactaaattttttttctagatgccgaaataagtagagggtgcatcaatgcatctaattaaaggggtgcattgtagaatcaccctaaatattttcttcaattggaaaaatatccccttttttaattgttctttttaatacttatgaataattaaatataaccattagtttttagtttgcccttttgtaataagaagtagctagagaattatacgactaagtactataatagaaattatttgatatgtcatttaatattatttgcttactattcaaacttggtttaaatttatacgaaatatgagctaagagggctaagagtagagttaagagttgtcaatatggaattggttcaaattggaaagggtcaaaggggatttagttgagtaatcgtgcttaaagtttccatttctgctttgacattaataaagtaaaacttatatctatattgtattttcttatactcgaatcgggtggtctctttaaattattattattattattattattattattattatttatttttttttttttttctatctgaattactacatcttaatttggtataggttggccttacaaaaaacaggttaatagattggtagttaaaatttaatagtgctcattctaaagggattagattgtaaaacgtcatctacgtaaaaaaaagtgtagtaccactaattaaattaagttgatacaatctacttctttcttttaagaatgattgaaataataaatcacacattgctaaaaagtcacatcccatagccattttttttaaaaaaaaaaaagttaaatttttttgtaaaattattaaattttctatatacttggaataactttgtaaatgtatacattttacttggggtatttttagtttacattttgtaaagttgacttataattaggtttatcatattctttgtataaatataaatttttgaaattctggataaaaaatttaagtttatatattattatccaatatctaaattgatatagatatgagagaagaaaaatataataatataatttaatataagatgcattaatataaaataattatattatgagactcaaccatattaaattataataattaattttgttaagttagccattttcacctagtcatttgagattagctcaagtggctgtaaagagtattggaggattataaaattgaatctcatttaagtaatttaaagaaattagcccttattacctgttcttactaagaaaaatttagcagccaattttaattgtcaaacttaagtgatacatacaatttgtgttcccttttgttattgaatagaaatttataatcacattactgtttaaataaggaaagtcggttattttttttttaaaaaaaaaatatataaatatatattagtatgtaaggttctacatttatatagtccactttcaatcgaaaaaacaacttacaaaagaatggacaagttaactttaaaaatacagtagaacttctattcaagaatatacttaggaccaagcaaattatattctaattgagaggttataa

SEQ ID NO: 380502 - DNA, 3868 bp, Cannabis indica
  modified_base (87)..(87): a, c, t, g, unknown or other
catacctactatgtacctctgacatggactcttcatatacaatctttacgggctgctggagttaagccatccgcctagattgagaanataagatacgtgtcatctagttgggtaccacatcataattcaaaaattcggatatattttccccaagtcaacgcgggacctcttggttgcatgtgaacttcacttggctaggaagctatccggatgggtgacgcgtgtcctggttgtttaagttgatccgacatgacttgattgagagtctctttagtgtctagggaattaaatgcctcttgaaagctttacctcaactaacgcactgacggttaaggggtacaacatgcgtgaagtctgtcattcacaatgagtactttaatgtacacttttgggggcgaaacccaaatttcaaattttggctgaattaatttcctcttttagccacctataaaaggagttcaatccttcgtgggaacctttttagccattttcattatcatagaatcaaagatacaattttcttcgtatttgtctctcaaatctttgaagaagttgctagagaatccattgatgtttccttccgagcatatcaaaaaagctccaaacagtgagttactttccattactttatacaattactattgaatgtacgaattttttctagatttcttaatgcaaatttatcaagttcttgagttgtttcttactgatcatggaatagatgaaattagggcttgaaaccttaactaacactcgattataacttgattacataattgggtgttgacctaaaatcgttcattttcacccattcatgagattctaaagatttccaggtacctcttatagttttgaacttttgggtttgggaattctatttttgaatgaaatccattctttttatctttaatcttgatttatttttgactgatcatagaatagatgaaattagggcttgaaaccttaactaacacctgattataacttgattatctaattgggtatcaatgttgacctaaagtcgttcattttcacccattcatgaaattctaaagatttccaggtacctcttaaagttttgaacttttgggtttgggaattctatttttgaatgaaatccattctttttatctttaatcttgcatggtcggcatataaaaaactatttttttttttattttccatccatccaactctcactttcttgtcgcccagctctgctggctaagggaactactgtcactgagtttcttgtaactgttgctaggcatactagtgaatttaaatcttcgtcccagcattattacagcttggcctccttgtacaaccctttaccttcctcatcccttctacccttcaactgtctaatagccttattacaactcttaataagacttttaaaattaccaattccactacgttcccacatacctaaacttctccacattacttgattttactcttatcagtaatagaagtggaatcctagctttcacggatcacttgctcataagaaggattttttagccgaaaattctcaaatttaatatgatgcttaccacctgagtaaatcagaggcttagtttccaagagtaacaaactatgattttaagtagagacctctagattagtgagccgcgcaagagagaattcctccaaccactcattggtatctaacgctcgatcgaggcgaatttcaatccaatttggggagtcacgattcttctcccatgtgagtggatgaccacgcaactccaaatctcaaagaccaaagtagtgcaaagaatcaagaaaaccatcgattaactaagaagggtaaggattacaaccccttttgtcctcttgacttgtaacattattgaagtccccaatcaaacaccaaagacccaaaccttcatcttttatagtacgcaagaaatcccaaatttttttctgaagactatgatttagttccccataaacactaatgagacgaaaagtaggaacccccactaacgaaaccatatagtccacattgtttttagaaaagctatttactttagcctcctcattatttttccaagtacacttataccatcacctcttccttggacctcaacaacaaaacaaccctcaaaacgaatttgtttacttaaccagccaactttttccttatcacacaaaatttcacataaaaacactattatggatattttttgaaccacaagttcttttaggaattgaatagtctatggaggcccaagcccatgatatttctaactcaaaatgcttgtaatgactggcgagctccttctccaaggcttgccaaaggtaagttttttgacaatccatcaacttcttggcccaaatttgaaagcccatcaataaatgaattagacattttcctctttttatggtcagcaatagtcattacttcatgattccctccatttaaatttgccaccttttgactaccataaaccattagattctttccattattatgagatgattttagctgactattcacctcatgcacaacttccatattaatgacaagatcactttgttgatcagatttatttccaccatgactattgcagtgacttgtttccatatctggatttgaacattgatcttcctcggccttactgtcactgatcaccaccccagactgccacccccttattctcaactaccgcgcaccaatattttgattatatttttggaatttagctctcgtaaattccccatatggtttcatattttgctccacttgttgattacagagtcttccacaaaaacactctgaatggcttataattttacaaatgaaacaaaaagtaggacagcgttcatattttaatgaaatccaaaatatagtaccatcttctttagtcacttgaagtcttctttgaagaagtttattgatatcaagagtgacccttatacgaaaataatccctcaaaacaccaataatattcttcggacatacttcaacaaatgaaccaattacatttcctactcccttaaaaaatctctctgctatacaccccagaactatatcctaaacttgcacccaaatatcaagtttgttcaaaggtagatcccttagttccaatccttcctttggtcgttcaattatcaattgcatatgattccatgtccatggacatccgtcaatcatcctcttaatatctacctcatagtagaattgaaataagtatagatttgactgtaaaattttcacaaacatccctatctctgattgccataaggctgctaaattattttgtataacttcaaaaatccacagttcttgtcggcaagaaacacccctcaagagaccaccaagatcaattccatcaccctcttctgcccccctaatcttgataccaccttcacctttatcttcaacctgaagtcgagaagtttcctaactactggaagctatcacacaagaagtaccacaacaccaaatcccaagaacacaagaacgaaagaagagacctcaaactttctcgaaaccaatcactataaacacaagacacaatatcaaaagacaagacttaattatatataaatatatatattaattttttctttattattttagattaatataaataagacatgactatagtaaggatagctaaaatgttcctatggtaaggacactttttgagccattgatgatccatttaatggttatgacgagccaggtgtaggataaaagtatagatgttagcatattatatagttttctcttaatattttaataataaaataatattgaaattttaaaagtttgttcattttttttataatatcattttttttagaataaatgactatgtatgttttctttttttttttttgttgtagaaaa

SEQ ID NO: 380503 - DNA, 3376 bp, Cannabis indica
aaaaaaaaaaaaaaatcagccatctgcataaagttgtagacatttgaatgacataatatattcacaatggagaacatacaccggtggtgatcttagtcacaagttctgtgtagcttggattttcatggccatctccaaatgggataaatcgatatggaactgcataaggcaataaacccacagcagcaacaaaaacatctatgcagaaacccttgaacaaattctcagttccttgaacttttgacacaaattctttgaaactgaccctatttggcacaccaattctcagctgtttcccattgtttgggaatacccaaccacgaggctttacagttgtctcccccggccagataacagcatataacttctggtttgccattgaccgattaggtggtctatcgtagagtgcctcgggaggaatggttgataaaccagaatagttggaccagtaaccaattcgtcgaaatccagttccaatcacgttaataacatcaaaggcaggaagaacaagagatctttctgaattaaacctgatggggcctgttaagccaacaaggttgctatgcaatatgttgtccaagagaagatcaccgccatcaaaaatgctcaatgcatcaaggcgaagttgaccaccttctaaattttttatgttggaatcattagagaatgaaataaccccaccctgattgaaaaatgcatcaatagcatgagcaaccaaccatactgaatcataagcataaagtccataagaacttaatcccagagaaccaccagtcaacttggcccacctagaggcaaaggctctctttttatctgattcaggtgtgtgatggcgcaaaacaagcactccttgcattgactgcatgatgtctgagggaagtggagaacgagaatctaacacagatgaaagccaatctgtggctatccatacaaatccatttcccatcattctaagatattgcgccactctgaaaaccatgaaacccgaatctggatttacatgaagaactataactcgagattccatcaatgcaacatttacaagtcgatccaggatttcactccggctaacttccaagcctgggggaattggcaccttgtacgagattttgcagcgtctctgtgcaagttgatcacctaaagctgagataccattccgtccataatcatcatctatataaatggtaattatctccttccaaccatagtaatcaattacatcagccacagcggtcatttgatacaaatcactctgtattgtcctaacaaaatatgggaactgaagggaagtaagagtagggtctgtggctgcgaaggatagtaagggaacttgaagttccttagcaacatgggatactatatgtgcaactaccgatgactgcgggccaacaatggcaatgatgtctttctccatgagtttcaaagctgtaaaaaacacagttattaagcttattttattggactctcttcacaaatttccagccatgatagtcaagaagaacaaacacgagataaaacaacaaaaagctgcgcaagcaagcaaactagcacaagttaaaagaaagtaccttcaaccatgccaagaaacccactgcagttggagttttgcatggttacaagaagtttagtcccttgaagaatgctggaatttgagttcacatctttcactgcttcctcaatagcaatcttggcaactcggccaattgtggaatcaaaagtgaagatagccccaatattcacaacagcaggccttgtagaaaatttttgagcatgcccaaatggaaaacccccaaggcatataaacaaaagtggaaaccaaatcaaactcatcttcagctgccaacaaaactttctttctgatacaatatgacacagatccatatcctccaagacaaatttggttcagaaattgattcatgagtatacaatattgcctataaaatttatatgcagaccactactcctctaatgtgtccaatcagtttagagatgtcaatcccaaaccctctcattcttgacagaaagctggacagagaaaaagtttgttaacatattaagcaccaaaactatcttcttgctcagccaaaagaataatttattagcaaattaagcatcaaaactatcttcttgctcaaccaaaagagcatacatatttttctttttgttataaaccaaaagattgattggggaatgagaaaattattcctagagaagttaagccaaggttcttgctcttggtcttctctaataaagtaatattaaaaaacaagaaggagctctctcatctaataattggcaaagttgacttcaattttacccattctggcaatgacatagcatttactccacacgtgataaacattatagttacatttctttgatgggtttcacatcattaagagcaaaagctataagaatccagaaatacagctagcatcaaaacacaacacaaacacagcccaagaaaaaaaaacaaagaagggattagattctcttgctgttataaagctctaagccacaaagatagcaactttggtttgaaaacccagataagatgatgcatcagcatcaaatagaattaatattcaattcaacccaaatgaaatagaaactaaaaaaaaaagaccttaccccagaaactcaagtaattgagtggaggcatcccattcctcttccttccctccctatctgaaaaaaaacaaagaaagattggcagagaaacaataaatgggatgtgggtttaagagaaaaaagtccataaatggtaaaacccctggtccccttgctcaattgttacagatgaaaacactcggaaaacaccaaagaatctaaaaatcacgtgcttcaaactccaaacacaagtgggtactgggaattttagtaggtaatagcataataaatatgcttctttgttggagaaaaagatatatatgtgtgtctacatacgtaaagatcaaaactttaaatcacacttctgtactactaaatactaatatatgctatgggattaggaacattattatcttaattaagacaagagagaataatgtaagttactttacaattccatatagtgtaatagtgtcaaatcatgtcattcaaagcatagcatataggatgcggggtcacatggatggatgacttgtaatataggcaaaataacataataacatcttcacaaaatatccaattcaattaacaaaatactgatatatatacatacgaacttgattggattgaaaataaaaattgtagatggaatattgattgatatataaaaataaacaataaattcatacatatctcaaaactaaatattttaatgtaaaaaattaataaattaaaattttgaaacatataatataaatatatttca

SEQ ID NO: 380504 - DNA, 3169 bp, Cannabis indica
tatcaattttaattatacttctaagtttgatattgttaatagtcttttcagtctctcaatgttatggtctttactctttaccgatttctttacattgtattatcatttcagtcaactaattctgaaatttaatgccaaattcgattttcttttttcattttattgctctattatttacggtttttattagtgtaagagtttccttcagtgggttttaattgagagaggtttaaatgtcaaaactcatttaagagtttgagatcacctaaaattaataaacttaaaattgattttacataaaccttctaataaaattatactttttacattcctattctcatgaagtcaatcctcataccaaacagtttggaaatcctatgtaaccccagctgtgtttcacgtggtaccttaccttagcctaatgcattgccaacttgtgtacgagtcatcacacaacttatggactttgtttttatagatacattctctctcttagaatatttacagcatcatctcattatactcttagcccgatcagtttgttacggttgtactataaaaaaaatagttgtaatagaactctagaaagaaattgaactgagtatttaataaattataaagttttaagtgttaaagttgttaatattctattataataatagtgttacaattaagtttattaaaattatatatataaaaaaaattatattatataaattttttattatttatatacttttaattatttttcccaatagtataaatttatatgtatttaataaaaataatttagattatatttttataatttgtaaaaagaaaaattttagtttataagaaactctagatttatttaatttgttaataataaaaataaaaatataaaatatttttaaaacaaaataaaaaataaaaaatttcaatattgtttattttaaattattttttcctcaatttttttttttgttatttttacaatatttaataaataattaaatatattacaaaataatttattatagagtcttttaatcaaaacattttttttctaaaagttgggttgtaccaagctaccaattttagctcttagctgtagcttctccataaatttttcaataagctattttttaactcttaccaaacacttttttttgacaacttttgtaaaaaataactttaagttattctaaaattgtgtcaaacgggccctaagtcgacagataagacaataatggaatttttttgtcaaaactaggggtgaacatcgggcgggttaatcgagttttgggttggtaggtttcgagtaaaaaaattgaacccgtacctgcccgttcacatgttacgagttggcgggtttatagagtcacctaattatgaataaacatacctaaatataaacatataactaaaccctaaacacttacctaagtatatatataaacatataactaaatcattaaatataatgaaatatatatacatataaactttcaatacatagaaatagtgtatggtatataatataagggtaaatagcagcataagtacccaaagttttatgtttattttagcggtataactaaccaatatttgtaaatctgtgattttcttccagtttcgtacagtacaaactctgttttgaatttattaaaagaacatttggtagtaactgatactatatatgaaaagaatttaggccttatatgtgtcctgtttaagacaataatagagtctgtatggacaaaattagagaaacattacagttttacaaacattaggtacttatgccgcttacaaacataaaactttgggtacttatgccgctatttaccctaatatatattgtaattttattattatgtaactttttttaggaattaatttttttaagaagaattaatattattatatttgaggtccaatatatgtaagtgtaaatttctatttttaaagtttaggtaagagtattaaaaaaaaattgtgttcacagtcgggtttgggtccaactcgaaacccgatcacctaaaatatcaaactcgaaacccgtccaaaagttccacaaggttaaactgcccacccgcaatgaacgggtagttttcaaaaaatttctagttagtcgggtcgggtccgggcgggttggtcgagttcgggtcaaacccagtaaaaatgttcagtcctagtcaaaaccaacaaaacaaaagggtattggcaacataactacttaaattatactatttgttactcttaataatccaacaaactgattttttggtggtaaaattcttcaaacctcacttctgttattctcttagctaagtggctactcgtgtatattaatgtacacgtaacagaattcaagtggtccatacaatattaattatttaaaaataaaaaattttaattttaatttagaataaataagtatttttttttcctttttcattattttgtcttattctttttcttcttgcttttagagcagtcactgtgaaacaacaccacattatcaccaccaccttcacaccacaactactaccgttatcaccaccactatcacattattaccaccaccattatcaccaccatactactattaccaccatgaccaacatttcctttaaataaaaaaacaaatccaggtcgtcgacaaagagagcaagagttcagagagtaagaccacagcgaagagaccaacataaagaaaggatcataatttcagatatgagacatagataatggctcaaatttagagtgtttgcaagtttagataagggattatatatttgagcttggggtttagggaactcagatataggctcaccagatcctttcgtggcgggttttaggttttggagttctagattagggcttttcgttggtttgagatcttgcgttttgggttagggcttgccttcagtcggatgggggcatgccattgattcgggtttaggcttgccatcggttggggttggggtagccatcagtcgccggggttgagtagggtataaggggtttgggttctcatctgtgtttctggtttttttttttttgggaaatttttaaaaatatcatttttatgttttatttacaattttagaagtaaaatttttatttataaaaatacatttttaaagttttaaaattacaaaaatacactttgctcagcaaa

SEQ ID NO: 380505 - DNA, 2186 bp, Cannabis indica
tttttttttcctttcatcaaggcactagagacggaatattaaattccataaacaaccctggactttcaatgatagatctaccatatcgatcatcatcacattttataaagattaacttcagtttttttattcaagagggctagagcatttaatgatgtctggttcagatttaagatgggccttcttttattactattattattattattatgggaacttttgtttagttggatgatcacaatcataataatgaaaatatgatttgagtggaaaaataaataaataaatgaaaccacgatttgattgggcaaaaaatgaagacttaagtcacttaaacaaagggtttcagtcacaattatataaagaaaataagagaaatgctaaaagtaacgattgtgcctaataaacactcacgttagataatgtataagtgtctttttattattttagattagagaaaaagaaaaaatgaaccaaaaaagtactacatcaattgctctactgtaaataaaaaatgtaatagtgactgcttctctatctctacatggagagaagtattatctattctctgagaccatctccaaaacgctatctaggtggtgccttatagcaatattcaaaaaataaataaaatttattctccaaactatgatccttgagagttttgttctcttttctaaaaaaaatttcaattctaaaaattctctctgaactaaatatttccctacagttatatattgcttatttctttagataattattaatatagtactaacttgatgttaatctctgtttaaaagttctaataaaaaaataaatgtataagtaacaatctaattgatgaattataagaatatgtatatgtattctaagagttaatatttgtaaatttaaagtcaataagttaaattttaagtagcttaaaatggttaaataaatatctacattgtaactatacaagtaagccacgtaagtaaattattttttaaaaaatgagcaaaatgtaactgtaaaaggataattataacagaaaaaaataaaaatatataaaactttacgagttatagattaaagatttattaatagatagaaaatatgggacctatttcttcaaataatagggaccaaactactttatcatctaaacaatatataatttttggcctaagatacactacacagcctgataataatgtactttccagcattgcaaaatgcataaagaaattagttaaatccattgcctatgtatacatatttatatgtttgggtgcctgattcgttgtcacacaccaacgcaatttgccttttaaaataattgaggagacacatgggagcatgttctttgttttttgtagtgaccattataaatttctaaaccttgttggacatagaaaagttgtggggctttttctgggaccaaatacacatattgattggtttgagaaaagcaaaatagaaaaaagaaaaaaagctagacatgatcataaagtttgtttaatttataaatttttcataaataatgaggatacgccatctgattgatagatatattcaaattttatctatatgtttaatttggtcagatgacatgtagaaaataaaattgttaaattaactaaacaaaacatcagtgattatttctgttctaaatttaaggaggtcttcactcactttgtcaaaccctcctccagagtccaaaggatgaggatttatttgatctgataagtttaagtgtcatattaggggagaatgaagctttaattggtgtttctaaatgaaggatatagtggtaattgtatggtctatgatgtagctcgagggtgtgatggtatgctagggagctttttccaaggttcatcgtgggatattgtgagtagagatgtggatatagtttgagagttttttcatacgggagaattcaggaagagttttgaccaaacttttattttgcttagcaatttgatgatttttgtgttagactataatatataatatagtatatgaaatatagtatatataaacgatatgtaatgcggaaaaactataaacatatcgataatatatgcaatgaaagatcgatataccttcagccattgatctgtgagcttcaatccctacgatagcttcggtattagagttcggccttcctcgctctctcaactctctttagatggaatttgctg

SEQ ID NO: 380506 - DNA, 2545 bp, Cannabis indica
gtgaaattatcccaaaaaaaaaatgtgagaaagaatagaacaaatgagacttctagcccacatatgactttttttctcctttttttgaacaatcccacatagtaataatgactattgagtgtacaacactcccattgattacaaaagataacacccagaaagacatttctttaaagaaattcctaaatcatttattgaacagttacattttaataaagtgaatggtgttattaatttcatggtgctaaaactcaacaatttgaagtgacaaattatcccactcaagtcctccttagtccttacatggaaagtgaaaaaggaaagggaaagagaaagggagagagggaggagaaagagaaagaataatgaagaaagttgaaacatcaaaacaagcaccctctaacacaggaggagttccaatcattctatctctctcaataatagattagaaaccactaactaaatacaacaacaaaaaaaataaattgatgaccagcctcatccaaaaatcaaattacctgccttataaaaattacagaaaccagacaactctgcattatcatgttcctggtctagctctagccgaaagctcaaacatacagagaaccccattcgtaaaaaaacgggttttgcctagtttcttacctataatatcaacttcctcaaaaagtcaccatcagaagcaactcaattttttggtccctttctgactgaagacctctttaaatacactctttctctctctcactctaaatgaggttagccctctttaggaacctgattgttctgcaataatatggccatattgactccacaaaatcaaggtatttctctactaaccactctccccattctttcatctttcgtttaaatgcttccttgtagttcatgtttttgatgtctacaacgggttgccagaaacgagcatgaacttcctccttaagctttccttgcacaatatagctgtaggccaccatgcagtatgcgggccagttcttaatgactttaacagcctgcttgaaggtgaatacgtagagaccaaacaaccacccgagcaactttacataaagagcgacgatgacgggcccaattatccacaagggagtcaaatctttagaaacttcggccccatatttcagatttatggccaggtacatagggatgctgcagatttagcagataaaacatcagcataatattaaatgaaagtacaaaaacttttgaaacataagcttatagttttatgttagatagtagaatacaagtagagacttctccagttatatgcacaaggcaaggagtagaaaatttaaaaactgaaatccttgttttgttacaaatactaaatcttagactcagaagccctgacaacagttaatgagctacccctgcttaattgtctcacatcatagaaacttttatttatattttcctttcagtgacatctactacttgttatttgttacagtcaaaattagttatgggggtggaacacagcttacataattgattaagttgggggaaatgttcatatttaagatattatagagagaaagagagagaaacaaatccactttacttacaataccatcaagggtatcttaattgatgcatccagtctcaaaaagtgacaccaaatcacctttagaagagaagttgtttccttcttctcagtctcaacttcagtttcagatatattagtaggagctggttcctctccttctataatgtcatccactacatgatctgaggattgtgttcgcaggtttgtcaaccatttcttgaataaccggtgaatagcaggtgacgacacactctcatttgcctcgcaggagtaggaaaccgaaacatcatttgcctttgaagattcagttatggcatcctcgctctcttttagtttgaccgagttcttgccactctttgatccacttgctctacctccaggttcattgtttcgagcattacctttaaaggctaaaattcgcaaagctttaggttttggtctgcttacacacgaaggccctacactgtggaatgaattttctgaatttgtctgatcaaagataaataagaaatatggtgtttgtgtgcatcaatgttgcatggatgcagaaagcagttaaagaaaattgaagttacaacaactatgctgaatgcagtaaaaaattgaagtataactctatagcatgattatatgagtctcaaaacgcatatcatgtatcatcaacctaaacaaaaaaaaattagaaaaccttaaggagaatattgacctcgaagaaatattccgctttagtaagaaagaagcatctgttctcccagatatgtgtagtgtagttacatgtcttttcaatttaaacacccttaaccaaagtaagggccttgagggcaatgtcacataagaaccctacaacaaagtaaatgaagaacttatgatgatggtgaagatgtacaaacaaaatattctagtgtttaaataccaatatacacttattaccaacatctatgaggaaacttgttatatgtgtgtatgagagagagagagaga

SEQ ID NO: 380507 - DNA, 1943 bp, Cannabis indica
tcaaggactttttatcccactggtatatatcccagttttcattttagtgaaaactgggataaaaggccttaaaaaccgggattaaaagtctttgtttgtagtagtggttcatcggccataagataatgatctgtcaagacttggctcagcactatggaaggaaatcaaaaaaggtcaattgtatgatcaaacttgatttacaaaaagcctatgacacaactgaatgggactttatagaggaggttctcaagggcttactttttcctgacaaattcatctatttggtgatgaattgtgtcaaaacaccaaagttctctcttatttttaacgaaactttgcatggcttctttgaatctaagagaggattgcgacaaggagaccccctatccccacttctagttgtcattggaatggaatatctatccctaataatgaaggaagttggaagcaaagaagatttctcattccatgaaaggtgtgaatctttaaaacttaaccacctcagtttcgccatctagtccttttgttctgtaatggagattataagagcattattctaatgcttcaagggctcagactcttcaccaacacatccagattgacaccaaacaagtcaaaatctgccatatattactgcaatatggcagatggggaagtcaaaagggtgctagatgcctcggggttctcccaacaaagcctcccttcaaatacttgggcatgcctatttgtttcaagaggatttcaaagaaagaatgtagtatacttgctgaaaaaatgacaacccgaatccgaacattgagcacaagaaacttatattttgcaggtagggttgttctttttaattcattcctctttgtaatcaattcatattggtgccaaatactcatattacaaaagagagtcattcatgagctagaatccatatgcagggccttcctatggaagggccaacatgttatgcaagggattggaaccattgcttggagcaagatttgccaatccaaagctgatggaggggctggtttcacaaagacatctgaatggaatgttgctgccctgtttaagtacgtgtgggccattgctaacaaagaagataatctttgggtccgttggatccacaatgtgtacctcaaagaggaagattggtggggctacaaagccccgaaccaagggagctggtattggaagcaaatagttgctgcaaaagatcaactcagagaactaattgacattcagtaattcacatccaataggtacactatttcccttggttacaaactgctctacccgttacagaccaaagtcacttggagcaatgaagtgtgggggagatttaacatccccaaacacagcttcatcacttggctttctgtacaaaactgattgaagactaatgataggttgcataaatttcatataacagaagatgcaaactgcattttatgctctcagcatgaagaatcaaccaagcacctgttcttcaacagccaattagcccaggattgtttgaagagtatcaaaagctagctatcctggggtgccctctccactgatctcgacaaactccttcggtggataattcatgcaaagattagcacttttaagaagaaagcgcttactgcggctgtatctgggctagtgtactcgatatggtatgctagaaatgatagaacatggaatgacaaaattaacaatgtagatacaattgtaaagaaaatccagtttactgttaagcatagagttgattcattttggacaaaaaaaagtgaatcaaaaagatagagaatggtatcaaaatttgtaatagaaatattcttgatgtctctttatttttagagatgctcttactttctaaatgatttgtggattaatacattgctgatttaaaaaaaaaaaaaataagatatggttaggtcaatcattattttacgaataaaataata

SEQ ID NO: 380508 - DNA, 4152 bp, Cannabis indica
aacaatatatctccatacttttcatcttttctaaactctctatacttcttactctctctccttccaatcaatcatatgcttaatatatacaagccagcccttagaatgtaggaataataaagtgatttaaattttggagtcctaacacaaaattaatttttacctatataaaatctaaacatgtaatgaagactatattttagattttaaccaaagtaatttccaatcaaatcaaacaatatttatagaaagtaccatatatattattatattaaattaataaatgttttttcaacaatgttaaatatgtgagtgtgtgattgtagactagagaaaaaaataatcaaagagagcttatataactttaaattaataaagagaaactttttaggaaaaaataataaaaatcttttaagtatataattgcaaaatattaaaacatattcaaatgggtgccacaggatttgaacctacattactttgaaatgtgtcatatgtctcaacctacacaatctttgttcatactacacttaagtttaattaaataaaagcgttgtaataatttttattatgtgagttctaattacaagtctagcctactgatatgcctagagtcaactttgtatatacttttagagcattgttattagacaccagtggtgcctagcactttcttaacatgtcgcgttgcgattggctagcgatactttctaaaagctattatattaaattatatgggacccgatacttaattagaccaatagcgatattgacacataggagggtactaggcactactggtgtcctttaacatttctcatacttttgttttaggctatgtttggtaggagagcatggggagtaggaagaattaattgagagaataataactcatttatatatgttgttttgtattaagtaagagtaaattatgaacagtaaattaattgttaaaattactatactatcatattttttggtttttacaggttaattttggtatttcatatagttattatatatttttctttaatccttccaaaagtggagagattgaatttttaagattttaactctcctctcccgaacgttctttctccctcctgggtaattgactctcccttcatcaactactctctccccctcctcctactaaatatagtgttatggtagaaatggattttagtaagaaaaatgtaggaaaaaataataaattctcgtaatatttagtatgaaaaaaaaatgtatgtatagactatagacacttaatttaacaaaattaattatctatatcaaacataaaaaaaataatttatttttatattctccacacttttataattttttcttacatttttctttttcactaaaatctatcttccaaatatagcctgagcaatgcttgtagcagtgagagtataattaaaatgtataatatctttttattagtgtaattaaacattaaattatgatatattttaatttaataattacttttttgaagtaaattaatcagtgtttattgattattaaataagtaatttaataataattattataaaagcataaaatttcactgtgcaaatagcaatgctcatgatatttttttgccctttgaatacctgtatgatctgtatgaagataaataaacaaataactaaagcaaaataaaacagtcaaagtttacattacgtaccctcacacattcgcctacttctcttatatatgcaaatcttttttatttttaattatacaaagattataatttatggtaaataaaattttcttaaaaagaggtttatatgcgtttagggtggtcaataatatatactgtaacggggaaaaaataataaagggagagagaacatgtgtggattgttgcgtagaaaatctttaaagctcaatccggcttacgttagcctcacaacactgccacgagattttgttctgagtagtatttgttatgtataatatttatactcctcgcccatattttctttccagtactggggagtgcgcacattttcttatcctttacaccaaaccctacacacttcacattttgaaagacttctattcgtctataaatacacaactatatagatacatatctctcatcagtcatatcacccaatatatatatataaatataaatatattatactatgaataaggtagtattaacttttgctatttgtagattgattgttaaagtagggttaaccatggaactaacggatgttctccggctagcaattgacggccagctaagccttgaccaagctgacgtggaaatggcttctaaggattttggtttaatgaaacgagcgaagccgttagccgtgttgcacccggcgtcggctgaggacgtggcaagggtagtgagagcggcttacaggtcgagttgggggctgactgtttcggcaagaggagaagggcattccataaacggtcaagcccagacgaagaacgggattgtgattgcaatgagcagatcgtgttcgtggggaatgaagaagaagaagtcgaagtcgaaatcgaaggagcaggagtcgttggatcagcggccgagacctcgagtttgtgtagaagagatgttcgtggacgtttggggtggggaggctatggatacaggtgttaatggataccctaatgcatgggctggctcccaagtcatggactgattacttgtacttatcagttggaggaaccctttccaatgctggaattagcggtcaaacctttaatcatggtcctcaaatcagtaatgttcatgaactcgacgtcgttacaggtatatatatatatatatacatataaacaataatcacttccttttatattatttattgcatgctagctacctctcttctcattgtttttagtacactttaatatattagctacacgttttgtataactatatatatacatattttttattctttttcctcttacaagtaatatttagcatcgtcttttcttttttctaaatctagctagcgaaattcttgttttctcagttcatttttttgggagtaatatatatacatttatatatgtgtgttgtaatttttaggtacctgagtattttttttccttttataatatttatttgatgacgatcatttgaagcatcttgggaaataaaaaattgaaacgttataatcctgctcatatagtattttttgtcattttgcagtatactttaaccatatatatagaagcgtatatatattttacacaatcatttatagtaatataccgtactcttttatcatgtttattgtttagactttccttctctttcttgttaatttcttgtttaaattaattaaaagtccgattaatattattttgtagctttaacttagtgtgtctttattatctttgatatagaattatctcgattgtatacatatcaattaattaactagctgtgttgcatatatatatttatacaggcaaaggtgagctgatgacttgttcagaagagaaaaactcagagctcttctacgcagttctaggtggtctaggccaatttggaattataactagggcaagaattgctcttgaaccagctcctgaaagggtataattatatatatatatatataaatatattacatatgtctttctttccattattattttcattgtttaaaattaatggccttccatgatcatggtgggaaactattttttttttagaaaataataataataatgataaaatttgtagtatttttgttagtggcaaaacctaaaaatgcaaacttggcctcgcggggtccatgaaagcttgctctctttttttaaactcattaattcttgttgttccatatagctggactggaaatgttgttacgtacgtttttgtgctttagtctgacgtgggttttttctttggtgctcgtttttctcttttgtttatttatataattcttcttattataaattattaatacaatttttattattttcaacaatcatctaattaattaacaggtgaagtggatgagagtactgtattccgatttcatggcattcaccaaagaccaagagtttctcatctctttgcatggacaacctagtccccaaaaattcgactatgtggagggttttgttattgtagatgacagccttattaac

SEQ ID NO: 380509 - DNA, 1342 bp, Cannabis indica
taactgttaaactagcacagttaaactacataccacctccaatttaatccactgcttcgcttttcaaatgttactcccacccactaaacaaaccacaaacaatataaggcttctaaccaaaaactcaaagttaaacccaatataaaaattagaactttaccatcgtctttgaacccctctaaggggtactcatctggataaaacaaattttagacccttttaatttccaaatgaacacatcatcagtccgacaagaaagtagaaaatcaaaatagacacgagtagccaaaacactaccacactaccacaaaacgtatgtcacacgcaagtgtataaactgcttcccttttcctcattaaaatggattaagattaacgataatgtcttgatatacagtttagcactcccttacaaaaccataaaaccaactttacattatgttttcaagttaagtgttagcctcagcgttcgaagaccaaatacaagaaggataaacaaaataataatgccaaaagcaaaaatacaaagggtcagagaatttataaatacaccaaaaaaaaaatcagaacaccccagacatcaaaaggcatggcctaaatttttccaggaaacaaacaaaagcggtaaaaagtaaaacaaacccacaattcgataatcaaataaaacccccgtctaagatgaattcgtggatttgttgttaatacacaaaattcaaacttgcgaaccctaacaaagagataatacctggcccttcactttaagattgatatgggcagactgatcgttaggcttcttgtcctcctcttgctgcggctgggcagttgtccctgacatcgtcgtcttcgtctacttaatctaactgagtgtggaaactagggctctttctctctctctctaaaaccaaaaaggcctctggttttctatctaagtcagtttcttaaattaatatactttctcttctgaaaatataaaataataaaaataaacccttttggtgatttttcttggttccaccgacggcttttgttgtagcgtaattacgtgagtttacacacgtggaagtggataattggttaagaaattaaggataggtcagtcttttgactgtttaaccaatcatgtaccgacacgtattgaaaagaagttgcacgcgtacttttcgtgaacagcatgggtctcgggcctcggcccagtttcgaattcaaagctactctaaactctctgcattgggctttcctttgttctcttataaacaagacggttgtagttttctatttttttttagggtttttaaaggaaatttacatggtatactaacttttgtcatttttttacaaaaata

SEQ ID NO: 380510 - DNA, 1504 bp, Cannabis indica
cagtggcagtgaaagaaaaattattttctattgaaaataagcaagcttttatgatggtacaaaatccaaatgaatactaaaactacacaaaactataactactcacaaacagagcaatgatggcaacgaggcggtttaagctggttgcactttcggcagtaccgaaccctttgattagatgggtcagtctgcaaactagtgaactcagagccattcaaggggtcagcctcccctatttcttcatcaacagcaggtctccagttaggcggaacactacccggatcagtcaaaacaacagaaaaataactccataaaagcatcaccaactgcacattacaggaacattccactttaagcattcattaccactgagactcactttctataatcctctctatcaaaagcaggcactaaatttcaccatagttctggaattatgttgcttctttcaatcccaaatttaaaaatttcccagaaagaaaaatcttttggattcaagcaaattgcatgaaaagtaaagtatataaaaaaaaaaatcaacgtttacagacaaaaagaaacaaaagttatatggcagttgaatctcattgaaaagaaaccaactcagattccagaaataaaaaaaacatgatttaacatggacgaaataataaaatttagaaacaatgaattaaacaaacagtaaaacatagaatcaaataatcaaagcacaaaaaagtcaggatattttggaaaattaccaaggaatggaacaagatcaagacaataaaagcaatgagagaatcaagaccaccatcgtagagagctggtccataattagtcaaaacgacagcgtaataggtaacacccacgaccccaagaaccaaaaggatcatgatcgagcccagaccacgaagagctgtacagaacttaaacacattccaagccatcgttactccagatctatgcatacctcacacaaccacaaaacccaaaaactaaaccaaactttttcccactctcctccttatttcaccagatttctcccacactcagtgatctgagcccgagccttttgattcagctggtttcatagtccgaattcacatataaataaacataaacaattaattaaataatactttctacttctatctacgaaggaagtgctatttgggaaattgaatctagggtttgataagttagacagaaagaggattagggattaaaggtaggctttgtggatgaatccatttttgaagcagaggaggtgatctactaatattttataattatttatactataacgctttctttaattttaattttttttacagggtacttatacttaagcaaagtatcgaattatctatctaacaacaacaacaactactacttctaattctttctcataatctaatttaataacatttatctatatttgtatttagtcctcttgtaaatttctagaagcattcaatttagtctaatataagtttttttcaatattaaacattatttgtct

SEQ ID NO: 380511 - DNA, 1418 bp, Cannabis indica
aattgctctataatatgtgaactcaatactaaaatatgagaatctaaaccagcgcaccagcaagctcgaaacaaatattcagggtgcccataaatctcttaaacaggttctggctattgtgtaatagaaggattgcaagatcggttaactttccatttatggtgaagacaaagtgaatttattcaagtaaattccttgattttcaagtgctcttaagttttatttgcttgtggtctagttggataattgaatattgatgctataaaatatatatgatatccttcctttgaataaacatggtgatattgaggcttgagatgttgcctaaaatgatttgacaaattcttgagtctgtctttggtcatgtcatgtcatgtcatggtatgatgttgtgtgttgtgtagggtcatgactcatgaggctaaagtgatggtatggtgtcaaagactcaaaagcttgcttcatgacaaccaaactgaaacactctatctctaattgcacatcctttccaattaattaaggagattttttgaatgacgacactttgtttagcaatttttaccactctcactttgtctatccgaaaatagaaaaaactcgacataagacagtaaaagaaagtaggagttggagtggtattagtaaaaataggatgttttacaaaatgggaaagaaaatgacatatctctatctatatctatgatctaactccaaagattgatttgattgaggttgaaatatccaatcaagtcacttacaaaaatgaagttaacaaaatactgagaggaatggcagccgggtcagaaaaattggcaaacccctttttccctctttcacaacaaaataacatatgctgcatgtgttagtcaactcaactcaactcaactcaactcaactcaatcttctgcttccattgcattgtctaatttcctttcctttcctttccatatatccaatcgctgctgttacttaatgtcattatttatgcctaacatatccaccactcttcccaagtgctatttcccacactcactcactcactcactcttccttccatttgttaacataccttgtgaaggcattagctcggttttcccttggcggagctcgtacgcgtgtggatcttcgcacaacagcctcttccaatgccatgctgtgcatcaggtcctttgttttctcttgcagttgggtactgcaacacaacacattagcaacaaacaatgttatgtgaatgatacaactaaacaacgagataaaacacaatttttttaaaagaacagaacagtcacttgccttattttgatgtaaagatgatcgagatgcttttttagcgcacactctctctcgcccttgcagtttagagaacccatcaatgcatcaagctgttccaaaaatatcaagtgcagtaaggatcataa

SEQ ID NO: 380512 - DNA, 2544 bp, Cannabis indica
aaaattaaaaaaaaaaaaatagcatgtgttttctaatatagagcctgagaacgaagttgtaattaacagtacttatcaaaagataataataagaaattatgttattttttaagtcttaataataagaagtaagtatccatataaataataaagaaaaaaaaacaaatacatataatgaaatgctaaaggattaataacattaaattaataatttaagctcaaaataaagagtaataataaaagtagaaacttatctaaagaaaggtagtcaatgaattaattgcttttggtgctacctaccagtacaaattttacatgtgcaaaatgagctaaagaagacaatgtattttttggtctttaatttcttaatattgtaataattacatcttattacaatcttttacttaacttctacgtccgaaatcacatatcagagtatttttttcaatttttttatagcggcggtccaaaacatcccatttctccttatcttaatatagtaattactacagtcttatgcatgctaatcttcttttctttttctgttttctgtttttccttttttttttttaatgaaacagcatctagagatagagagcattgtatgaattgcatttttccaaggtatatcaaagtatgaatttcaaaattttactttagatttttgtaatttgtggctgaaaggcagggcggctctgagcataggcggactaggcctgtgcctaaggcccacctagctcaggggcctaaaaaaaatttatcccctaagacatcaaggacccaagtgagactatgaaacattgctttagcttcaatctcatgagatgtgaagtttccaattattggtttagcaagagcggctacaacttggcctttgtcattacggatcactgctccaactccaatagtgtttggataagtattcaaagttgcatctacatttagtttaagggcaccagttagcggcgtcaatggaacctgaactggtatcgttggggagagccttggggttgcactctacgccagatggaattttaggcaagctactcgaaagttgtgcaagtaatttatagcaaagatagctactattgaggatggtttcggtatagctccatgaactgctttatttctttcagtccatattgcctagagaagacaaaaaagcttgttccatttcaaccttagtaagtatagacgaaagatgtacccaaatatcttctttatgcataacgaaagctttagcccaatcaagcaccatttgggaatgccgtcaaaccaaacgagcatatttacatccaaaaagttcatgtccaatagatttccaagttctcatacaaatcgagcaagtagagtttgttatcactttccttcttactagtgaagtagctacaagaagagcatcttggaggactctctaagcaagaattttaattccttgtgaccaggaattcatgaatcaaaaccacatctgactcgtctatcctcaccaaaattccatctcaaaccagtcgataaaagctctctcttcccctcataattccttgccaagtaatagatggtgaatgtccatgatgtacttccaaaaaagaattatttgggaattattgacttttgagaactctgcagaaaagagattgtggattttctaatattctccatgcttccttggcgagaagagtctcattaaaatgcacaaaatatcaaaagtccatacctacacctcccttaatttacaaagcaattccaacttttccaatgtattttcgaccatttttttatcttttccccactaaaagcttgacatcataagttggctgcaaatgttattaggtagttgaaaacaactcatgacatacgtaggaatcgattgaaccaccgctttaagaattacctataataaaaggtcattcttactatttttttattaattaatatgatatgtgtaataattttagaatattataaaaagttttgttacaaatatttcaataatatattgaaaaaaattaataagtaaaaatccttacggtaacaaattataaaaaattaattaataattattataaatttaattttaaatataattaattataatgaattttataagaaaataaagtattaagttacaagatgattattatttatctattttttaatttctaaattaatcatatatagtaatttaataattaaaaataaatgcaatcgtagtgattataaatttaatgaccattgaaaatctccttcaagcaactttgctaataaaatagtgatcttggaccaactataaccatatgatcatttctcccactgatacataaaacagtaaaattaaacaaaagatacaacaatgacattgtagatgtgatagtcagggggaaatatcgggtaagcagtgcaatcccacaccgcctgggaaggtcaagttggatgattctaagactgtgtaggtatgggactacacagttgaagagggtttaaatggattgattgatactacctatatcaacaagatgcatcttgtttttcggtagcccatcacga

SEQ ID NO: 380513 - DNA, 2256 bp, Cannabis indica
aagggaaccgccccggactctacgagacaagcgttaatcaaaaacgatgccatgcagaggtcagtacctcccacgacatctctaaaaaaatgcgaataggcaaaaatccacccaacttgacctctgggataagctcaaaaagaggagacaagagcttgacaaagaaatggaggatctccgaaagaggatagcgtctgtcgcctccaaggaatgcaactgggatgaagatgactttgatgatgaatcacctttctcaagggatatttaagtcgagtcgttaccaccaaacttcaaagagcccaatatagctccttaggacagagtcaccaacccaaaaatactacctaaatgccttcaaccaagtgattaagatgaagagggtcactaacaaagtaaaatgttaatgcttcgcagtaaaactgaggggtgcgacatataagttgtgaattttacttataagttcttagcatttctctcatcttatttcattttatcttaaatttaattataatcaaattttagtgtgtaaatataacgttctttaaattatagttaaaaaaataattatggtaaaagactttatgctcattaaaactattaatttgaagtttaattttaatagttataaagctagaaacaaaataatacttaattttctacgttggagaaaaataatactatgacaaaaatgagaggataaaataataaaacataagttttataacacccatttatactgaaaatttttaagaaattttgtaaaaattaaatattattggaagcacctaaataaattaataaataaaattggagctacgatctagattgattaattatctaccatttttttttttgtagcataaatatctagcaactttgttgctttttctttatataattattaacaccctcttttaatagtgttatatattaatcaatcaaagatgtacatggtttattaattaataatttcaccatttctaatgtactagtatataaaataaaataaaaaagctgttccttgtttaactcttttttcccataaagaaagaaaaaaaaaatggaaaaattatgtccattatccagaacttgataaatagttaattaaatattttttacagcatatttatttaaatagtatatatcttttttcaagggatttatttaaattatattgtttatacaagagtgatgatttataaaattttaaatagactagatattctattcattcaattatattaacatttaaacatatttttaacataaaattgttttcatataaaataataataaagaaagaaattaaatatttatatacaattttgggaagagtgatcattaaaaattgctttgaccaccaatccataaacataggctcgacatcattatagctagaagatacacataatctacaataccaaatattttagtgtaacttgtcagtgtcttgattaaagaatgtaatgtataatagatcaattaaaatataattaatattagaagaaaaaaaaaacattgcaatattatttataggtgatactttaattagtaatattttttaaaaaaattattgtcttttaagttatatgaatttgatttttaattatactaagaatagttgtatgatcctaaacaaaatgctagactattgatatggatgagaaaaatagaagggtatttgctgcataaagtttataaagtttacatttattggcttattttattgtagaattttgcactttgtattttttttttttacttattttttttttggtcaaaaatttactatgaattataaaaaattattgcaaatattttttaggttctaattatattatggttatttatttaaataattaattgatatagtactgacatgcactacaaaaaatcttacttttagtcctaacaaaacttgtgactaaaagtgaaaaaattatgactaattataaattagtattttttatgttgtgactaaaaggttcgtggctaaaagtattagtcacaaaaattataatttgttgtgactaaatgtatttttcgtcacattacttattgtgactaaaactaaattagtgacaacttgtaattttttttttgtaatgaaagtagataacttcattaagaaagaatagccaaatcggccattacagcattgttgataacatcaggaacattgctatcaaaaaaattaaaatctgaccaaaaaaaagcgccacgagcaaggcaatgagcgacgttgttagcagatcg

SEQ ID NO: 380514 - DNA, 2032 bp, Cannabis indica
ggggtggtgggtgcaaacttgaaaagttaaagtgaacggacaattatacccttgattaatgttcagtttggatccttctttagttacaagtcatccacatgagtggcaatttagacatcatcttctccattctcactccaaccggaactctgattaatcctctctgaaaaccctaatcgttcttcacataccaaatcttcgaattaaattgggttttctttttcggtcccattaatttgaagtttccttttcatattttgggatcggaaaaagatttggttttgaaatcttaatagctatgccgccgaagcagcaatcgaaagccgatgtggctaagaagcagaaggtcgtagaggataagacctttgggctcaagaacaagaacaaaagtaagaatgtccagaagtatgttcagaacctcaaacagtctgttcagccgaaactcgattcagctaaactcactgcgaaggtttgtgttatatacccttctctcttttatacatatatgtatgtatatttttgattgggttctgtgtgatttcgggaaaattggccattcaaaatacgttgtaaatagtacaggaattagttattggacttgtttttcttcgttttcttcgctggtgagcttgatttatttatttggaggtcttggatgaggattctaattgattagtaattgcatgaacagaaaaagaaggaggaagagaaagcaaaagagaaagagctgaacgatttgttcaaggttgctgtcagtcaacccaaagttccagttggtatgtattgtgctttcttactctttgttgttttcggtgatggttagcaatctgttttatttggtattttgggtaatttttccgtcttttatgaaatttggacttgtgaaaatttggataggtgtcgatcccaagtctatattgtgcgagtttttcaaggtcggacagtgtaccaaaggttttaaatgcaagttctcacatgatttgaatgtccagaggaagggtgagaagatcgacatttacagtgataagcgtgatgaaggtgattggctaacatggctgtctgaattattcttgctttcacttgtgttttgttgatgttgatgaaccaatggtttacccttttgttcttttctgggttcgttatttgttagacacgatggaggactgggatcaggagacactggaaaaggttattgagtcaaagaagatcgagtacaaccagaacaaaccaactgaaattgtatgtcatatacttccccttggttacttagatatttgttgttgttgtggaaattttgcatttaaaggtgttgttctctctccgagaatgtttttctttggcgttgtgttgcttggcatgctagatgttaatgcccctcccatacgggcctatgcctgtgggtggctttcaaatatcacctttggaaatacaagtgggcatgtaaatgtttttagtgatatatggtgcaccacttcaattttttcagtttgtcattcactgcttgtgctgaagaatgtggcgtttactagtgacttttgttcaagctgtatgtcggagtctattatggagacttccgataaatttttgatagattagattgtttctggaatcaatgaagttactggaagttttttgtttgtttgcatttttcttgaatttgttatcgatttgaaaaagatactaatttaagttgcactaaattctggattattaatgcatgtgactatccatttttgtgaatttgtttatgttaacaagcattttgttctgattgtaatggtaacttgtaaggcaatcatgaataaactaatcaacttcaagtttcttaatgagttagaacgtagatacaaaggcaggctaggcagcacagattagcatatatcctagattctgtaaattctgttacttgactttggggttacattattgctgggttagcaattggaataaacttcattgtttcaattgatgtaaactaactgtgtaatttacacccagagtttgattgatcacttatttgttaaggggtttg

SEQ ID NO: 380515 - DNA, 1198 bp, Cannabis indica
ggaataatgttctccaataatatatatatcattgtagggacatatataggtagtacatataaacaaaatatacataggatcttgtaagaaaatgatggtggagagagcaatagtgacagtagagtacgatttatttgcagggatacacatgaataggtaagaatgatagataatggccattattttgaaagcaacattgataaattcggccaaacaaaaaaatttatgatgtaatttttggtgcccaaatatttaaatttaactggtgtttcaataaatatttaagttgaatttgtaagagtaataattttaaaattttggtagatattattaagtgtcaagtaagttaacaaaaaaataacactgatttcacacttaaaaactaataccgcaaaaatttcaagaatataacttacatattaataaaatataaaattaaatttatatatttatttttttaataaaaattaaatttaaatatctacatttttttttatttgatacattgtaaattacttaaatttatatatatatttttcgtcctttcaatatgttgaaatatctattaacatcccacttgagtacttccatttatgccaccattattttagcacataaaaggaaagtatatactaattatatcacattgattattgatgcgatgtttcttgcaacgccactgaacaatttgttataatagaatttctgttattctcaattttttttttgattaatgttattctcacttttaatatatgtaaaagttaagagttacaagattagatttttatttttcttgaccaagaaatcaggaatatataaaagagtgtaagacttcattctgacttcctttaattttttattttttgaaaaaagtatataagatttccttttgcttctctccaaaattcacaaaaattagaatatttttttttatttatttgttcacatcatcattatatataatttattaggagtaagagaacaatggaatggtagttaaaagaagattaatttgggtccgcatattttatccaagagaataatctgactcgatattaattcttacaaaattaatgaacataaaaaatagaagaaattattaatatcctaaagaccacttaccatataactttaatcatggatcatttcgtcactatcatttataagtctgacgtggtgatatataatttgatcc

SEQ ID NO: 380516 - DNA, 1981 bp, Cannabis indica
acctattcatgggaatggtattgcaaataaaaaatttaaccatgttgttaaacttgttcccataattttttatggagcccatgtacatgcacgcatggctggactatgtcatgcatgtaacatgattcgctatgaaatcttgcctttctcttatttttttttttttattttaagccactaaggctagcttagtggtgagggagggatggaaaaaagggagaggtcatgggttcgaacccaggacccttaagctattaagctaatatatgattgtaaaaatatcattacgctacactcaaaaaaaaaaggaacgttgttagagccaccctcaggacctattgacctataatttcaagttttaataaatattagactattaattaaaattgtttaactaaataatattatttattactctcataattacttcatatagatatgagaatgaactcttgataactataaatatatagtactttattaaagataaaatatccattgatttaattattacatacaacgttaattctctattaatagttcataatttagaaaaaataaaatcctcgtttgtacattacttcatccagttgcaagtactatccaaccttcctcatcatcttccgtgcttcatttcggtcatgtagaagtattccagtttcaagatatgctgcaatagagatcatccaggtaggagtgtcgtctagcatttcgatttcctccatgcaagagatgttagggtctttcaggaactacatgggaactaaatttgcattgtttgtcactatgttgctcactagttgcattttcctctcttgaaatttgcatgatagtgtatcccttgaattgtgccaagaggtcttaaatttttcttagatatgttatcatttttctccccgagctgcatattcccccagaacatgattgccaaccagttgagtttcactatagatatccaggtattcagcatgcacctcccgagctagcttgagtctagcaatgagtacctcatattcgacattattgtttgatgatgtaaacccaaatttattgttctgtgcaagtgcttctcccaggtgtaatgagggtgattcttgcaccagatagttgatcggtagatgacccatccatgtataacttccaggtcggcctttctttggtcttttgctttgatgggggctctttttcttgctcatatttccttctcgagcttagaactgtcttctgagagcgttgtttcattttctgtacactcggcaacaaattcagccaaggcttgaccttttattgccactcttggtagataggtgattttgtaatgtcctttcaatggcctatttgagcagccaactagatgcatcatgtttttccaagacttgtgaaagtggttggtaggtgtatactcgtagcttggaagtacggtcttaattttcttgaagtcaggagcaagcaataagtaagtttctcaattggagggtatcgactttcataatctattaacctcttactgacatagtagaccggatgttggatgttgttaccttctctcatcaatacgacacttactgcaaatttggtcactgcaaggtatatcccagttctttccgtctagcgattttgataagattggaggttgtgtgagatgctcttttaatgcttgaaaagcttcctcacactcctcagtccatttaaactttttacttcctcggaggatgttaaaaaagggcagacacatgtctgttgatttcgacacaaatctgttgagaatgactatatgaccagtgaggctttgaacttctttgaccttcgtgggtgatttcatatccaaaagggcttaaatctcctccgagttagcctcaattccctggacattaataataaagcctaagaatttacccgaactgactctaaaagaacacttgagcggattgagcttcatgcttccagcctttctggatttgacaagcatgtcgtccacgta

SEQ ID NO: 380517 - DNA, 2717 bp, Cannabis indica
ttaacatctatatatatatatatatatatatataaaagtgagattcatacaaaaagaaatgcaaacaatttaaaaactataaaatttaaataattaaacctataaatttttttatgcttatattaaatggtctttattgatgaaacatcaattatttttctctataaatgaatttttttaggacttaggattttaattttataagcatatgtggtgtaattattaaaataaaagttaaattaaactcatcatttaaaattatatattttggtaattccttataaagataaatatataattaagtttttcatttaaaataagatatacttacaatttattgtggtgtaaatatttataatttctccttttaatatttattattgatataaaaagatcatgtaactactcttttaaaactgaataattgtttatttcctatatatataagaggtaaagatttgtgagaagatgagattttttttggaatggaaaactccataattgagttcagacatttaaacagagacaaaacaataaaattgagccatgaactaagtagatttaaaatatgaaccaaataaaaaatctttggccttcatatatttttttatcactttatttcttgaatcaatactgtagtctaattattatcttcttagattaaataaaaaaaaaatgctttaatatactagacatcacttctttccatgccatcaaataagttaatttttatcataattgcattctatattcaaaattgtgtcctagtatgatatataaatttgaagtttcaaactatcaccaccactaccaccagcccatcccacaaccaccacttgcaaatcgagctacgccggtgatgagatagagattggatggattgagagagagtggaatcgggagatggataagacaaagagtgagattaggagtagtgggacagtgtgtgtgatagagaaagcgtattagggttaggtttatttgattgggtattttgtgtggttatttttaagctcatttgctttcctttaaaatccatgcaaatgggcttagtgtgtcagttgagcttaatatttgcgtcggaatattagtaatggacaagattaccttttcaatactaatcgataaaaaaaatttaactaattaattgtgtcagttttagggtcgatatattaaccggcgcaaaaatactattttagtgtagtgttgaaattatttattattttaaaatacattttaatttaactttatagtaattgttaagattacttttgtgacaaaatgatattgtaatgtgtttatcacagtaaaaattaacattatttaatacttaatagcaaagagtaacaaatctttaacgacaaagacttttctgttaaatatttatatagtaaattaaatattacaaaataaactatctactcaaaacttttttccgctattacaacaaaagataaataaataaaaaataaaaaaaatggaataattttgtttccataaattttcaattattccggatccactttatagtctgtattggagtttgtagtgccttcaatataatgggcaaagaaaaagattaaacttgaaagtaaggatgactaaaaataaatttgtaaaatgaaataattaatatagttaaataagtatattaataacagaaaaataaaaataagacgtgatacttaaacctttaattttttggtgggcggacttttttatttatttatattttttgaaatataagtctgattttttaagtccctgtaatgagattaatttactctttatctttcaaaagtaaaatagtattacttaccaaaataggggctcaattataggtaagtataaagtcatgataatttgcctttaaatacctgatttatatatagtaactatttaaaatatatatagttaattttatttaatagtttgttttattttagttatatgaagatttcaacccaatatttaatgtgttgtggatgtatggtgttgaagactgcattttagatttaataataatcagatatgttgtgaaaaaaatatatcacattcacatgaaagaagaaatagacatttaatatctctatgaaaagaattagagattttgaattaattaatttttattgaatattgagttagctgagtacttttatatgattgtgccaatgggaaagagtcaataaagatatcaaccgttgtataaattcaaatcttttatatgatttgtataaattcaaatcttaatacattaatgatggtgatataaaagtaaatcaatctcccattatcaccacacattttgattctaaaacagactgagttatattgatgcgcatactactattaattgcattatatattatttgttttaggataaataatatatttactctctgaattatttatttatttttagttttttaccgcattatattcagcgttgctaaaaaaatttctaaattctatgattgcgattagtaatatttttttaacaaatttttacatgaaaaatccattttacacaatttattacaaaaacacccctacacgcctatattaacttttttacttaccatgtttgttttattacaaaaatacaacttagtcatcatttcatgcacatacacgtgtgctatccccatcactcatcaatcaaatcccactctcttccctctcttttttcattttctttcaatttcattttcgatttt

SEQ ID NO: 380518 - DNA, 2144 bp, Cannabis indica
aaattattttaaatattaaaatatgttcatcaatttataagatggaaataaaaaataaataaaacactcattatttttatattctctccacttttttcacttgaattttatttccttccattttttcatcccataatacatatgcttaattttaattacattgtcaattcattcattaagatcatacatatattttctaattttctctttaaaataatttcattcatcagcaaataatcgaggatcactcgtcgccgcctgaataccaaagcgtagccctggtggtcggagttactggcatcgtcggcaacagtcttgccgagatccttccactctccgacactcccggcggaccatggaaggtttacggcgttgcccgccgcccccgaccctcctggaacggcgaccacccaatccactacattcagtgcgacatcaccgaccccaaccagacccacgacaagctctccatccttaccgacataacccacatcttctacgtcacctggagcagcagacccaccgagatcgagaattgtgacgttaacggccgaatgctgaagaacgttttggacgcggttatcccacacgcgcccaatcttcaacacgtgtgcttgcagactggccggaagcactacgctgggccgttcaagctctggggaaagatcagtccgatcaacgaatctccgttccacgagggactcccgaggctcaaactgctcaatttctactacaccttggaagatactttaatggcggaagtgaagagaaaagagggtttgacatggtcggttcacagacccggcccgatattcggattctctccgtacagtttgatcaacgttatcaacggtctctgcgtctatgccgttatctgtaagcacgagggaaagccgttaaaattcccgggtaatcgggtcgggtgggagagttattggagcgcctcagatgcggagttaatcgcggagcaagaaatatgggccgcggtggatccgaatgttaagaacgaagcgtttaattgtagcaacggcgacgttttgagatggaaacatttgtggaaggttttgggtgagaaatttgaggttgaatatgaggagtttgaagaaggagacgacgacgttttgataccgagattggaagagagaatgaaagataaaggggaagtttgggatgagatagtgagaaagaattggtttggtggaaactaaattggaagaaattgggtgttggtggcttgtggatattcaagtgaggtttgagtcttgtttggacagtatgaataagagcaaagagtatggatttttggggtttagagattctacaaagacttttgtttcttggattgataagatgaaagcttataactatgttccttgattttggggttataattttaattgaggttttggttgttgtatcaattgtagtggttggtcttttgtgtttacaaacttttcaagtgtaaaattctcacgttggtgtgagacaaagaaataaaacgcctaccttctttctcttattaatattaagaaatctttctgttgctatttagtttttgagttatgtacaatgtactatttagttttttacaatattatatcttatttaatctccatgaagtgatttattgtaaaaaaaaatattggggtttcaagtttgattttttaggtgattaagttttggatagacttggatacgcacgtgaacctatttttttttttttcttaatcttacctaaactttaataataatacaagtttacattatactttattatactttacatatattggacctgaaaaagttacataatacaatatatatattatatgatcatacattatttttatgtattgaaaatttatatgtatatatataatttattgattttaatggtttagttatatatttatatataattaagtgtttagagtttatatataattaagtgagtgttaagaaaaaagttgatcgagtcaactcattaatttaggtggcgtttggtaacacttttttaatcagttttctatttttaaaagtagaaaagtgaaaatatttatcaaaacatgttctataaaactgtttttacttttcaattttataattagaaatcaaaattttaaaaacaaaaataaaatcacttt

SEQ ID NO: 380519 - DNA, 6501 bp, Cannabis indica
aaaaaaacccatttattaaattaaggtgcccaagattttacaaaaaagaaaatgattaattagacaatggtaacatccatcacatggaaatggaagaatcatgaaaatgattgttattggtgaactatccatgagttttaaaacagaagagatgctagtatagacacatacaaaatcattatccttcaaaaattatctcataaacttaagagaacacatagtagtcacacacgaaaaaaccttctaatcaatgcaaactactgcttacctccggaataataaattttccagtgagaaggcagaaagcggggagggcacagtaaaaaagcagtggaatagaggtaaggggatacacaatggtgttaatgtatgccaatcgctccaaaagtctgagtttcccattgtaaccataccaaatggggcaatgtctgctaagcaaaatttcaatggatcccaaggcccatcgaagcacttggttcaaacgatcagaaagattgataggagcagaacccttaaatgctgggcgaggaggcatgcagtatattgaaatccagccacgagcatgcatcttaaacccagttaaaatatcttcagtcactgaaccatagatccatccaatctgtagacaaaataaaatgtttaattgataccttagatatagactcaaattgcacagaccgatgtgcatcaaatattagccatttatatttttgaacggggaccacatcacttttaatagtggttcagattatttacatgtcattgtgtgtaagaaatatgtataatttgagagtgtctcaatcattattaatataagatcttatctaactgcatcttacagctttttctttgcttcatttctgttttttggttactaacctcttttccccactcagtcttgtcttcgtatccacagctaattacatggatcgcttccttcaaaagtgttgcagggttggttgatggcgggatacctccttgttccatgaaggtggctgcaataaaaacaggagattgtccgaaacgcttctctaagctcttctgggacataagaagtgctctctcatcatcgtaacctgcagaagacaagaattttgttaccatttcatagttgatgcatcattcatttcaaatcaatgttcatttgccgctcgataaatagtacatattaataagaaataatacagaaaaaatacaagtaaagggacgtcaccatattttaaatttaatgaatatatatttgcataattattaacgatgccatcaggagagaagtaaaaatttccagaaaaacaaaccttcaacaccctcctcgatgtcttccatattgaaaatcggaatagtagactcggttcttttagctgctctctttttatcaacgtacttcttgttgctatgctttgctttttttcttgaaccacaacaactcttcacaattatgtttggttctaaatcttcctcggttaatattggatcatacccatataaagctttcctgttgaaacaacaacccgttcccacataaactggaccttggatgccatccagccctttcaagttgatctgaacaataatagagtttagtttattaaatataagcacagtaaaccataaggcacttcaggaaaaacaaagaaattaagagaaacatacatcaaagaagacaatattgcgatttgcatatcgatcgtgattggcaatgccatcaaaacgctgaggaaattgtacataacaggtcttcctcccataagcagggtccatcatgaaacacattgcttctttaagagccttactgttattgaagtagtgatcacaatcgacattcaagagataagcaccattggtaaggacagctgacactcgaatctgcatgttatccatgtaagaaatcagaacagattttatgagatactaggaatgctacaatgagatgatgtttgcaaatgataaatgtggcatctcaaacaaattcatttaacgtagcagaaaatgtcaggacattcccataccttaataggccattatgcaaagttcaagggaaattaaattagatcgcaacagggtacatacaaaatcacaaggcataaacagcctctatgcaacatcagacatgagtttggctagtaaaaacttggtgcaaaactcgctaaacaaatcaggatggtgtataattagcatttttgcaatgtctaagctaacttagatcaggacaaaaactaaaaagttgtgcaaaggacaaaccaaagcattcattgctccggctttcttgtgatgctggaaaccaggacgcttctcacgagagacgtaaacaagtcgaggcaactcatttccatcagtatcaaggcccccactatgtcctaagaaaacctgttggtaaactccaaaaaaatttgttaagcgaaacaagacaggccagggatgtcaatataatgttccaatgaattttacctgaatcattccaggatgatccctagaattatttccaggccagggagtgccatcctgcattgtccaaccttcctcaggcatcttctgtgcttttgctacaagggcattgatccgtaccttatattcttcgtattccctctgcaagggaaaaaacgcacaattattgcctattaacattattcaattgtaatttgttgagataaacaattccatactacacggtgaattatcgtgttgtgtaaacattgtttcagacctcttgagtttctaaacggacaaatctattgtaaacaaaataacaaaatgccattcacctaaaacatcataacattcttgtttgaaatgtgaattttagaaaatatcaattaggtggaagaacatcaagattgatgccacaacatctaaaaataactcaaaattattgaaaaaaaaaatggcatataagcagtgtgatcaaacttatcatcaacgtaccttcattgctcgacgctctttcacaaaagacggttgtattttgtccttcaagtagtctatcttttgggcaaaataaaactcaggggcccttggttcaatgttatgtttcttgcaaaagggcacccattttctagcaaactcagcagtttcagaaagggattcaaaggtcaacattgccgaaccatcatctgatacataacaagagactttgtcgacaggatagtccacagcaagtatagacaaaacagtgtttgctgtaacaagtgggggctccttgaggggatccacagtactcacaaaaacatcgattggagctaactgtgatggttcaccttcacgatcatacctgaacagtaaaaccatgatcaccaaggtaagataaacacagaacatcatttcacatgctcagactattaaaccacaccactaatacgaagttcaagctacctcaatgcaagcctgtccagataggtctcacggttaactggacaccattttggaaattgatctagaagccacgataatgcaaaccaaatctcacagataactgatatcagccataatgggtacgcatctttcactgggttagttgcacggtattgtaaaaagaaacccagaataataagccgaagtatgatcacaatacgataaggagtcatatgggatgaagaaattggcaccacccgactcaatggttgtcgagcatcatcagtcctgagacagaacataagtaagtctactagatatataatcatacacaaagctaatcatatgcacacaagactaaggatatagatacatttcttcattatacaggatttatacatacaatgagtgatccaatgttacataattggaaattggtagtcagacaaaataagagaaattttgagattttaaaggtgggtgagaaaagagcaaaccaaaattagcaaagataaagctttactaaatgttctcacatttggagttcttctccatttgaaccagtcccttccatgtctcccttcccatctgtatatttgctggtcacctgaatcatatttttatcttgtttaagcttccaaccttcaaccctttctttccagtcaacattccctagcccatacgagttcaggtcttttgatggatccacgatcctcactggaactgtaatggcaattagctcagtcaatggactttcatataagcctaaaaaacaatagtacattcctaaattttactacgaatggtttcaagctcttttagtaccaggaagccgaggatcaacataaggaagatgcttgtccccaggacccaaaggacctgaagttgttctcacagattggttatcaggtgtagcacatggaatctcaccagatacctgcacaaattatgggcacatcattagagagaaaataccaatcttgtaagattacagtattgtttacaatagttaatccaagttacaggacaaagctcattttctttaatcaaaggacaacatctctgagaataccggaacctagttttttatttaatttttacactcctgggtcactgaacctagttatttaccacatcccataacactacacaaattaggcaacctattactttagataattctatgtagaaacaaataagagagatgtgggaaggaaatgttagccaaaaaagaaaaacaaaacctatattgaaaatgtagggtgaaaaaatacagagattatattgatcagcagacattgctttagtttcctaccggctgcccattggtgaggaggcgaatcggctgttgagactcatgtctagaggaagatgagaggtcagcatcttctacttgccaccggcgtcttgcattgctattaccttgaccataattgaactcattctccagatcatcatctccatcctcatcatcatcgccatccacacgaggactccctaaaagatatccatcggacaattcttacaaggtccaaaaatgatgcaatattttacaaacaaaaacatgaaagtaccatcctagctcacctttgagcctttgatacctagtcttgcactttgggcaagattggtctccctcttttctttcatattcataacaaggccgacaaactgggtatgcacactcattgcaagcaacaaatacatcaccatcagctgtcagaccaacagcagccccacagatcttacatatttggccactcaaatccacgggtttgggctgcattattcaaagacagcttccaaattaaaactacagaagatatcaaatattccagatggaactcttttttaaactaaataaggcccgctttaagataattatttagatagggaaaaagataaaagaaacaaagaactagatctttcaaccaatagccttaatataactaaacaagcttcactttgaaataattttacaattgtagaactttaacagtgcacagaacatgcaaaagtcataatagggatcgaaaattcaaattgcccaccagaaagaaaaaaactcaagctatctctcatcaaacattttaatataatgaccctctgaaacaaaatgcaaccagttttagcttcaaattcatgtattgactgcaaatcttgatagggcagtaagaatttaattgcagagctgaattaaagtatttccgttggggagctaacatagtggcgtagtatagggccctatataatttaaagaaatagcttttaggaaatatcgttaaccaataataagccgccacctatagaaggtgttgggcaccattggtgcccaataacaatgctctaattattaatgatatactttaatacacatttttaattataatattgctattattatttttaaaatatttaatttatgaatagtcattaatgttattttactttttgtcttaatttacatcttaaaatgatattgtccattggagtacaataacaatattagcaaatatagcatttgttcatattttggactaaatttagtacaaattatacaacataggagaggtcttagataatatccacccaactaagcaaggcttggtactaaattatggcaattttttttatcgagctaaacccatatgacagtagtaatgagatttagctgagtggagaaagagtcttcagacactaagtctcagaactaatataactaattagtgctaaaagctagcttaccacgtgattaatagctaaatcccacaataccaagatctaatattgtaagtttgtgcgtgttgggcccggcctatatttattcgtgcttttcaaaaaatagatcgtgtcgtgccgtgcgtaaaaaatatcgtgccaatatttttaaagagtaggcccggcacggttcgtaagcccagtattttcgtgccgtgctcgaattcgtatcgtgctctactcgtgtcggtccctatttgttaaataagttagtccattttcatatccgggcttaaacttatactttacttttttatatttttttacaattactaatattttatagcttttagttatatttatataaatttgaacaatattttatagataattatataaaaaaaattattagtattattagaatttaaatattta

SEQ ID NO: 380520 - DNA, 6387 bp, Cannabis indica
ggcggtttgagcagtttaagcggcttgatgaacacccttaatatagaccacccattaataataaggtacatactcaatcattaaaagaatagttaattaatatctaagataagactaagctaatcacactattctccatcaacgattccttctcacccacaagtacaaatctgacttcttggaagaggaaatatagggggtgagcttataaagcccagtaggaaaacaactaatattagaggaccaacagtttaataaaaaaaatccctgcatggttagctcttaaaacaaaacttttcatcatcatcatcatgtataaacaaaacagagagaccacaaataatcacaagagataagctaccggtacatatcacactgtccactagacccctagctctcaataccaatcatagaaaatgacataactggaagtgttgtccaagcagaaagctgtagaggcacaaaaagtgtctgccatgaaggaggctagtcgggccttcctttgttggaggctggctggcctatgctggcaataggaccggccaggggatccggccagaccccttaagttggctagttcattgtcctatgtcccgcttaagtatttggactcatcatcaattgataagttatacatgatgacttggccttcttggtgataggctgtactccacatggcatcaatcttgcctatgtggacatgtcacgccatgtgggtaaaaattgaaataacatttatccccaagtccctatgcgaatgtttgtacgaatagtgactttctagcttcagttttgactattggagtcttaaccaggcaggttttataataactttagttatgaagtattttctcttgtttggctgctcacgttccccaataaagaactgataatattttgcatggttgtttttacaaactgcatggtttttgctgcatgttaaacgagagggggctaccagaaactatatacaaggctacttggtgaaaaacattctcatttcacactttatgttctctctcttcaaaaaggaaacaagagaaagctcttcactttccctttgaggccgacgtacctaggtcccccgaatcttggcattcctgctttgtttcgacaatccaagcttcccaccggctttcttgaaggttttcactaatgggtaagctttcaaatcccattatctacttgttttcttgaatttgccattgttgtgttcaagcttttccatgttttatacattcttgattctcacgttacattgtagtctttttggtatcttaattcgcatgatagctttaggatacataatgtgtaatttcctattgaaaaagattcaattttgacattcactgcgattcttgactctttgagtcacgaaaaacacgttcgagttttaaaaaaataaacactttgatcccaaacataccctggccgatcctagctaggggtcttgtttaagacctggctgattctagggttttatcatgggggctggccagttctagggtttatccaaggaaggtggccagttcatgcatgggtcttctgaccctggccgattcttgcatgggtcatgggaccctgacaggccctattgatgccttgggaccctagctgacctagggctttgatcccaagggggttgccagttttttgtcctcttttgacctcgacaagaatcctatcatggccttgtgaacttatacagcctttgtctcatacgtggttcccttaaacactttgtatgacaatttatggtgagtctattatagtcaaatactcaacttaaaactccacatttttctaagttgttacacttgaaattgtcttcgttgatacatacgataaaattatttggcaagtacccttgggcacagttgaccagagtcttgtctaaaccttgccgctttgtcaggttgctcacctccccttgtcttttgtgtctagatcataccaattggttgttggggacaaccatcatcctctattggacctacacgtagtctatcgaatttcaaaaattataagagagtatcagaccatgaattggacgtacatcagaccttattagacatatacaaaactcatcaaattttaaaacgtattgggtagcatcaaacctatatcagacctatgtcttcaacttctatccttttttctagcgcacatgcatcaaacctacatcgagcctagcctaaaaactaggtttctagtagtagcacagatcgaacctaaatcaaaccctagatcaaaccaaacttacagatcacagataaggcaaatgcttaacaaaattctaccctaaataaataaaaattaaaccttaacaaccaaaaagacaattaattccaaaaagggattcaaaacttaccttagacatttctgatcaaaaataggggaatccgtgggttaggatggtggcatgtgcatggtcgagacaattcaacggttgtctgtgcgtgaccgatcaaaaatggtgcaaatatggtggtctgtgggtggttcgtgcagggctcagtcgtttgagtggtcatctacatttgagagccacgatttgggttgggacagtggtcatggtcgctgatttgtggggatcttttgctacgagcgaagagagcgagagagaatggagggagagagagatagaggtgagttttcaaaatgggagggggtaatttttgtttaaggaaaagttagcttattctaacaattttgatacacttatgtttagtgtattaatttacacttaataaatgcatatagatcaaatttccctttatttattttagtatgatggctaattcgagattgcgctgtcgtttattgttttgctcagttatcataattagatatattgacattttctaagtgattcagtgggggaagacttttgtgatgctgtctctgattacattaagacaagtttcgtgcataagggaataaatgctactaatttagtgctcattcccaagatccaaaacctgaaaataacccatcattttacgcctatttctctatgcaatttcacgtataaggttatttctaaaatcattgccaatagaataaagcctattttacctagactcatatgtcctactcaagttgcctttgtgcccgatcaaagtatccaagacaacaatgtgatcgtccaagaaattatctattctttcaacaaaaataagggaaaagagggtttcttcgctatcaaaattgaccttgtgaaagcttacgacaagctgagttcgaagttcattgatcatgtcctttcttactttggtgctccagataagtttcgtacctaggtttcccagtgtatttcttcaaccaccctgaatgtctgcctgaacggaggccaagaagggaagattattccctcatgtggtttacgccagggtgatcctctttcccctacctattcatttgggctatagaaattttatcaaggtttttagaggaagccttggggaagggtgatattcaaggcattaaactatgttgagagcctgattctctcgcatatcttctttacagatgatttaattcttgttggaagggcttctttggaggaggcaaaaggctattggaaatgcattgagaattttggttcttggtctagttaacaggtcaataaactcaaaatttcaatctcttttagtaagaatacttcccatgggatgaaaagaggaatcatagatgctttagggattggtagcctgaaaggaaatattaaatcttgggtctccctttattcaaatctagggaaaaggatgcagatttcaacttcatcttggatcatctcacctcaaagctccaaggttggaaagataaatcactttcaaaggctgggcggcgctaccctaattaaagctatgggcctttctatgcgcatgtatgtcatgcaaactactaaactgtcaaattgtcttgtggctaagattgatgggatggcccgtgacttttggtgggggtttgaaaaaggaaaccatgagcttcaccttaaggcttggtataagatgtgcctccccaagtcctgtgggggtcttggttttttgaaaactagagagatgaatcaggccttcctagctaagtgtgggtggaacttattgattggaaacgagtcactgtgttgttaaattttgcaagctaaatatctgaaggggacgaattttcttaattgcaagtacaaagacttagattcttggttttgggaaaagcgtagtgaaggcgaatgccatcttatagaaatgagattgcaaaatggtggctgatgggagggttactagtatttggaatgatccctaagggtctcatggtagagatttcttcccgaaacctaatgggtcaccttagtctgggttaagtaaagtggcgggtcttctaactgttagtggtgattaggatgctcgtaggttgaatttcctttttgacaaagaaactattactatcatcttgaaagggggaagaccttctgaccagggtagagataagtggatctggacaaaggaaagcaataagcatttcttatgcaaatcaacttaccttattcaagcattgcaaagagctcctcactatgaggttgctccttccctttagaacaagctttggaataacataattttggagagtcataagatcctttggtggtgcatcctttccaacgccctccctaatcgggtcgtgcttaataagagattcaatcttgatgatgtaggatgccctatttgtggatctgaggaggaatccatggaacacctcttcctctcttgtaatttgtcttttcatttgcggcgctcatccccatggggtttatatcctatctatggcactgacattcacatgtgggactgggtgaaattcctctagagcttaaaatcccaaggtattaatgcacatgaagttttcatttatgcatagattgttgttgacactatctggtgggctcaaattgacaaggtacacaataataaactagataatgtgaaccattgcaatgactatactcattacaattatgcagatactggagcttctcttctccctactcctaccacaatcttgttggaagagtggcatcctcctcccaagattggctgaagcttaattgtgatgttaaagtagggatagaaagcatgtgtattgttgtggtctccagaaaccaccatggtgaggtggcttgggtgcacacggctaatttggagttttttgatgctcattgtggtgaggtggttgcttgttgtttggctttagaagtggcaagagataaaggttgcaaatttattattgtggagagcgattcaagggtagtcaactctcaatggttaggagtcttgttgggtgattgggaactactttttattttgtaaaagaatttttccatattttattagctgtcctttttctagtattagtatatcttgtaattttgtggcctataatgtgactaagtgggtgtttacccactaacagtatagttgcttacttgtatcttctactaatatcttttgtaatgactgtcaggtttaaccttattttttatatgcacgtttttccttaaaataaaaaagacgctttccaagtgaatgtacagtgtgtttagtgtatactacgatttggaaagattcataggttttacatggctgggaattctatcctcaccctgttaatgcttggcctaagagtgtgtaaaaagtagcgaatttactttcagaaaatggagactgagatacgttgaaactccaatgaatttttggactagaaacaaccaattgtattattaaaggaggtagaccctatggccaaggtagtgataagtggaattggaccaaagaatctgacggtcaattctttacaaagtctgcctatttggtgcagtccttgagtcgtgccccttcttgcaatgtcgctcctgctctttggaataaactatggaactctaaaattttggagcgtcacaaagttctgtggtggagtatcctctcctatgccttgccaacctggtccattcttgctagacgaattcaggttgaggatgtttcctatcctatttgtggggagggagaggaaactataaagagcaatttgcggcgaaacccccttatatttaatttttatacacttaaccaccttatctttttattggtggtgaaacccccttatgttttagttttatacactaacccccttatcttttttttttggtggcaaaacgtccttatgttttaatttttatacattaacctctttatcttttatttcggaagcaaaactctcttaaatttacttttctttgtaaatttaaagttgtagttagatattaccgttaaataccaactagattactacaggtgtatcgactttgagattttactgttacatatacacaggtgt

SEQ ID NO: 380521 - DNA, 5046 bp, Cannabis indica
ttagtgcttatatgtatgcattttactaagacaaagactcagcaaaccaccaagtgtgttttgcttttgtaactattacccccacaatgctctccttcccatcatcattcatggccaaaagttaagccagggtagtagaagtagttctggtaatggtggttctgccaaatcccattgatgagttctgatccttccaagctgatgaagctagaacaaactagtccaagcagcagaactctcaaaaacaccaccaccaaatgatctatataataataataataataacaaatatggtaagaattaatactacacaatcttacatctacacaccatcactgtgaaaaaagggggggaaaaaaagacccaagtgaaatgtcaagcttcttctgctatgtatggctgcctgtaggtaaagttaagtagttattaacagttaggattgacgaagttcttcagctcctccattagacaatagaagtgttcattatttggcaagaagtagaacccaattgtggcttgttttaggtaaaggagcttcacatcctgaccggaattctcgagcccttggacataagctaattgccaatcttggacaagatccaaaccagccacaacaacaagacttttaggaaacttaacaccctccaagctttgaccccttgggccaaatatgttacaagctggatggtctctgtcttctccttcaggaagataagctctccaataccaatcgcggtcttgaactgtaacaaagtatttaccatccaatctcttctctgattctgttctactctccccaccaaacatggggtgtagaagaatgtttcccaatacctcaacatcagattcagctgctctcacagcaacatgatgagcaatattaccaccagaactatctccagcaaggtatacatgaaccttagagtctttaccacttttaagccaacttcttgttgtgacccacttgagagcagcccaaccatcatcatatgcacaagggtacctgtgttcgggtgatcgacggtaatttacagagacaacaacagcttggcaattgttaacaagtcgacgacaaaaagtgtcataaatggcactgtttgctgatgaatgagtgaagcttccaccatggaaataaacgatgactggaacaatcttggtggtgcttaggggcttttcaaggtctacaagaccccattgagcttctttttcaggggcacgtttataaactcgattgaggagaccagtggctcgatcgacatggtcaaatgagaaaaccccatcaacaggattagtattggcagcgactttacggtcaagaaactctgccaactcacggttgaaagttccatcagaccgccgaagaagattatatgctagcttgaaattggagatgagtacccatgtattaagcggaaccactctctacaaaagtttaattaaaaaggaaagattagaactttaatcaaatatcaaacaatgcttggagaatcttcaaagccttaatacaaagaaataacaaagggtatggaaaataggcatgggagaaactcaaaaaactcattaggaacaacttttgagactttagaacgtaacgagaatggaaactctgataaagcgggtttagcttcctgaacaagaaatttggatacagccacggcagactagaaagacatgaagaaatagatcataactagccccatgaaaacagaattgtgtcaggagatacttaagaagaagaaggaaaaaaaaacgatggggaaatgaacaagaatggcccctgcaaaatcaagtagaaagaataaaagtttgccgaggtcgtctataatcagaaaaagaagacccagtaagaaaatatccattactttttgaagaccatataaagaaagagaaaaccccatgaacctaatcaccccactttctccaaattgagccaaaaacaagctaataaagcgttagaacaaagagaagaagatggaatgcttgatctagataaggaaagaagaaaaacagaacaaaagtaccttagattcactgaggttgacttcattatcaccagccataagtcaccccctttcttatatctctctctctccacaccgaaagcaccaaaaaaaatgattcaaaatccacaaacacaggcctaaaacccaacactaatccaaagagaaaaaccctgtttatttctcattatagtttttcttccttcttttccccactttttgcttaaagtttggaagaagacgagaaaagattagatggggattagagcaaaaataaataaaatcccgaaatggggttatctatatttctctctcttcccctgtttcctgataaaacttgtacccactttcttgtttcgtgttttggtgttggggtttactgaataagcaacaaggtaaagacacttctttttcttcttcttcttcctttcttctctgtaataagggagcagaatacgctcagaacactcaagagagagaaagtgaggatcaaagctaaaatagaaagaaagagtaatgggttacacgactaaagagaagagagagagagagtcaaaggcaaagcaacgacggaggtgaacggagacgacagagacgacaaagaaggcggccgagttatactgtgtaggtgggtcccattctctcttttttcttttgtttttaataaaaaaaaatgggaattctaataaattggtcttattatatactacgatagtacgactctcttgtgtttctttttttttttttttccttccttcttcttcgtgtgtatgtatgtattgtttttatatatatatatttttagagagagaaagagaaagagagagagtgtgttgtgttttctgacctgtggatgggagaaaaaggtcgagtacttgggtttggttactgacaggccggttatcccttactgccagctaattcctttactaatttttctatttatctcttttttaattccataatttcttacttataaattatttatgctttataatataatattcctaactatacatacaatataatattcgacggtccaacttcaaaacatttgtattttttaaaaaaaaaaaattaagaaatattaatataactaaatatattataaataggcttaaatttggtacgttgtaattaaataacattttttcacattacttttactgggttaagaaatagtcaaactttaactttgtctttttttttttaattattattgttattaatattaatctacgaagatatatttaaaatttaaagtacacatgttagtgtgataagagaaaaaccatcatgaagttacttggaaattaatgggggacaaaaaacaaaagagaataaacaaatatacaaatatgtgttagcagttaaaacagctgtgaaactagtgaaaaaaaatgagatttcaaaagagaaaataaaatgaacatatgtaaatattttaatttacgagtggaacaaacaaaattaaataaataaaaaataatttgtagtttatataattaaatttaattaacaattataaataaatttataatattaagtaaattgtaacgtgataatttttgatagattcatgttatttaaattttaattttttagaaaaatatattttaaatatacagtaaaaaataaataataatttaataattaagtataaattataaaaatataacttatatattattattaaaaattaaatttaaatatttttttaaaattaatagttaaatttaaatattcatactataaattatttataaataaataaatagataacaataaaaggagacaagagtttcctgcgtgcggccgacgccaaggcacgtgacgacaaacggggttccgtctcggctcttttgccaaactctggctccgaatttcccaaaacacccccggacactccactaaacgacgaaattgccattgtgaacgacacgtgttttgtcagctagcgaaaagcgcgtgacggcatgttttttgtcagagcctgggggttgggaatagaaaaattaaaaaaataaaaacaaaaatgaaaagaagcttttcgttacattgaatgaaaataaaatcattaattttttattttattatcacaaataaaaagaaattttaaattccaaatgtgggcattaaatatttgtcgtattatctggagccccgttctatctctcgtcgccgggctaggacacgtgtctaatggatatagatcacgttttccggtgggtccctcccctaagtcttattctttgaacgagttacgagctgatacgatgaaaaactctcttacggtgggcctacttctctaatgatcgtgagcttgacacgcggatagctgtggttcgttggactgatgtgattagatttttgtagtggacatgagatgataaccacttgtggatgcaagccgttgattttgtccactggaaaggtccaattaaccgtggccctccgatcactttacaaaaggatttaggttagtgcaagcgtggtctctatattggataattctaccactttctataatcgtgaccttttcttttcttttttctttttttatttcctttgaaaagaaaaaatctggtcacgatttccttctttaggaaaagaagtttattacaaatcttcttagtaatataaacaacaaatagcaacaattaatttctttcaattaaataacaaaaaatatgacattagtaatatccattacaagttactatttactaccactacgtcctttccacgtgggaaattattgcatttctcatcatttttttttcttttttcaaatattcttctttattgaacacgagacaagtttattaacttaatctatgtattaagtaaaaacaatataaaacttcacacataacagactggtatttttagtacatgcatttgttaatgtgtttttaaaagctataaattgatcgattaaatattaatttagatttatattaaggtttaattagatgaaatggatagtactattacataaatatggtttaattagttttttaattaattttttgtttttaaaagt

SEQ ID NO: 380522 - DNA, 3342 bp, Cannabis indica
aaaataacgccatcaacatttacattaatcttgtttaaatcagatttagaccactgctccaaccccaaatccactcccgacgaaagaaataggggaccattcttctttaattgagcaatcttccattgattaagagttacttgagccgacatcactatttcagaagcagaggagctctttcctctccaaattacagcatgcgcgcattccaaatagcccaacaaaccatgacttcctcctctcgaattgcaacaaaagcaaattgcaatagataactagactagcttcaaaaaatcccatactaaaaaactttatgagctaattgtagatcaaatccaacaagctttagcaaagtagaaagaaactaataaatgaaaaatagttttctcctcttagttacacattggacacaccaaatcaactagtacatatttagaagccaggtcagattttgaagctaaagtacctaaaagtgcacgtcaaatgaactgtaaaactttaagagaaacagaaagtttctaaactatcttccacacagctagctcagcaatattcatttgtaaagactcatcactgttcagaagtttataagcatctttcaccaagtaaatagtagatacattgaaagacaaataccaaaaatcagtattagcagagctaatttggacgttaagaattagctcacgatccttgggattaaaaatgtcatttatgagttccaaatcccagcttctattgcccacagccatcaaactataactttgcaatcatttaaaccaattaaaggagatatcaagccaaaggtcccttagaacactaactgaagaaccagatacaaagttacatctcactcatgtcttaattaaattttgagtttcaaaaatactttttttaaatgaagcttggattattaccaagttcagcagtgagaaaagaatctcgaggatagtaccgagccttgaacacctgatcacaagagaagaatcatttaccaccagatgccaagcttgcttccccaacattgagagattgaagtccctcaaattacgaaaactaagaccaccatggtgtttatgctgacataactgctgccaattcatccaactcaccccccgcgtcttagatgaatctgacctccaccagaaattactcatgatacccttaagctttttacagatatcaactagaagaagaaaaacacatagccaaagtagagggagcttgtgctactatttttaataagatttcctttccaactttagataagtgacgcttttcccaactttgaatccgcttcaacatcttatccttaagaaaatccaatatgacattcttattttgcctcatagtataagagagacctaaatataagctgtttaccggagcttcattcatacccagtaggctacacattctgtctttaacagcctgagtagtattcgtgctgaagaaaatggttgacttaaaaaaattaacatgttgcccagaagcttgttcaaacaaatgtagcaattgaataacattaagcttccctctaattagctttacaataaagatagctatcatccacgaataacatatgagaaataactggggtcccattgcaaacacgacaaccatgcgaatttccacgagcttcaaaatgcttaacgagagaagaaaaaccttcagtacaaactaaaaataaataagggaaaagtagatcaccttgaggaatacctcgactaagagtaatagggcccaactcacgacccccgtgaatcacagtataactaactgtggaaatacactaaaaaataagatccaccacacagctgttaaatcccatcttaagcatcatatgacataagaaagaccactcgacacgattataggccttactcatatcaagttttagagccatatgcccatctttcccaacttgctttcttttcaaataatgtataacttcaaaagaaattatgatattgtctgaaattaatctcctgagaataaacacactctaattttctgagttaacaaaaggaagatcaaatttcaagcgattggctaaatccttagaacaaatcttatacagaatattgcacaaagcaaaagtacttaaatctatcatattgagtgagtttttctttttaggaattaggacaatgttcgtgtgtaacaatctagtcggaagagtatcgaacatgaaaaaagagagaaagtgcttgataacatcattggtaaagcagataccagcattgtcaacgacggtactctatttgtctctatataaataaattggatatcaactaaaatactacaaatcatggaaatatcataaacaaaaatgctagcagaagaaacattagaagaactatctgtgataaaagaaatagcagaactgcaattaacttctacatttagttactggaaacccaatcaacatattattagaaaattattcttaagaataagtagttacattttttattttattttttacatttctttcacatcactttcttgttttttattattttcacacattattctcttttatattttctctcatatcacatcctctcttttcctactgcatgcatctcaagcatgaacttcctttcatgtgagcatggtactcgaacactacaacaataataggcagtagcaacaaagacctccctctgttaataagagggtaattagcggtggagaatgggattcgccgctaataatgtacaaaatttaaaaatatttttttaattattagcaagaaaattagcgcccattttgatgtaagtcttattagcggcagatcattagcggcagacttcaccgctaataatagtattttactattaaaattataaatgattattaatactattagcataggaacatcaacggcggggccctaacacattttctgaactctcttctctctcactttctcatggcagccccttcctatcttctctgctgccctcatcgcttccaagtccgtcccgacaccaccccatgcgttctctatcccacatcgtctttgccccaaaacagttgtcacctcggtctattcctgttcggtccttctccgttccaaaattgttatcatcaatgtcaatatctactttcttcacacatagccgactccctcccagtatggtgtacatttacatttatatatgaatgcaaattgatatatataatctttcattagtatatatttttaatttttgtaaacttttagattttatttagggtatctaatttttaagcacaaataagtagtttatgttttgaaattccgtattttaatatttttagttttattatttaattaaatgcttaattatatgaaaa

SEQ ID NO: 380523 - DNA, 2296 bp, Cannabis indica
tttgtcttatacataaactaagttaaggaacagcgagtgacatttcaacaaatataaaaagaacagaaattaatatatatatatatatatatatataaaaacagcttaatctataaaaacagcttaatccatgaaaaccaattgtttaatttagtcaaacaagttactttattatttaaataaaataagtaatataataatgttcatataccaattatggaattgtgttcagaaataagaaacatctgcaatagaataaatcaaactagacttacttcttaatgctttcctccaaagaagaaaatataaaaaagttacaaattgacaaattttaagaatcccagatgagaggaaaaaaaaacccaaaaaaatacacaaaaactatgaaaaaggtatgaactttcaactgaagttaaacccaactgagtatatataataaaagcaaaacaaaaaacctcttgggaaatccttgtatatccaaaagggtatagagtatagagtttagaaagaagcaaaaatttgggtctttctctttatatggtatttgatatcttgagagttttgtctttgtggtttgtatgagtagaaaaagagagagagagcgaatgaggaaccaagattggaccagaacacagagactaaattaaattacaacgatagagacgtcacagaaaggagatcaatgagtaaatgattcgctactaacactgtactatgcttcctgtggggagatccacgtggcagaataagattggattgggtttgggtgaggtgagtggcttagttaaaaggtatggaaatctatggaggttgaaaatccgagagtggatgtgatccgtaaatgtgtgaatgtggtgccacgtgtgtaaggaagctagctactattcattgagctaatgatgagggacaagattgtcagacacaaaaataatcattttaaaatgtaaatatacttcttacttataaaataatggaaaaatctatgcacatttatggaatcaaagtttttttttgggtaataattgtaattatttagaagtatctatatacaatttaaaaattgtgttaatcatgtaagaaaaaataagaaaaagagataaaagtttgaacgattactgcgtatataaaaaaaataattaaaaatatttaatttttatttttgtattataaaatattttaaatttattttaaatatataattataaaaataatataccaaaaataattttaaatgcaaaaataaataaggagtgtactgaaatactctttgggatgtacttttttttagacttactctatttcaaattgtagtatatttgattttaaaaaattctaaagtgcaccctagaaaataggtgtaccccacaaataattttaattttaattttttttatgtgatagtatatattatagttatgggaaatattataaggcatctcttaaaaatgcatcaatgcacttctaattatttagtatttgaaatattttttagttaaattttttctcatgattatatacattatagttatttaagatatctggtaaaactttaagaaattacgaaaaaaaaaattaacacgtggaaaacaaggttcaaacagtatgttacatacgtgattatttttttttatacgcgtgtaaaatagactgtttgaataatgctttctacattataaattatttcaaattttttaaaattttataaaatatcttaaataactataacgtacacaaatataaaaaaataaactaacaaattattttaaatatccaaacaagtagaaactacatgcatgtaaaagcacccgttaattatttataaaaaaagtctaccaatacatctacttttggaatgtgcatagtagaagcgcttttcaattttagtcgtcaagtgaataacatattatttataatatatggtgtatatgtatctctataaaatatgttatccaagatagaattatttaatgaataaaatattattttatcactttatgtttttcacacctagctacttcatttatgtgtgttcaatatttgtttaatttttttttaaatatatatcatctaaatatagatgagctatacaaatagagcattgacaaaaatatatataataagagtagtgtagtttacatctctactacgtatgtcctttgaatttgatatacgacgagttcaatcgttaactttctgttacaatctcttagttaatttctacgttcgaaaatatatgtcggaatatttttttttcacagagtgttcgttatgcttaatatcatctctgtaaattttt

SEQ ID NO: 380524 - DNA, 2033 bp, Cannabis indica
atttatgttaattctttcaaaaaattatgtaaatttgggttttcattaaatgaattttgagtcattcactttgacaagtaatcataaagttttattttaaaattatttaggaacatataaatattaatcaactagacttcacaactatgtcatttaacggatatgaaagtcaaatatgatgatataaggctaaaaattacgtaagttttgttatgttcaaactataaaaacaaatattgtttgggtttcagaaaaaaaagcaaatattgtttttttaagtagttgttctgattatttagactctaataagtaattaaagtcttattgcttattggttgggcgttaaccttgattactagtaattaaagtcatagacgtgccttttctagtttagttgaaataatgcctccttcaaatgtttttatacaatgatcaatatgtaacctgtcattaatgattgaatttttattagaggcagtacttgttttttacataaatgatttaactaaaggcatagataagtcaattttcaaaaagataaataaataaataaaaaagcataaatatctaaattaacctccataacactggatagtaaaaaagcaagctttgtgaaccccttcattccctgtgtctttagtatcagttttattatattgtgatttattgagtgcttactaattcaagcagatactcacatattttatatttcgattgtttatagtttcctcaaatatactcgccctatttctatgttctccgaattccttacaacaacattctatacgaatatttttcttgggcttttctcctattataatttatatatcatcattttctatagctgtgtaaaataattatttatgtatgttttgttagtgttcttttagatctaaattccttgaagctaaaatgttgtgttgctaacgagtacggaagaatttcaacacaatttttgtatttgctaaccgaccaagataaagtcgtgttatgttctatctaattattctatattttggaaaattttcttctttttttttttctttctcaaagttgcatatatgtaagataatattctcctattactaagatatttgtttgcaaagagttgacttaagagggaaaaacttaattataatactagacataaaccaaatacaagtaaaactctattacttaatacatatacataattaatattttatatatatggctatgtatacatgtaaactaatccaacaccacgaacacgaagcttgatgtgcacattataaataattaagaccgcatttggaggaaagtcagcatacttagaaaactaattaagtttttaattttaaacaaatatttacttgccactttaggataggcacacgaaaaatgaatcatactatagtcatataaagtaatcatgtgacattttataccatatttttctattactgattagagttttatgtattttttttaacaaattatttgcaacttgtttttaaggattgttaaatttctttgcttgcatcacaaaagtttgaccttttttgggagacatgcacataattcgcgcaacaatcgtgttcacaagaatatacagaaagattcaaagtagttccccactcagaaagtatctgattaatttattattatttccagctatatgtaggttcacaataatagagttttattccaaggtactgttgtataataatagaggtagaagctggttatgttgatatttggaagatatgtattactaaaaccaagatgagatcatgtgctttggaattttgctataagatctctatcgtgataagtaataattgcatcttaattagtttgacaagagaatctattttaataatatattagggttattagtattgtatctgataattactatttaaattagtccaacttaaaattcccacaaatatatatatatatatggaggaggttctaatggttacatttttattgtaaccacatggttacattttttttttagccattggatcactattaaatggttgtga

SEQ ID NO: 380525 - DNA, 2858 bp, Cannabis indica
ttttttttgttttttttggtttttttttttttttttttacattaatatctcatctattgtaatacatagcttacttgttagtttttagttatattattgtaataataaatatatagttattacacatatataatagtaggtatatataccaaaagcattagttaaagaaataaaattgaatttgattatatggtggatttcttttttttttttttcttttttctttttgtgtatatatgaaattatatatttataaagctcttatattatttaatttattaattagtttcaatccatgttgcatttactttttcaacaaattattcagtttcacataaatgacatatataacacttttaaaattatttctcttcaacaattgatatagggctttcttataataataaaaatatttatgtgtaattaataatgagaattaattaagaaaagttaattaatatgagtaccaaaaataaaagaaagaaagagaaagagagtaccgacaccaattcctttatattaattgtaaaatacttcatcactgcatatataataattgttattactgtttcttttattaataaccaaattattgcacaatgtgtgaatattaattaattactgcatttattttcgaattttcagctggcagatgaattctttcccatatattaattttgaaaaaataataattaagaaaaattaaaaaaaaaatggcgtctgtatatatatgagatcaattaattaataattaattaagaaactatatatactagttctgttgttatgcaaataataatgcatgtgcgatgaccctatataatatatcaataattggccgtaaaattttaatttttatatactcaattttattattatttttttttttgaccaagttccagttaaatatctccactaattactaattaaaaattactgtacacactcatgtatataagtgaaagtaaaaacttggatactaatatagttataatcctatccaattagtatttaataataatattatcagtcaccttaaattaataaaaatatatatatatatatacaaaaattttgccaaaaaaaataaataataaaattttgccgcaaataactctctatatataaataaatatatatatatatatatattgtatgtgtctcaaaattattcgacttttatcaaggtataatggtttatatatataataataaatatagaggcatataaaaattgggtcagaaatagtaagatgtatgtttgttgggtttgacatgtttgtataaatatatatatgaaagtttaaaataataaagtatgtgttttgaaagcaaaaaagtcaaagatatatatatatatatatatgtttgtgaaaattgaaataataatatgtaagcatgaaaagattaaagaaagccatgtgagtgtgcatcgtttgagaggtttcatttcgtagcgtatactccatgcatgcaaacaatctaaacctctctttctctttccctcatatatataaatataattatatatatatatatatattcctatattcttgccctaaaaaaagtactccctttgacaattgccaaattaattttttaattaactaaatgattttgttcatatatatctatagtatggttagggccggttctaaaatttagtagagcataagtaaaaaaattatttttgaattcttatttagaaaaaaaatatgatattttttaaaattaataaaaaaatatgtgtaattttaaaaggaaaaagtatttttggggccttgggataggtgggctctaagcatgggcctagcctgcctatgcacaggcactacaattttttttacttttagtcacaacaaaacttgtgattaaaagtgaaaaatttgtgactgattataaattattattcttacgttgtgactaaaaagtccgtgactaaaagtattagtcacaaaaattacaatttgttgtgactaaaattaaattagtgacaatttgtgtctaaaaaatatgtttagtcacaagtaatttttttgttgtgattaaaagtcacattaaactacaatatttttttgttgtgattaaaaagttgtcactaaaagtgacattttttttgtagtgagctccaacctgagtatggtgtatcaactctaggtgtttcatcttcaatttataaaataataattattaaaacaataaattaccattcttataatatcttttgaatagagttcattagtcggtaagcttgcaaaactatcgagcaataatttttacaaatttaccgactaaatataaccttacataactcgacgagaagttgttttaatcagaattaaaataataaaataaaaatagctagtacaacaactactctcaaattttgtcaaaggtttacaaaaataataatgataaaattgaccttattaattaattgcctcgatggctcaaaataacaactttagatgcaccgaccatcttacctaccatgtaatattcagtacttcttgcactaatatataattaatatatataaatatttatcatcatttcaattaaatataaaattatttaaacttgttatgaatattaggtccgagtataatgaatatagaattattacgaacttactacttgctgagctaatatatatatatatatatatatatatataatactatagtacattcattcatgtctcaacaaataaataaatgtagtttctttcttttaattaattgcaacaaatccaacctaaaagtctttgtggcctatccatctcatatggctatactatatacacttatatatatactagatagaagttacgtggcatgccacgtaaatattagttt

SEQ ID NO: 380526 - DNA, 2154 bp, Cannabis indica
aaagggacatataatatggactttcaaataattaatatattgcaatgtcaccttttcaatttttttttatacatgaatataataatagaaaaattacaaataaagtgatctgattcctataaagattaatgatcgatatatcaataatgccaatatatattatcactttttgcgtgaaatttatatttaacgtgtatctaaattaatgatgtatcaattatatatattatccgtactacaaattaaaaaagaatgaaaactttttagtcactataaattttttttttattgactagatatgatttttaatcacaacaaaaaattatattgtgattaaaatatagtatttaaatacaagttgtcactaatttaattttagttataatattgtgactaaaaacacatttagtcacaacaaattgtgattattgtgactaataatatttttatggtcacgaactttttaattacaacgtaggaataataatttataattaatcacaatttttttactttagtcacaaattttattgtgactaaagttaaattttgtatagtattggtcaatatatttaataatcaaataaaattttatttatttatatatctagtaataataaatttgttttactttaattgtctcttgtataaatataaaaacatgaaccagttgggtcggcttagaatttttaattatttagtttcgaaccctttatattcacaattttgtttgtagtcatcataacttattagctagctacagatataattgatctttctctttcctagttccaatcgaaataacatagaaaataaatcaaaatttcctcaatatatataattacaaaaatgtataaatttgattttagaaaatatattaacaataattgtatttaaagactattcttcttaattatgacaggtaattattctttgttgtaagatttattgacaaagatttaagattgttactaatattattaatggtaatttttttgagtaatatttagttaacttggtttactccgacagctaaagacaaatcttggcatctaaattacgtatatacaattacacaacatatacacatataccatagtgtatatcgcaactgttttataatttaattaatttattattttttaatatgaaatttgttttgagctgtaatttatatgagataatcacatatttgtgtatattagctaggttattattaatttatttatatatatattggtatagctagggtttccatatgtatatatattatgtatagttgaaattaatatatgtatgtagagaatatgggttggaataataatgataataatgggtcatcatcttcatcagatgggaaagaacgtcttcgttggacacaagatctccatgatcgctttgttaacgcagtcactaagcttggcggtcctgacagttagtatatatatatatatattatatatgatatatatgtgtatttatatgtgtcttataatatatatgtatgtatgactatttcatgcatataatacaggggcaacaccgaagggtatattgaaggctatgggggtttctgggttgaccatttaccatgttaaaagtcacttacaggttctctctctttttctataatatatatactgtatatttatatatgtgtatgtatatgtttgtactagttaggaattaatcaactcatatatatattaccgtgtgtcgttttgtgtataaaattattccattcaccaaaatttctatgcgtacatatgtatatatgtatgtataatatgtgtatatataacagtatattactacagttgatacacacatatatattatgatcaatttactttattcttgatctagaaatcaatataattaaaataattttttccttttgttaaaataaaaaaagcttttgcaattacgtacgtacgtacggaaaatatacaaagagggttttttttttttttttacttatttatatggagtatagtagattatattaggtggtaatttgttttggtaaatataagcattactatttgtacataccatactaatataatatttaattaattatttatcgtagcatttcttctagaaacaattataccttcaatttccaacttatatacgtatatatatatatat

SEQ ID NO: 380527 - DNA, 2424 bp, Cannabis indica
ttttttttttttttcatttaattgcttattgaatgatatattgatatggcatttatagtcccctggcaactaatgtctaggtacacgtggatgagaaaactaaattatttagtgtgtttgactgtaaaaaaattaaatttaagggttttttttttgaagaattaaatttaaggttaaacgctagaatataaagtaaaaaaattaagtttaaagttaaacgcgagaatagtactagagtttagccacaatttactttaattaattagaatgttaatatatattgggattcctaaacccttttctcgtgttaactctactcagtaaatctttatcattaagaattaataactgagaaaatcttaaggatcattcatgatgtcaactgaaactgttttcttgttacaaaaggaaaaaaactaaaactaaattcaaaggaaagtaaaatagaaaagaataaaaaaaaaaaatcataaactccatagttacgtgcaaaagaagtttatatcaataaactccatataaatgatttatttctcatccgttaattaaatatttacccttgtgtaaggtatttagtgttaaagctgatgaacaaactaaaaagattagtgttgagtaaagagaattagaaaaatctttcttctaaactagctcactatatgctgcttcacgcatagttaattcattagcgaccttatcaaccgatcgaaatatttaagaaaattagtcagggaaaattgggactcctaagttcgtaatccttttcccctgttgctctacttgttaaattgtcatcattaagaaataataactaagaaaatcctaaagatcattgatatcaactgaaactattttcttgttcaaaaagaaaaataaaactattgtctacaagtatgttcaaaacaatgaaaatataacaaagtctagtaatggtaatattagtaaagcagtaagtaatcgtgtaaatgaacaaaaaaaaggaaaattactactttactatagctatctttagagtttaggctaactaactatatttctaatcatcctgatgatccagctgatacgacgtcgtatatatcattcattagtttttagcttccaaaatcagcttagtacccatttgaaaaacaagaaaagcttcaaccgtagcatacttgatcacttcatcggaatgaaatctcggccgattgttataattgtacggccgacaccaccattggattttggcaggcttcaccagattcatctcttctccgagcaccaccttcgccaacctcgctatcccaaatcgattcaaattcttcctcacctgttggacctgggcctgggattgggcttgggcttgggcccacaaatctcttaggtccacaatcttgggcatttcccagccgtaatcctccgcaaaccgctccaccaaattctctaatccaactccgaccaccgtcacgcgatgatcgaggagaaattccttcagcgctttacagttaaagctatcgtagccactaccacctcttctatctaatttcacaacaaggcattggtcttcaatgcaaatctgtaataaatcgtactcccgatctttgtgctctgataattacataaatatataattaattatttcatcaattaaagactgttggttcttgaaatttaatatgaaaaactttctttcttgtacctcttttatagtggttcatggtgccactgtcggcgtaattgtaactgcgatcggcacagagagcgacgatgataggacgttgtttacggatcttcttttgcatgtccataacccattttctggcgtagtcttcggtgtcgacccagagggtgtgaacggcgaatgatcggcggcggtcgtcaccattttcggcattgttattgttattattagcagtagtgatgtcaacgacgaagttgaacatgtcgtttgggaaagtacgtctgatgcttacttccatggcttctttctctctgtgtttcgatattggtttgtgaagaaatgggaatgttttatgtggcgagttcttgtattaagcgagaaactggatatgagtacttgtttctcaagaaaaaagagattaatagaataatttgtaagaatttataatggcgatattatgaagaatagtagattaactactgtaatagtcccctttatatttatattaatcattttaaaatgcaatattaccatcgtttccttacaaaactaaatatcttgttaattattattattgtacaatattgttaattagcgttaaagcctactaatcaatatcactatgttagactttttattttagcttaaagtctctccctaaccatacaaatacattttgtctcataccttttgataatcagataaataaactgcttctcatttagagatctagggagaaagacttagttgatagtattgcacta

SEQ ID NO: 380528 - DNA, 3438 bp, Cannabis indica
aaaaaaacaggataacgtattcaaaatgccatttaccagattgaatacatctgtttaccctaaaataaccaaactagtcataacaaccacaaccaacaataataaaaaattacttataaaacaattacagttaaaagataaattggctgctgtaacttaccacaaggcctgtaatggggccacatagccaaataaatgaagaaaaagcgtgcccaatcccaagtgtctgaaatgataaatttgagcgccgttaacagaaaaaaggatacaatgtgattagtatcccaattaatacaagaattcatagtagagaacaatatgtaagactgcattttcatactagttatatgattcgtatccattatcaccgcctaaatattagaatttaatctagatacataattcaatcttttgagctaaagtccactattttaactagattatgttaatgcttatgataaaaaaaacgttgcagatgtatacagataaaggggtcggtgcaagcaagcaagcaatttaaatgttatgatcgattcagttaggatcgatgaattatttcatagtataagataagaaaaacctgtatatagggagtcaaaagtgaaagctgtaacgcccaaccaaattggacaccagcggctacagtacaagtaagaaccagagtggccagactgcaattcttattagatctgggaggattcgacggagagaggtcatcagaggtcccattaggaaccctaggagaagacgtagaagaagaaggaatcgaagaattgaggccgatttggtgatgatggggttcatcaagtcccaccatttccatttctgcctccttcaggttcctgtacggaacccgaatcgtcactgagtccgtcttcgctgacattttatcgatgactcagtcgaatactcaaatttaatcgcttgttcatccagattaatgctaaagatctggtttttctgagccaatatccaatttcagggattaacttttcagaaaagaaagaatgaatgtttttgggctggtcaaatttgcgcgggtggtgaagagtcaagtccgatctcattacgggcagacttttgctacactgcactgcactaccatgaaagctcctacgtcagcggatatgggccattagctcaaagtattggaccgaaataaattatctgggctcataaagcccataacgtgtaatgttacatcaccgaaagtatctttgacctagatcttcaatcgtgaccgtctattttgtcttggttaaaagaaacgaaaccgtggatcggaggaaaagtaaaagtcaatctaaacatgcctttgtgattaagccaactgtgcaagccgacacagaccatttgaaattagatttattacctcacgtacctttatatttgtatcttaatatcaaaaacactgttgcccatttaatcaacggtgctgttcttttttattcttttctttttcctattaacttttcacacttaaaatgtatttagaactaactctatctcaagaaaaaaaagcttgcaagttggccgcagatgaattggatactaaaatttgggaggacccttagatcgctcacaagaaagacttttgccctcgttctaatggttctgccactagtagagtgaacaaagttgccgagcttctgttagatttgaaaaggagcatttcgtctggctagggcaatgatagatagatttagactttgaaaaataatggtcagttctcgagcaaatcggcctacctcacccaaggtttagatagggcacctccttgtgaggttgctccttcgctatggaaaaagttgtggaattgtaatatttcagaaaggctgaagactctgtggtggtgtatcctgtctaaggcaatcccagttcgatctgagatctgtagaaggtttcctattgaggatgttaattgccccttttgtgggacagagaatgaatctattgaacatctatttctttcctataatgtggctttttacttgtggcggtcctcttattggggtatttaccctatttgtggtactggcattcggatatgggactagatcaaattcattttggaaccttaaaaataagggcataaatgctaatgaggttttcctttatgcttcgttagttgtggacacaatctggcggatccgaaacgataaggtacacaataatggtctagttgatgtaattaagtgtattgacaatattcgttcttcttttgcagtttaccatgattcttcgttcccttgcgtacctccgcgtttgacggatgtctggcgccctcccccttaggattggttaaagctaaattatgatgttaaagtggggttggacaacatatgtgttgcggttgttgcaagggatcatcttggtagggtgatctaggtccatacttctagattggattttgctaatgcgttatgtggagaagcggtggcttgctgcattgctttggatattgcaaagaatcgaggttttaagtttattattgtagagagtgattcgaaggtagttatcaatgctctcaatagggcggaatctcagtggaagattgagaacaatgtctcatgttgtattagatcctctccttattttgttagttgtactttctctaatattagtaggaactgtaattttgtcaaccataatgtggctaagtgggtgtttacccactagaggttcagttgtattccgattccctctatccatgaacacctttttttgtaacgactgggagatctaactacttttatttctaatatatgtacgcttttctttaaaaaaaaaaaattcacagttatttttctttgtttctctttacttttacttcatctcttttccactattctctaactataaaaataatttttcatcacactcttgatcatttcagcttaaaagaaaagatatgcttctttttttttttttattgttttcataattaaagaaactattaggtttctcaaacgatctccaatgattcactagaggtgtttatggaatactcaatcaaatcccaatttgcataatccaattcaactcacagagtgcaaatatcctcacttatgtagattggattggattgaaaaatctaaaaagcgcacttgtacaaattaaatgttaattcacatgtaaaaataacaaatttatatttaatccacacatatttatataaatttttaaaaaattattatacaattaatatttttatataaaaatataaaattaaaaaaaaaaattaaaaaaaaaaaaatacaaaaatatattttatttacataaatatttatgtcatgtaaaacaaacttttataatttatatactctatttatatttttaaaaataaattaaatagccaaaatactttttggtcacacccttttatttgctttcctatacttcttcatttttatttttattttttatttttagtttttt

SEQ ID NO: 380529 - DNA, 6589 bp, Cannabis indica
taccttattttatgattttgttggagttgtacctttaagtaccaactcaaaaatacacaatgatatattattaggctacatattaaataactattatttatcttattttttttttaattaaaaatatacaaatttgaatagaaaaacaaaatcaatttttctttaatagataaacaaaagttttcttagataacaaggtaaacgtttttttttttaatttgatacatgatttaataatatattgtcacatttttctaagttagtatttaacgagcttagtggataattaaatgtacgattgcaataaaattgtaggataaaatatttttgctactatattcttattaaggttatatgtgtaacaattacaaatgttaagaagatttcaatgtaaatatatttaataaagtatttttaaaatatttatcagctagatttctcatcctcgctcggctttcgagtctcataaaaaatattattaatcaatttgaaagtggaaaagtgttaagtaagattagtgcccaataataatttataatttatgattgattctaaaattgaaccaaagaatacatcctaattttcattataattagttgagtaatttgcggtgaaaatacttatgttttgttcgcagttgcagataaatacctaagtaaaaattttgacggtaaaaataccttatgttaaggttttggaaattccgtaaatacctggctgttaagcgcaaggtaattgtccatgtgtgatcatctcattggtccaaattattaactttttatttttcatttaaaaagtctaaaatttcatttaaaaactaataaaataaaaaaatatttagaaattcatattttaactaattaaaattaaaaattattaattaaatccttaaattataattaacccctgattaaatatgttaacaatgtgttaacataaacgtacaatcaataaaattccacaaaaataggagtataaacaatgaacaatgacatagaacaaacccatcaaaaaatatatgaataacatagatcaaaaatcagattcatcttcaaactctaacaatcacatacataattaatactttatttgcagtttcctataaatctcaaaaaaataatatattttccttgcattttcttatagttcaaacagagccacaaaaattcccagaaatctcaaaaaatagttttttccttcttctttttcctgcattttcccaatagccaaacatatttataagatgaaaatgaggagagattactactggcagtgaaaaataaggaaaatataagttatgcaaatctcagctcaatctcaatgagccagagtaattccatttatagatggtgatgaatacaatagagccgttaggcaaccgggacagctggcagtgaaccaaatacaagaaaataagaaaggaatcaaatcctaacaataattctaatcattacagaataattaatcagggaccacaaaatattctgtagtacaggaataacagaattgggaatatcctttgacacctcatcaatccttgataatgagaaacatgtgctgaaattcttatttctcaacagcccctctcaaactgagaggtgatcttttcactccaagtttgctaatgagaaattagaatctggaatgagtgagtcctttagtaagacaatctgccagctgatcatgtgattgtatatacctcacttcaagttgaagtactttatcccttacatagtgaacatcaatctctatgtgtttggcgcgagcgtggaacacgagattagacgctagtgcactagcactaaggttgtcgcaccatgtaacagtgggcatgatcagagggaagtttaattcattcagcaaagactctatccaagaaatttctgctgcaacatgagctaaggcgcgatattcggactcggtactcgatcttgacaccactggttgtttctttgaagaccaagagacaagagtttctcccaaataaacgcaataccctgccatagatcgtctatcatgaagacatgtcgcccaatcagcgtctgcaaaacctgtgatgctgagtttgttgctactgctgatgtgaagacccaaatcaggtgtccctttgagatatcgaaggactcttttggcttcactccagtgaactgaagtgggagcttgtaaaaattgactcaatttatttacggcatatgctatatcaggtctggtgtggcagaggtattggagtgctcctataatgctgcggtaagctgtaggattgtgcataggtactccttcgtttacagacattggtttctcagctgtgatgggtgttggacatggtttagcattttccatgtcagccttctttagtaagtcttcaatgtatctactttgagttaagtagagaccagtatcatcacggtacacttttattccaagaaagaagtgaagtgcctagatcttttaaggagaatttcttattcaggttttgaatgaagctttcgactctcttgggattgtttcctgtaacaatgatatcatcgacatatataagaataagaataatgtcagtggatgtttttaagtaaaacaatgaggtgtcggcctttgaatgtttgaaattccatctcaggagtgtatctttcaatttatcgaaccatgccctaggggcttgcttcaacctgtacaaggatttgtttaatttgcatacaaagttctcttttcctttttcttcataacctaatggttgagtcatgtaaacatcttcttctaacactcgattgagaaaagcattatttatgtctagctgctttatgatccaatttcttgaggcagctatggtgagaataattctcactgttgatggcttgattactggactgaaggtctcaccaaagtccaagtctggcctttgatggaaacccttggcgacaagtcgagctttgagtttttgaagggaaccatcagcattcaatttaattttgtgtacccatttatttccaaccaaattgtagctgctggatggtggaacaagtatccaagtattgtttcttttgagagcataatattcatcatccattgctcttttccaaccagggtgtgtcatagtttcttgcagagtttttggtaatgtgtgtggctcggtttgactgatgaaagtatggggtttgaatacgccggctttggctctagtaatcataggatgagtgggctgcaaggtggttgtttgctgtggctgtagtggttcaggttcattattctcacgacattcatagtcagcatttgtggttggttcattaggagcaaaaaccagtgggaaaatagcagtagatgctggtggagtgtgtgagttatttccccctgctgaaactgagacactaccaagagtaaaaggagaaattggtgatacctgagaagaaggtgagtcgggcaaggcatcagatgctccaaggggagtttcaggagaagaacctacaatgggagacaagggtggagtaggaagagatgatcaagttgagctgtgaataacaacgggtgcaggtgattggtaattgttgagaaagctatgttggaaaggaaaatcgagttcattaaagaccacattgcgagagatatacactcggccagttggacttaggcatttatatcccttgtaagactcactaaaaccaagattgacacacttaatcgagtggaattgaaacttgtgagtttgatatggcctaagacacggaaaacacgctgctccaaaggtttttaagaaactgtaatcaggtttggttgagtgtatcatttgaaacggtgatttgttactcaaaactggtgttggtaatcggtttattaaataaacagcagtgatgaaagcatcacaccagtatttgagaggcatgtgggcttgtgcaagtagagtgagtcccatttcgacaatatgtcgatgtttacgttcagctctaccattttgagctgaagtatggggacaaggatggtgaaattcaatcccattggctgtgacaaggtcagtaaaagctctaaactctcctccctagtccgtcctaagacatttaatttttctttcgaattgagtctcagccatggctttgtattgaatgaaagcatcaagtgcatcatttttgaactttagaggataaagccatgtgaatctgctgaaatcatcaacaaaatgaatgtagtatctatagtttgtgtttgatgcaattggggctggtccccataaatccgtatggaccaagtctaatatattttaagcacgattttgagagtttttgaaaagaagagcatgagattttccatattggcaagcatcacaaaacgattacatttcattttgagaaacttttacattagttgactcaagcacatgacttaaaactttagatgaggggtggcctaatctcctatgccacacatctattttggaatttaaagacttttcagcacttggctgagttacattgacactagaagctgctactaaaccagaaaaggaagtgtgtttcagtttggataagtgacttggaggagtggtttttgatgatggagaagaaatctggtacaatccttccttaagagccccttggagcagtgccttccctgtggccttgtccttaatcaaacaacaatcagcataaaactcaataagcaaatcattatcagcagcaagtttagagatgcttatgagatttttggctatttttggtacatgtaatatctcctttaaacaaagaaatctaccacagtttgttttcaaataacctgaagcaatgtgagagattgagagttcattaccattgccaacagtgactgtctccttaccaccatattcctgcttttgagtcatgacagatgcatcagcagtgatatggttgcttgctccactatcagcaaaccaaagatcactgtccaccacttcaggtccagctatgaaggcattcgggtttcctttgaactgttgctgctagtttccaccaccagaatctcctcccatgtaattttcatcatacttgttgtagcaaacagcagcggagtgcccatatttgccacaaacttggcaagtgggttttgatccaccattgctacgacctcttccacgagatctaccaccatttgtgcctcctctgctgccagcaaagcgatttccacttccagagttagcatatgagcctcgtccacgtctaggattagtgtttttagcaaccatattggcttgaggattcgatgcaggaggtgtgtttagcatcttgttggtgctggttagagtctgcaacctctcaatcttgctatcgaaactcagtaagatgtcttgaagttcttgccaagtggttttggatctggcttcaatctgcacaacgattgaaatgtactcggcatccagacccgataaaacatttgccaccaggtgagcttcgggatacgagtctccagcaagagctaaagtatcaccccaattctttttctgtttgagatatgttgtcatggataaacttcccttccttgtagtttgaatgtaggtacgcatatcatccattctcgcacgcgagtacacaccatagaggttttcaagggtctgccacaatcctgctgcggttgctgaacccatgaactcagttgcaattgcttctgtcatggagctgtacaaccagcccatcagaagttgatcattaatcagttagtgttcaaactcagggttaacctgtacgactccatctggtcctgcaggcaaaaattcaaggggacaaactttagtaccagttagataaccttccaatctatgacctctaacaatagtagacaccatggttttccacaaggtgtagttgttgcgatccaacttgagggaaaaaggttgattaagggtgctgaaatgttggggatatgcatttggaaactgagatgcagagggatcatttctggtgttggaggaaatttggacagcagggttttctacagctgagcttgcttcttgagcagtggcttcgtcatttggattctgtggggaggccattggcgtaagcctttcttggctttgatacaaagtgaaaaataaggaaaatataagttatgcaaatctcaactcaatctcaatgagccagagtcattccatttatagatggtgatgaatacaatagagtcgttaggcaacagggacaactcgcagtgaaccaaatacaaggaaataaaaaaggaatcaaatcctaacaataattctaatcattacagaataattaatttgggaccacaaaatattctgtagtacaggcataacagaattgggaatatcctttaatacctcatcaatccttaacaatgagaaacatgtgctgaaattcttatttctcaacactagcctcgagttgcttttacctctcgtcctccgtcgtcggtgttcctccgccgatctcttgaagtccaacttttcacctactttttcagcttcatcttcttcaaccctttgccagtggccaacacctcgatctcaactctttcaagtctgtagtcgatggccaaaacctgtcatcttcttcgctagatcaaatctcaggcctccttcatctttccctttctctttcttttactctctctctct

SEQ ID NO: 380530 - DNA, 4370 bp, Cannabis indica
tttttttttttctttctttggtatcaaatttatacttatgtgactacatagaatctgtggaatcatatgtgccttaatatatctctttctgttcctttattttcttaggggcaaacattcttatatactcatctcccgtacttctcatagccactttgagctgtttatatcttcatataagaaagaaaatggctcataataacacagaaaggtatttattttatgctttgcctcttgtaaatatccctatttcacacaaagaaacagagtaatttttcaaaatgacttgagtggttggttttgtttttgtttttgttttcttgttatagtatcatggaaaatgtatattggatgtcatggatgagacctgtgctagtgaaagggccactgggaatagtttcttggatggagttgtacttcttagccatgttcattggtctacttgtctggtccatgtactcttacttacatggaatgtttatcaatgtcaaccaacaggcagcacagatgaatgagtctctgtaagtaaatatttcttcttggaattccatttgatataataagacatatcttatgtgtttcaaaatcaaaatcattacaaattttcaggtgggaagcaaagttagaaagcacagctctaatgttaggtctagttgggaacatttgtctagcttttctctttttccctgtgacaagaggatcttcaattttgcagctcattggaattacatcagagtcaagcattaaatatcacatatggctggggcatatggccatgacccttttcacagctcatggtttatgttatattctcttttgggccaagacaaaccatgtttcagaagtaagaaactaccattttatgtaaaaagattataacatctttataataattgtgctgaaattacagatgatgaagtgggctaatgttggcatatcaaatgtggctggagaagtagctttggtggctggactagtgatgtggggaacaagttttcctaccataaggcgaaagattttcgagctcttcttctacactcatcatctctatgttgtctttgttgtattctttgttctacacgtggggttctcctatgcttgcataatgctccctggcttttacctcttcttgattgataggtacttgaggttcctacaatcccagcaaaagattcgagttctttcagcccgaatcttaccttgccaagctgttgaattgaatttctccaagtgcccaggtgaacaattcagaaataaatctaatctcatcaatgactgctataaaatttaaaacacattttcataacttgattataggtttgagctattctccaagaagcatgattttcctaaatgtacccacaatttctaagctccaatggcatccatttactgttacttctagcagcaacttggaacctcataaactgagtgttgttatcaaaagtgaaggaaaatggtctcataacttgtaccaaagtctctcatcgccttcacaaatggatcgtatacaagtctccattgaaggaccttatggaccatcttcattacaatgtacaaggtaaaaatttcttatcgagggacttttagctaagtaaggtttctaactatttcaggcaaaaaatagtgcaggcatgaaacagttgtgatgataagtggaggaagtggaatcacgccattcatctccattatccgcgagctcctcttcatagccaacaaagacaacagcaacactccaagcatattactcatttgcgccgttaagaactacggggatctcaccatgttagaccttatcatcccatcatcaggcactagttacaacatttctcgcttaaaacttcaaattgaagctttcgtcacaagacagaaacatcccccaactgagattactcacaagctcccacaaacaatagtttggtttaaaccagagtcgtttgatttgcctgtttatgaaattttgggacagaacagttggttgtggcttgcattgattgtttcagcttctttcctcacttaccttacgctcatgggaatccttacacgatattatatatacccgattgaccataactctgatatgatgtactctttcacttcaaaatcttttctcaacatgttattcttgtccatctccatagtcataattgcatccttgggctttctttggaacaagaagcaagggaataacgcaaggccaagcactttgagcgacaatgctggtgatgagagggagttggaaagcctcccttaccaatctttggtcgaagccacaacagtgcaccatggaaccagacctaatctcaaaagtatatatatatatatagacaaccatttttaatactgattatttactaaccacagttgattaatagagatctttaacgtgtatctatttttcttatttattattcaggaattttgagagagctgaaaagctcaagtgttggggttctggtgagtgggccaaggacgatgaggcaggaagtggctgcaatatgttcttcgggttcggccaataatctacatttccagtcttcaagtttcagctggtgaagactagttattattattataatacttggttgatcaatgtattaattatatagatgcaaataattttaaagaagaggatttcattttactctctagttctagttaacattatagatgaagtgaccatgagcaaatcaacaaaactaaatagatatttacatgcgaatatggtattgacacaataaaagtacaacattttgcttaatcattataactttatagcctcaacgaggttacatatggcctaagtaaattaggatttcttaggaaattaagaactataaagaagggccacaataggcctaccacgtttaaaaaattgccagattagagaggtgagaataagagtgcttccaaaagcagtgtctgttaaagatttatgaaactatcaacaaatacaaataattacacttctaatcatatttctaaaagtactttaatatagaaaattctaaatcactacgagaaatattacttttgtagatctattattgcgccgacaaaaggtccaaaatgttttgggaggagttctgttacgtaaataaatatatgggggggaaaacttttgtcgacgcatatttgtaccgacaaaagtctataaaaaaaaaatagcttttaggggaaaattttacttttatcggcacaaatgtacactgacaaaaggtccaaaaagagtgacaatttttgcgtgaaaatgtggtaggtgggaatactaccaaaatattgtgtttcaatttagggtaccactattcacagtatcaatttcatcaatagaaacaacttttctaggaggacctccaatcaagtaatactgaacaaaatataaaacagccaacttgactgcaagattatcattatccctaagttgttagcaataaaggcaacttgaatcgaattcttagtaatttttttattaccctttaaaaaatattcaactagcatattcttatcctgtttgaactaaaaaaaatatagatcaatgtggcaatctagacctgtgactaaggtaaattcctctacactaaatctaaaaaaaacttgccagcaacaaatacccacaattctatctcattaggttgttgaacttccctcaaggataggtcatgcaagacttggaaataaataatatactctagaattcgaaggaagtgatcaaaaacagtttgagaaaatattttcaattggattgggtaagaatagtttgatatcgttaatagcaaaacaacatgcaaatttacatgtctagtctatatttatatgtccagtcttgagaaaataatcatgcaaatacacataaaaacaactcaaaaataataccagaacgaacaacaaaaaataataaaagaaataattaaaaaaaaaaaaagttcacaaacctcaacaacaatatcaccaaaaacttctttcaacccaataggaataatcacaatagcaaatttacccttcccctacaaaaaaaaaacaaataaaaaaaagacaaaaaataaatataaaaggtacgaatcaactcaaaacaacaaacaccaaaaaaacaattcaaataaaatactattaaattagaattgtaataaacaaaacaaaataatataaaaaaaataaataaataaaaaaaaacaacacacacaaaaacaagtgactgatcttagcaactttagataattcaataaactcatagtcaagttcaaaatcaaaatcagactcttcctctatagatgtttagaaacactctggcgtttggttggaggaatgaaaatgtaggaataggaatgggaataggaatagtaataggaatggaatagaataaaatttaaaat

SEQ ID NO: 380531 - DNA, 1562 bp, Cannabis indica
tggctctagcccctaccacttacattatcaatactttgaaagccaggtaccagcccattgtcttatggagtagtttgggggtgaccaatccctttacttttagcttttcaatggagaaggtctagtactgagccactttcttttgtagttcctcagtctcaaggcttcggggaacaagctctgtcaaaaataggatgataaaacctcaaaaagtagccaacttagaaagtttgcaaatgaaaaagaaaaatatataaaatttcttctctaggattttgaagtccaaaggaagggtggggcccctcttctgggaaggtagtggagaaaaccaatactcccagagatctgcggagcataaggtatggttggcggggcagtacgcgtcagaatacctctcgagcttgtaaaattgaaactttttgcaattggcatgcataggttgagtcttcacgccatagaattataatatctcatccgttctaggaaatttgagcttccaaattttgcaaaagatgtaccctcttaatctagaggtatcagctagaacaaagctattcccattctcgcacagaactctgcaaagtatgtcctaagagggttgtgtgcttcccttaccatgtgagcccagctctaggtgctaaacccattagtactcacggaggtttattcttctaccatagatagcctattccacataaattatggtatgctacgcacagcagccttagtggcataggtttccatcatgtcttaagacctaaagctattgggttttttgtccatttcccaaatggagtcattatgaaactttaaccttcccctttgccttagtttaagttgcctccctagacagagcaacttctaggactaggttttgttgaagttcctctctgagagcaagaattagggattcctcaacattgacctccttagcgaaggttatggttggcacttcctcattatttactaccttgagactgaattctttaattagatcaatcactgaaaaaatgaacaaaaagaaagaaccaagaaattatatacccaacatcctatatgagtattggggaacgcctcccctaaaattgcttggagagttccccgtcgaacccattacttatgaagtcctcccttcaccaaacgatacctcgaagtgacatataggaacccaatggagaattaccaaaataaactcaaataacttccaaaaatcagacccatttggagttttcacaactccaaataggcaatcagaagaaaaatggatcaaaaatttgctcaaaagttcattttttctagttaagacccaagtattagagttctaagaacatgcaaatgatctacatgactcaagttgtcatgccctaactattcagacaacatcaacattctctcgaggggacaattttgacctaactcagtcctagaagtacaactctatggacatccttttaccctttgcatatatcacatatccttgacctagcttgaacttagaatttctatcctagatatgatttgttgacaaatttaatgatctgattttaatcatagtccaattg

SEQ ID NO: 380532 - DNA, 1005 bp, Cannabis indica
ttttttttttaaaaaaaagctgttgaagaatgaaaacaagagtgattgagagatgttgtagggatgatcagtctgggtgtctgtgagtttgtaatctgaaattggtttgagctctttgaagggtgtaagagtgtgcactgtgtgtcttgacaatatctggtttgtgtttttagttgactacttgtttcataatctcaaaataatattacttaattgaaagttggtcattaattattcttagtcagacatttaatttggatgaaattaagttggtccctgagctacaattcttttaagaaaccaatcattcatggccatggccacttccctcccttcgctttcgagtcataacataaaggaattgactgagctagttttgctccaaacctgcaatttcttcaagtcaattattgatcttcaatatggaagaaataacaaaagtagtttttgatgcaagagttttgaagtactacaggtgagatacttatgcctgtcttgacatataatattccttccatgtaatattatattgttttgattaataagtctgcattttctgatttaatgtttcaacttgcaagtaatttttattgcagtagtatggctattcattcactttaatgaagctaataagaagaaattcctacataatgtttgtttagtacttataattaataatattaataataattggctgtgttgtcataggttggatggatatggcaggctcaaccttattagttcctttgtcattttggcccatttgcatatcagtttcagttatttctgttatccatttcttcatattattgattatatatgaaattgttaaattagatctcactgtaatagttattattactgtgttacaagatgaagtgaaaaattacagataaaatacaaacagaatacaacagaaaacagatcctaggtggcttcgcctctagtggatcaagatctggttgttagttacaaccgaagctgtaactaacttccagatctatg

SEQ ID NO: 380533 - DNA, 1933 bp, Cannabis indica
aaagaaaattgtatagaaaaaattggtttccttttaattttttatcttgtttggttcttaatgggaaagaaataatttctctttttatccttccatttcatattaatgttaaatcctttcttataattagttaaaattaacatattattaatatctattcactctctttggcaatttctatctatatgagaacatgtatatcacaaaatacataatttacactagaatatgatttaaaagttacatcattaagtatttaaattataatatctccacataatcatagttatatgctaactcaacatttcttcctctctacattcattagttgaggatggaaattgctatggatttcaaatcacctgggcccaccaaaaatgatcctcccacatgttggtggtagatgaaaaaaaattgagaatttttttttttaaaataattttatgctaattttctttttattttattttaaataataaaaaatactaattctttctttccttcctgttgtaccaaacaaacctaaagaactatcaaatctatcctccatacttttccatacctcctacataatcaattctttatcctagttaccaaacaaagggttaaatttgatgtaataaaaattggttggttgcctgcttgcttgattaagttgtctatcaatttttgtaataagaccttcatcaggatcgttacccatgagatagttttacaaaatacattctgccaacactagatcaacttatacattatatggctcgaactccactagtcaatattggaaattttttcttcaatatgctaaatgctatttcaattgaattgcgcaacgagcctcttgcattttctggtggattttttgcactatactatttactgacaagatattactttgaggaacaattagtttatggaactctctagttataacattatacattatttagaacctcttgaatcaaaagcattaccttctcacctaggtaaatacatatgtaatttttatatcaaatgaacaagcaactagaacattttggattgaaaaagacttctgtcctcgataaaactcatagacattcctgtaaatttcttatgcatccccaccgaattcacaagaattttttttagatatagcagctaaacatagaatatagattgatcaatattattcattacacagttggtatagatgaaattatgtataagaaacaagcaaaatctgactagaaacagaaaactactacaactaatacagccacaaatagcaagagcaatgtaaaacgaagtagaggaccagaaattcaaaaacataacagcccattgtccccattacaggctcttcaaggtggtctgaaatctgtaaaggtttgttaccatataatccatcttaatggcaccatgactatcaaactggttattctaaagttagagttagtttagtcagttaggcaacttgatttgagtcagttagataagtttctggtttagtaacaattagttattgaatttagttactaatcttgtgtataaatacagagcttggtaattcttttgtttcttgattcattaaaaaataattaattctttctttctctctgtttggattccgcatgacaactattaatgaccaagttagccattaatgaactgatttaatctttcactgatgcttagaagccatatctattacctatgataccaaaagtggtgcactccaacttttttgtcggtaattttttgacaagctccctcattgtcattagacaaaaggcaaataatactagaagaaatgtacaatttatattcaactaggaaggacaatattcgataattagctacgacagaattagctatttcagttttttcatagaaagtctgtttcagttgatcatgtaataatttgtacatttcaccaatggctatcgttgag

SEQ ID NO: 380534 - DNA, 1365 bp, Cannabis indica
  modified_base (133)..(133): a, c, t, g, unknown or other
caggaggacttgatgaacctatacagcggccatacgtagaacgtgattggcggttcggacactatgagatggaaggccttcatgaccctttgagtcgcttatcaaaactcattcttggacccttatccctcanaaggaaaaagaagaagcatgaggaggaggaagaagaagaagaatatgaaccattggttcttcaacctcttgagctgagtgtttgatttattttactaatcatatctcttgcttgacacttcttgctcttagattttgtaaccatttgaatttgtcaccatgctaaatgtgtgcttattgttacccttcaattgattcaattgcttatatctattttggaagggttgtgattatctatttttaaaaacatagtaatgcaataaaggaacaagattatttttaatttttttttttcattaactaataatatttattcattattgttttatgttgagaaggtttttttgaagaagaaacgggtatggagattaatttagtggcttaaaatatgttttgttgggggtcatgaaaataaaaaaaattggaatagaagtgtgagaataataaagagaggggaagttttatttgcacctgtacatcttattttaataattttgaatgatggggcttcatatttttctattttagacgcgctatgtagtagggtgttgaaggcttcatattttcgtaacgagagtgtgttgggagcgaaatgtggttccaatgcttcttttgtgtggaggagtttagagtaggggaagaaagtgataataaatagctatcgatggcggattggtaatggaaataatattagggtgttagaggattcttggctttctaggcctctgcttcctgaaccattatatgtggttgatcttaaattggccaatagtgaatattttgatgaagatgatgctacccttatcctttctcttctcaactttaacattgagattgaggacaaagtttcatggcactatagtaagaatggagaatatgcaccaatcaattgatcaagcaatagtggaatagtggagaaatctataaaaataagaaatctcacataaagtgaaatattttgtatggaaggtggtgcataattggctgcctactaataatattctggctaaacgtggtatttgttctgatgtgaattgccataggtgctacaatggagttgattttatattcaatgcgttatgggattgcaaggcaaacaaagtgtactagaaagtttgtggacttaaaaatgaggggagaatgtgttaacctatatgatgagactttgaacactttaagcatgtttggcattgttttctgttttttgttttaaaaaattatttttagaaatga

SEQ ID NO: 380535 - DNA, 8183 bp, Cannabis indica
ttttcttgctatggaggaggtggtggagcctattgtctccaccatcaaccttgttttctattcctctttgattgttttataatttgaaaaaaaaaagaaaacattatcttgtacgaggtgtaaggataccattgaacataaattgaaaaggtagttacgttgtaacaaggtgattgagtgggtcacgtgcccctcgcgtgggaaaattgcagacacgacaatggaaacgcatttttatattcagaaagaatcaaattaggagacccattgttttcttcttcttcttcttcttcttcttcccattctaagttttttctcttttctctctcggaggagagagagagagaagagagagaaaccaaactcgcgaaatagatattatcaagattacaccacttctctccctctagggtttcattttcagtcttgttctattaccgcacggccattgctttctcccaaagattctttctccaatttctatctttcttcgtttttttccgattccactttcaggtttcgtagatattgaggtcagactatcttctgctgattttgattcttattgcttggtttaatttaggttcgcattgtgtgtgtgggtgcattgctttaggcacaaattttgatgagttcttatgcttttcttctcttttctttacaatggagtttggacagtagcgaggaatttgtacttttttttttggaaattcatggagaatgtctacttatccagttagttaacatgttgctacttagctatagctttattgagatgaagattttgttttctttcgtaaattcaaaaccaaatcagaagaggtgacattgtcttgccaacttcactcgactcgacccttttgtgttgtataacgatatttatttgttttgtcatagttgaattttcaattttgtgtaggctcttgccccattgtatgttaacttatggtgcagagtacttttttgcttcccaacaccataatgggtgtagcgttatgaccatagaaggtaattttgctggtgttagcttaacaaatatacggctttcaatggtattctcacttggaagtgggaggatggcggtgatggctaggcttttagcagcggggagtttttcacgaagtgtagcagcaggtacatttggcatacatgtatacatatatattatttatatatacatgcacatatactttttcttcttttgtcacttgtgtggccttttgtaaagagacgagaattgagaattttatagtccgcttattgtacaatcatgcaagtcatcatttttttctaaatattatattattgttttggcagaggaagctggacatcagaaactagctgctacgttgctatataaggaattaagagaggcagatgagccaaattttcttgatgaagaaggtaatttgtttatttctttatactttccgcattttaattcattagctatattctttactaggaagctaaacttccacaatagtttgataaaattagatggtgtggtcaatactaagtagaaaatatgttaataaattatttggcttttcaaaatgcaagccaatactaagttgtgatttctaactttgttctattaactttgttctttttgggtgcttaattagacttttattgatttctgcctggttttagatatgcatgtctttggtttgaagcccatgtctgatcctttgcatttggtaagtctacagtttacattttaccaaattaccatgtactaagaattcttctcaactagaagagaaattcgctattatcggaaaagatagatgctttttaggtttttttttcaatgaaatttaacaattctaagattttgctttcttaacatgctttcatttgcatgcatggacaaataatctatttcagtctctgattgcttaatattgatttgaaggtatgctgcaatacttgtaagagaccagtccaggctagtcaatatgtagctcatgcaggtttggaggggattaattattttttgtttgtattattccatcaaatttcgtgattccatgatatattcaagaaacgtactcctttgcaactcaaaacacaatgaagaagtgtgtatctcattaacacagtgacacaaacacaaagaagaagcatttagagtttattatataagctttttagcttcaaatctggattcatataagcttctgtggcattttattttatcatatatcaatatattataggccaactttaattcaagatatcatgcctattttagggcctttttaaaggaaaagaaaagtaaaaatagggcctgaatttaatccaagatatcatgcctattgtaaggtctgccttttttttttgaaagaattttaaggcctgactttaattcccaatgacttgtctcatgtattacccattccacttctatgttttccttgtctgcttatgcttctactgaaatagtttttctttttcctctcttatggatctctgcagaattttgtagaatggtaagttctatagaagaatccatgttggatgttactggcagtgtggggcatagaaaggccatgagaaaagagaagagaaagccactcaatgcttatgctagtatcctttttctttttcttcatgacttacaacatagttgtgaaagccatggctagcttcagcaattgggtgtgtgagcgtgtgttgtggtgttgggtttaagttcctgcagttgtctcttatccaaaaatagaaataataaaatatttctggaagcagactgttcttaaatatttgttacaaagtcttttcatttttgtccataacctattttagaccaggctattttagttcgggaagtggaaaggtctaaatctatcatagtaggtgatactgttactgcagaatctcggttgaatgggaaacctgggacaaattcttccttctcttttgacagaaaaagtaatttcatcttgcccttagtttgtctatcttattttgtatagtttcttgtcatgggataatttaatatatcattgttttaatctgctaaatttcttggtaatgaaacgattacgatgcattgcttctttaaaggagtgttcatcacttatctgtggttgttttaggcaggatgaagtgtgttatatgagggtgacattgttttctaattcccccaattgctatcatacatttttcaagtgtatttatataacatcaggaggcaataaaaatcatacagggatagccttccccaattgattttgttagactgccattacgacaagtattaatatttaaattgcttgcttgattgtcttgctgtctcttctaggaaattcagcctatggagatgccgaacatttgatgcatggttcagcagttagtcccggagatgatgataactcagctggcgtaatgactcgtgcactaaagcgctctaaattgtatgttttctttccctagaatttttatttacactgatttgagaatgttgatttcgtgcacattgtttcaattacacattgtgccttataaatgtacccagccgttaatatttttcttattgcaattgctatatttattgcctctgtttttaactttttatgtccactccaatgagatactttattctactctcattttggaagttttatatgacagatattatataactttgggttgcagatgtagtaatttgggttgcagatgttatataacttttggatagttgtgcatattgaaatgaatcaaatttcatacttcttaaggttggaaaatccttgtataagtgttttaggcttttgagtaatgtggatggatctctatcatcaattgtccctactccctatggatatatgccacatggcttcttatcttgaagaagagggttgtaggtgccaagcttgttaaatgccttgagtgaaaagtagctaatctagaaatattttccgaaatttaatgcactgctgatagtaatataccattcaatgaaacacaacctgtcaagctttctatagtaataaattcccttgccttattttgttattggcttctttatatgtatttatttatatttctgttttgtaggatggcaggtgagtggctgccattgtctgatgcatctgttgtctcaaatatattaagtactcacgatgactataactgtgaggcctgagtacaagtttaattttatttaatattgttatgttttctgataactctgtatgtagaatgttggtagcattcagcttatggataaactacagtgaaaatcatagtacaatggaaccagagttacttttgttttctcaattgtatccacaacctaaaatttgaggatagtgattcttgagttttgacaaaaattctgactttgaaggagagtcaaattttgttttgtcactatgattaatgtaattgggggaaatcctgtgtcgtagttgattggcaataagctctctcttatctggattagttgatgaagaaacaaatggaatgagtattcatgttgatgtgctgacatcaactaaagcttttataatagttcctgtttaattctatactttggcaattaatttaccacctcaatgaatctgattgagaggtagagactagtaaagttgggattactaatagatgctatctcgtggctaagaatttgatgtcttaattaatattaaataactagttttatagaaagaaaagggtcagcctgaaattatattatttatcagtaaattaaatcttatattaaaaattaaataatggcattttttattatattatttagtacttctgttgagtagtgaattattaatgtatacttgtgcttactgcatatctttaggtgacatctctcccaaacaaactattgctgagagtggaagtcctaatgattctatttttggaaataagaagcctgatcagttcaatggatgctgcctgccaataaaaggtattttacagttgtgtatgtgataaaatgttgggacccgttatcaaaatccattgaagtgggtagaaacataagatttacaatatatcttctttattgaagtgggtagaaaatccattgaccgtcggtttatgaaagtttgtcctgtaccttattttccaatttattttcatcgatagtgtcttggttggtctcacagtaataagattgcttgtcttgattcattaaagcaaatatgtcagttccccttgcaaccaaaatttattactctcaaagaaacaaccgtcttcgctctgcattttgtcatctttactatgagacagtggcatcgactgaggaggtttgcagtggcactgcaaacaagaaaataaatgataatgtgtaccaatcacagacttcatctcagaaggacgagtcattgagacaaataaatacagggttaaacagcaaggtttgccttcacaaattctttctactcattattggtggctgtatgtgttcatctaggttttgttgtagagtggtctttctctgatcttattaggattgccctagttttgatttggctttccagtgctgatgttgtaaacgataaaggattttgaattatgaagaaagtgatcacatgtctctccaataaatttcttacagtggcatatgctctgaggcgatatttcattttctgcatgattatagtcactatggctagtttaggttgtgtgtttgtcaaaggttacactaatgactaagtacacgtgaatatatgatttgtttctgttgcattatttggggatagctgatttgaatttatcattgttccattgaaacaggactcactttctctggtttcctcgcaaagtcctgaccagtgccttgcacaaagctcagaaatgtgtttgggctcatctgaagtttctttgcctatctcaatgcagtttcctgttgataatgcttcgagatctctggttgctcctgttggtttatcaagaagcaaatacgtttcaaagcctttctcatatccaggaaattcaggtatttcttcaagactacatggtagttttatttgtgagttcacatttttggaatggaatcaagtttatacaaggctttgtataaacttaattaaacgacgtgtttgcaagtcatgtgatcactacaatatcccattagtgtatacaatttttctttatcttgcattcttaagtgtggtgtttgttctatagcgatcatctcaccaaccatatgttgttacctttttctacggaggcctaagaaaaaatgttctgagggctgtttctgcttgaataatgtcagacctgtcacctgtttgtaaaccctaaacccattagtttttctaacttgtaaaaattcagcacaaaataaattattaagggtgcacaaaatttagctttggtacgtataatttttgaagagagcatctataggtgcttttccatagaatttctacagttccattgtttgattatatttggctttaaaaacatgacttggtttttaataccaatttatcactgactagaaatattttagtggttcagtttttttaattttcttttcatcttggcagcatttatatatttatgtgtttttttaatccactcacttcgttaaataccttcaagatggaaataatcgggtttgtcttgggttttgtaggacaacctctgcaagcagtgcagcagcaaaatggcagcgttcctgttttataggacctcaaatggggccttttttgtatagctagaggaagatgtaattaaccaaatacttgaggttaggtcctaggaaccctttttgataccgaccaagaaatccatcaaagcttgttcattctgcctcgtgttcattatagccgagtaccagctagtgtttatagtcattcaagaatcaaaaacgaatcaatggctgatctcagactgccattctttacataacatgtgactttttattgtaacgtaacgttatgtatctttactttagatcagtttagaatgcataacatctgtccagagaggaagtaaatgggatatgtgagacctgtgttttccaactatgcacatttataatagtaatattacagttagttttcagtgcaggaaaaaagagagccaaaggcacagaccaaagagaaggtattagaaatgaatcattttaggtgtgttggtttaaacattattgaattgatccttatcttttattattagttgaagaaccctagaaggaagggaaatgaggttaaatgggcactcaaacatgtctccttttgatgtggtaattgagagttaggtggggatggaggccttattgcttgctccaattcaatgaccaacccaagtgggggagttttcagcaggcgggacctggtaagtaagttgcccttgcaattatcacaatgcactgccaataagatttaacgtgtgacagcaatagattaggacggcctcttaactttgtgctctgagaatttatttatattagaatttaacgtgtttatttttttttgctacttgtgtttataatatcttctaattcttgatgatgtgactttgatataatcgtcgattgttttgttttgtcttgtctttactaccaataccaatataatcatcgttttggcatatgtttattctgtcacaaatatttatctaatatagctgattttttaagagaaaaagaaaaataaaataaaatacgaaaggggaagttgttacaactgtgtgtacgtacgtgtgtatcattattccctccactttgtaacgtgggaaaggttcacttaaactataacaaaatattagtagaagctgtgagatggtttaggtgtttatttattcatttttttttccctagtgattctataaaatatgaaattatgtggtagctgcattttcatatctctgatagaaacatgatatcagtaacaccgtattacaatatttctattgctttggcatatgattttatctattgtgtttacaatatttttgtcttccagcaaaaaagaaaagtgtatttacaatatttggcatcttgtatttggcgagtgatttgtgagacccgacattgaaataaacaatactggtatatcattttttcaggggtgtacataaatcattcaatccaattacaactgaccgatccaattacaatcgactgtgaaccattggatatccaattgtgatcagatcggattggatgttatttttaaatatccaattggatcggatcggat

SEQ ID NO: 380536 - DNA, 2806 bp, Cannabis indica
aaaaaaaaaaaaaaaaaagaacacacattttctatgtagtacattgaaaaattatactatacaatgaagagtgtactaagtttaattataattgacaatacaatcttaaaagaaatattagaaaaatgaatatatatacatatatacttatgtagctagctagttatatatatttatataagatacatacatatagcaaaataaaagtaataataagaaaaaggactagctatcaatcatacatgtgggtggcaaaactagttgcatttgtttcatacaacatataagaaaatctataccatatatattatttgtgatttgtgaatgaagtaaccattgattaattttcaaagacttgtacaatattacattataaatagaatgtttctatctagttggtcttaggtagtgtgacatgacatatattctagtgtgaaaggaatgtgagtcgacacccgccgtataacttttgtattttaatatatataacactgaaaacttgaaatatatatacatgtatatatataatagaggcatatgaggaggacagcataaacacactacaacgaattataatgctgaacaagataataccaaatatatacaaagtattagaaccagttgtgcttatgtttgcttattggagcactgataattatatgtggcacccacactctctttattatacacttttccatccctatttatagctgatatttcttgcatgtaaaatcaaaaaccaaaccaattatacaattcccacaaaatgggtatccatagagttactagtgttgttttctttgctttattgggtttagtaattggtacttatgcctctagagctctatttgatactgaagaagctcttactgataaacatgccctaggccttggtgttggtgttgatgttggtatctctggcggtataactggtggtgctgctggatatggaggcggaagtggcggtggagaaggtggaggagcaggctatggagctgctgctggacatggaggaggcggcggctctggaaatggtggaggcggtggtggtggtggtgatgctgctgggggaagcggaagtggagctggcgaaggaggtggtaaaggatatggttctggtggagttaatggtggtggcggtggtggaggtagtggaggaggaggtggtagtggtgctggacatggtggtggagagcagggttatggtggcggtggatcagctggtggtggcggacatggaagtggggctggagaaggaggaggtggaggttatggtggtggtggagctagtggtggcggtggtggtggaggtggaggtaatggtggtggtggtggtggcggtggtggtagtgcaggacatgggggagagcagggtgccggttatggaggtggtgcaggtggaggctctggtgctgggtatggtgccggaggagctgcaggacacggaggaggaggtggtggtggaagcggtggaggaggcggaggtggaggtggagcaggttctagtgctggaggagcacatggaggtggctacggtggggtgaaggtgcaggtggaggctcaggatatggtggcggtgcaggtgggcatggtggaggtggaggtggtggcggtggatctggtggtggcggtggcggtgggtatggtgctgctggtggtggtggtggacaagggagtggctatggagaaggtgctggccatggtggtggatatgccccttgaataatataagggcattgtgttcatgaagatcaaacttgtagtttaaccagtgaccaccaggatcactcttacatttgaataattattacaaaatataataattatttggtaagaatttattaagatcgctggtgattttatatcatgtgtttggaagtaaattttaaattataacaaagaataatgcatgagtatatacatgcatgctcttgtaccatgtaagttgtaatatatatttatatatataattgtgctataatttccctagctattttgtgtgtcgtaacaatggtcttcttacaattaatggtatcttaaatagattacatatatttattcaattattagatcagtataataatttgcatgcgcaactatcttaatttacccgttagttaactaaattaatacatataatatatttgttatatatatataacagaaatggaatagtttagacataaagtgaatgaaatttcagtaaccttcattgaagaataaaggaatgtttatatacatgggaaaacctaaaaaaaaggttgttgaataacgacttttgtaactgaaagtgacgctcactaactctaactaacaaaacactataccttaacaatcttaatactctccctttataaggtggagtgttaacaaaaaaaaaaaaaattaagacattgaactgagctggaagtagggctttagtgcagatgtctacaatttgatcttcgcttgatttgtgagctttgttttgatgattccttcttgaactttctgtgtaacaagataacagtctactttaatatttttagttctctcgtgatatactggattggctgcaatttgttgtgcaaccttgttgtcacaatgaagtatagctggtccatggtgctcgatgttcaattctttcagtaatgacagttaccaaattacttcacatgtagtgtttgacattgctctgtactctgcctctgtaacgccctgatttctcgagacgtcacactcgctagtccgtttaaaatcatttataataaagacaataaactaatttattaaaaataaccaaagcatgagatctcattattttaaa

SEQ ID NO: 380537 - DNA, 2108 bp, Cannabis indica
ttttttttttttttttcttgggtaagttttctccgatctgacatctgttgaaactgattcattttcattacaggtttttctttgcatttttttttgtgtgtgagttccttgtttcttggaactagagtttcatggattcatttgggtcgattaaagttttttaaagggttttttgagttctattgttagaggctacttctgtagcgtgtaccctcaggtgatttccttctttcaaattcgttatgaccattattgtttgctcatgccattaattattgaattaagttctttcgtttcacaaagaaatcttggttagtttttcttttaatgctggaggtccatatgtttttaaaagttgaatctttcatttcctttttgtggtatccctattctatgctaaccacattgcttagttttatttttctaaaaaaaaatctattaatgattttgcttgttgaatcaaatttcgcatttcttttgtagatgatctaattgtctacccaattagttgccatgaatgatttttaagtgatatttattgaccagtgatttttctttgcaggttcattgttaggctaagtgaagcaaatacttttggtttttgcaaatattatctatgtttgggggtcttgcgacggttcctaccaatagtcctcacttaagaaagtctggtagcagacccgttttctctgatctgggtacaattaattgatatatatacatatgtacacatttgagtgtcaaggatgtgatatggtcacaaatgctattgtttactagtccattgacatcttatactttatacaatttatcattcaggaactactgatgtagaaaatggtgctgatgaaaatttcctgcattcaacagagactgatagtttgaagggttcaagtaccccaattagtactggtgcaatgatgccgtcacccatcttcttgtggagaatcaaggttctgttgatttattcggttgcattattttcaatcttttcttagtttataatatctatatgctctcagtttcatggaagaatgttcctttaatcaccttataattttgacctgggagatggatagaaagtcttataatatgttgcttctccataatttataaagaacaaaaggggcttttaatttctttatttgaatttaattactgtaattgtcaatgaagattgatttaatattcatcgaacttattcaatcttattttcttgaaatatactaattgcgtatatgctttacaaatgctgtccaggtggtattcttttttatctggggtttcatttgttgcaaggtgactatactttctcattgtaaaactatatttgtatgataattctgatttagttgcaacacggacaagggctatgggaatgtttaatttaattgcattatttgcagattggatgggattctgtgatgagaatgagtgtggatttgagagatttatttctatacgaggcatttttatattacaatccacttcttcttgtggtaagctgtgtatttccctgttcaggtgaagtgtcctgtgatgacatatgtaattgatcatttcactaactcgttttcaaatggtttcaatttttgtagaccatggctgtttggttttggggaagtaatttatgggttttctcccaatccactgtcagttatgcaaagatttttgatcttgaccaaaatcatttgacacatagagaaatatggaaggtatcaattcaaatactattcaatgactgtctttcagaatacattcttttagttgcattgtatagtgattctgctttgctgtaatactattaatctcttcttacttatgctctcaaaaaaaaaaataattaaaaactctcttaagaattgggagtatgctatacttttggggatagctgatgggagttactgatattcttcaaggattatggcgtgatttaaatttaatggcttattatactcgtcagcataggatgagttgaatagtaagatagaagtacatggataataataataataataataataataataatagctatagaagtatcccaacccggccatgctttttttttaatcaatgatgagttgaataataagatagaagtacat

SEQ ID NO: 380538 - DNA, 1406 bp, Cannabis indica
tatttatgaaaaaaaatatttttaagtctggcaatagtagagacccaataggtgggcaacattgtcacaatgttattagtggtggtattgggggggttttgttaagtttgtttatttaatatttattggggtattttggggtaattgtttattacaaaattacccctgcatttgatggtaatttaggaattaagaaaagggtagaattgtgttttatctagggtttattaggctttgtccttttgtggaatctagtaaaacttaggatgaagtaagttaattcctcttgcttaattaaataatactataaggtaaaaccaaagataagatttagctcatcctcatcctcactccttctcttctctttctctcagccaagaacaaaccaagcaaccacaagaacccaaaccataaattcaaagattctacaccattttagtatgattttagcaagggatttaagtctagttgatagtgaagactaaaggtatgattctagtacctcattctctctttaattcatgaaaggtgtaggttgtgatttggaattttgatattttgattgttataagtttagatagggattaggttgtgttcctgggttagattgaagcttgcttaaaggttaaaatcttggtttttgcagcagtgaggttgatgaatcaagcttgagttcttggatacaatatcatgaaaatagaagggaaacagagctttagtaaacacatctggaagtttttttctttggagaaaatatggatcattttgagggtgccttggttgattttctctcagacaatgtgggagtctatttcaacatgtttggtttgtccatggtagacatggctcttcaaaatgtggattgctacattattgtcaaaacagaggatttttggtgtgggaggactaactccaatgtcttttaaaatggcgaaaatccatgtgacttctcacgtagcgtgtgttgtggccctgtattcaacttcggttgaggagcgagagaccatttgttatttcttagacttccatgagataagggaattatcgaggaagacacaatatttagatttagaacatctagtgtcttggaagcttcctagtcaacagaagagaacaatttgagtcggagatcagattgtgacgtgctgatttcaccatttcagcatatgcttaaacttggtgagtgctagaagtagggaaatgaaggatttgtcttagagtaccttttaagtattgcaagatatggtgtgtagcatgtaggggtgtacattggtcggtttggtcgggttatagtgtatttttaccaaccgaatataaatgtcgggttgcaaatatataattgtaactcgtccaatgaaaaaataaaaaaaaagtgtaacccacctaatgatttttgtcggtttggt

SEQ ID NO: 380539 - DNA, 2541 bp, Cannabis indica
ttgggcctcttttggaccacaaggtcctgtaggaattgtaaggcccgtgggttcccaagcccacgacaattacaactgaggacactcataatctttggtgggcctgagaaccagaacccaccatagacccgttttttgatccagcaagatcattattaattacttccaactcatcttcctccattacttcctttccatcatcatctgtccttctccgcttgcaatctattaaaatcatagattttgattggaaattatcttcaattcgcaccttttgaacactgattgcagtaattccttgatcagtggcattttccttatttattatcgtcccttgattcctgctattcagtacaaagtcagcccccgaatcaatgtttatcccattcaatccctgatttctcgtggaggtaatgacagggtcattaattgcattcgcaccatcatcagaaaattgtgcatcagcagccgtgcccgtccgaagccaccttgctctgatcaacttgttcttcctctgaggttctgctttcatccatattccatatggtttttcaatcaattccaggggtgtttcatagagtcgagagcaaaatctctcagaatgaccaataatgccacagatgaaacaaaatgtgggaatgaattcatatttaaaattagtccacagccaatcgccatcctctttcttcagcttcattcttcttttcagtggtttctctacattgatactaactctaacccgcaaataattcctccatacgccattaaagttctttggatccgacttaacataggtcccgatatagttggcaaccctctgaactaccgaatcaaacataaaaccaggtctaagattgtgcagttgaacccatatatccagtcgacatagcttcactaacatggggtcttcacccttcttcaatctttcaaagaccaattggaacttgttaaaggtccaaggacttccctctattaccctctgtatatcggcttcatgataaaattggaatagatacaaatttgtttgaagttcctttacaaacataccttttccaggttgccataaggaggccaacgtgtgttgcatagacagggaatcaatgactctgcttgttaaaaactttcccaccaaacaccatctttcatcaattgactgccccacatcttcgaccaagtcacataacagggccccttcttcctcttcttctagttgaatcttcgaataacactcttccaaatcagataccacagtactgctagaagccatgaccatgtacagaacccaaaacactcactttccaaacaagactgacaacaatctgagaatcaaaattcactcacactcacaaacatatttcattcacaacatactcatgtcatagcacaagacttttttaatgaacttttatttttggttttgagttatttatatttaaatttgtagtattttagtgcattttgtctacttgtattttagtgtattttcaaaatagaagaaagagagaagttttttcatattttctttagtatttggagtactttagtttctcaagctttaaactaatttattttcttcctgatatatattattttttttatttgtgaaggttattgaaaaggcatcacaatcaccattcacaaaatattattggcaagtattcaataattaaattatagttaattaggatttttgccttataaactttgacatgtaccaaatcacttcttttgaatttttctggtcgttaaaaattctctttgaactattgagattgttggatttaaggacttttgtccaaattcatttaattttaccaattcaatgattgtttattcactaaatcatgctctccatactttgatatccatcaaatcttgctcctcaaactttgatatgtactaaatcatactccctgaactttcatccatgttagacttttcttattaaaattgtatcaagtctttattaaatccaacaatttcaataatttaaggagaatttttaacggtctttgaagttcagggaacatgatttggtacattcaaagtttgggaaaggtcgacaaaaatcttaattaaccttaaattattgaatatcattattaatttacacataattttgttaaaattcaaaaattattcatgttaaggaaataagagaattattaaagatacatcactaaactctaattatttgtatatacttcatgtgtgtatatatatgtgacaaataataattattactgaaaatggacataatacgtagcatttatttatttataattgaatattgtaatcttaattaattcaagaaaaaaaatttaggaccaataattaaattagggtgggacgaagtggactctaatagtaattcttgtggatgagaatgtactaattaattgccagagcattcttattaggcaacagtggtgcctagcactttgtcgatatgtcgcgcgcgttgcgattggctagcgatactccctaatgttgatcaaaagtcattcactcatttattttgatgataaacaaatatttgat

SEQ ID NO: 380540 - DNA, 2494 bp, Cannabis indica
tttttttttaatttcaagtgaaggtgtagagattcacctggccagttgctagaggaaacatgtttggaaacattccagggatagctggaggagtcccaggaatctgacctgcaaataaaattacagaacaaatcagtctccgaaaaccatcatgatttgacatcagctcataggatggtacagtaaaataacaccttccacttttaattccatacaaattcattaagcatgtcataacctcaagagtacattttatcaaaggagatgaaaggaatttgtatacaaattctggaataaatatttgtaagactaccaaaaaaggaatagtggccggttgaagacgaacaagatccatcaaaccggtgcattgattcctccttgtacattaaagctacagtagtcggctcacacccattgtcagcacattggggctagtagcccaacattgccttcttacaacaaaagacaagacacaaacaaacaaacaaacaccaaacacaagaaaaaaaaccaaagagatctctcagtcccgaattatttcaccaagtaaacaataaaaaacttatagcccatccagagaacacttcttttataaagctatatgcacaaaataagaaacaaaatatatcttaccaaaataacaccatgaaatttgatacgaactttccacactattccaacaaagaaaaaaagcagttaagagaatacaaaatgctaaagtgatgttgataaaatatacctgtagcagctactgcagtagctaacattgcagaagcaggaggtgccatatcaaaaccgctaatccttttgctgcaagtattgaatgttagggaaccaaaccataaccaatatattgaattctgtattaaaaaaaataacaatacagactatatcacctatttgaattgttcatattctcactatcaagtgtgtattacagactctataaatcagacaattcagacaaggacgttcaacaatcaacaaccaatgtaaataatatgtatatatatatatataaatatattatgaaaggctctagtgtagtacctttttgagcgtgaacgagaacgcgaccttgacctagatctgtgctcagacctacccattgagcgtgaactagatcgaaccttgtgcctatcttccctatctttgtcataatccctccgtctatgggaaattaaacaagatcaatacatcaagaagtataaaagatctaaatacaagaaactaaaatagattaaaattttgataaatgttcattagactaacagtatcacctatcataatctcgactgcggtaataatcatcatcgtcatcatccctatctctgccacgtgaccttctctcaccacgatccctgtggcgatctctatgatgtcgatcacgatctctgtctctatctctatccctatcacggtcccttcctctatctttgtcccggtctcggtctctttccctatccctatccctgtctttctccttgcttctccctctatccctatccctatctctatccctatccctttcgcgatccctgtctttctctttttcacgccctttatccctttccttttctctactcttcgaagactcccgctcataatctcgcgtaccatgctgcaaaagatatgttagtaattatcaattacaataaagaaactgacagtgacatttgaattacaagcaagaacataaaaattttggaccatgaaataatcatatgataaataaccacatagaactgtaagtaacattcatacagcaattttctacagattacaaaatgtacaagtctagaacaagtgccaacaaaaccacaccactaaagaacactctaaatccaactagagcactacaatcatcacaacttttactccctaaatagacacaaaagaaaccttcaaaatcagagctatgacttattctctcatctcatacagcttccacaaaaaacctagaactcaaatccaaaataaagccgaatataagtttatatcgcaaaaaaaaaaaaaaatctaaagggaaaaaagaagcagtgttgtatgaacgtagttcaacctgagatttagagtcgatataatcctcggggactccatgactgctaccacgaggctgtggagatgaaccatcgccaccgtagctgtccatgtcgtctccattaccgtcatatctagcttcgtaatccgccattatcaagaatttccgtcaagattttgcgccgtttttgtgtactagttcagtttggttcataagaaaatttgtttgagaaggaagaagaagaaaaagaagaaggtgaatgaaggttgattctagggcttacgatttgggtgttcaaatcttttttatatgattggaccacatgggcagccaaggagtgacattgtaatattggaataatattttattgacttaaaataataataataataataatattttattttaaatttaaaaaataaataaagtactaatttttttttagtgtatttt

SEQ ID NO: 380541 - DNA, 3297 bp, Cannabis indica
atccgatccaaaacatactaggtttaaaatactggataaattcaaattaaaccaatagagatacatgaaatacatttaatggacagaacaaatccaatccaacattcaatggatgttggattaattggatgattgaaattaattggatcggatcggatggtaaaatttaacatccaatatattaaatcgggtctggataggtctaaaacattggatttgatccaatgaacaccccttagtgaatttgttggattctgatgatcatattgcaatttttcttttccaagaataaagaaaactttagaggtatttgctaactctattgtaagttattttctcgaatttttgtggctgtgttgtgaatattctgcaacaaaataatcatctcgaaattatgacctggcattctgcttttaattttgacatgctgtataaataaccgttgtaatgcatttgagcatttgatgatgtgatatgatgaggagtcgcttacctgttttatattgaacagatacattgcagagggtgggcttactggtgagcgcaaacgatgggtgcctcggagaggaaaaactcctttggatcccgatgcagctggatttatatattcaaaccccatggaagcgtcattcaagcaaagatgtcttgaagatatgaaagtttatcatagaaagcttttgagagctttacggaatgaaggacctgcagctcttggtcatgtatctgaatcagattattttagagtacaggaaaggttaaggaaaattataaagggtcccgagcagaatgtcttaaagccaaaagctgctagtaagatggtagtgtctgaactaaaggaagagctagaagcacaaggtctgccaactgatggtactagaaacgttctttaccagcgtgtccaaaaagcaaggagaataaaccgctctcgtggtcggccactttgggttcctcctgtggaggaggaggaagaagaggtagatcattcattattttttccatttttgttttcttctgtttccttattatatcatacaatttttttagacatggccactggcttattgggggtgttttcaaatttggggatggctttctaggtgatttttttgacatgccaatcttttgttgggtaacttgtgagtagcaatgctaattttttttttttggcttgcaccgtatgtttcatatttaattggcagttacattcaaatctaatttatcttgaaggttgatgaagagctggatgaactaatctcacgaattaagctgcatgaaggcgatacagagttttggaagcgccggttccttggagaaggtcttaatggtgataatggaaattccgtaaacacgggtaaatcagatattgaaattgtgttggatgaagttgacgctgtggaagataccataaatgagttagaagatgatgaggctgatgctgatgatgaggctgatgctgatgctgatgctgatgatgaggacgacgaggaagatgaggaagaggaggaggaggtagaaggagccgacgcagtagaacaaactgagggccaagatgcagaaagagttaaggaaaagcgagttgaagccaagaaacctcttcaaatgattggggtgcagttgttgaaggattctgatctaacaacaacatctaaaaagtcaaggagaagagcctctcgatttgccgatgtatggaaattagtggtttttcagattattatcccattatcttaacttgtcatagttgaacataggctccgtccaattctacttgcttttctcatgctacataagaaagtttcttgtccaaaaataattgcataagaaagcctagatgttaacattttagttatgtatggttatttattgaagagtttggcatgttatctatctaactcttggggtaaattttaacatcttccaatatatgtctcgtttacaaatggatgcaggatgacgatgatgatgactggtttcccgaagatgtatatgaggcatttaaggaattgaggaataggaaggtgtttgatgtagatgatatgtatacaatagcagatgtttggggatggacatgggagaaagaactgaagaaaatacctcctcggagatggtcacaggaatgggaagttgagttggcaattaaaattatgctgaaggtaagtttctaacatgctgtgctccctgcattctttactatttattcttgtatgtaacttagtataaaaatttgatatatgagaactcaagaagatatgccctactttttttgattggatgaatttgtgggacttccaagactccactgatgattctaactaaatataagttctgatatatatatatatttatatatatatatatatattgtctgagattaaaaaatggcgcgtattgcaggttatagaattgggtggaacacccaccattggggattgtgccatgatcttgcgtgcagctataaaggctcctatgccttcagctttcttgacgattttgcagacaacacacagtctaggctatgtatttggggggtaaggctgccttttaattgtatttcaaatgtatcaaacttggatgcatattgtagcaatttcattcctcgtagatttctatgttatccaacacaattctcaccatggattgatatattgaagatattgtactctcatatgctgctgcagtcccctgtacgatgaaatcatttgcctctgtgttgatcttggagagctggatgcagccattgctatagttgcagatttggagactactggaataacagtaccagatgagaccttggacagggtgatttctgcaagacagaacgaaaattcttctaataatgattcaccctcaagttgatttggtttttcctttgtcttcttttttttgcttggttagtctgattccaaagtcaaatatgtattttcctttcgaaattttctgtagtgcaggtgtaaattatcaggaaatagcaatataaacttattattattactatagaagcctgtaaaagccaaagaggaagagcacatcactttttgttagtattggttagttatttggttccatttaattttaaatgggttctagtaaaaataactcttcaattcttcatttattattattattattattatttggaaagtacggtgttgccccaccctgtttgtgagatttaaagccttgaagatgaatgaactggcattctaaagcaccttgatgaattctattagacattgtgaaggagattagttagttatggttgttattttctgtttcttgattagttacaggtgttagtta

SEQ ID NO: 380542 - DNA, 4149 bp, Cannabis indica
tatttgccactgttgtctgtttggaggcattggattttctggttgacttctccttccgctatttccatgaactctttaaattttgaaaaagtttcggacttctctttcataaaggaaacccatacgtaccttgagaagttgtcgatgaatgtaaccatgtattgcatgtccctgatttgatggttgcttggctacaccctaacacattcagaatggtaccagttttcaatggtgactttcgcttttgaactttgaatcttcataggataattgatgcgccttaatattgtattggcagccagcatatatggtctctgttctgacctcgagtttaggaagaccattcagcatagtcttcttaatcatcaccttgagtttatgatagctgacatgtccttatcttgcatgccacaaatctattgtttcatttttttcgagtcttgcctacataagctgattctgctaacattacatagacagactctaaatgtcgtccttccatcatctgtgttccaaagatttcaagatcttgacatcttgaggaccaaaaataacatggtggcttgatgttgtaagttgcgccattgatagtttttcttcatcctagtacatggtagacatcctggagtgaaacttttattggattgaatctcagcgtgattgttattttactgatttgagcgatcggtaatcttgaattgttggttgtcaccgctatacgaccacttttgtactcgataacgttttgtagcttctcttcgtctcctcaatcatataatttgagcaattagagtcaacaattcaatcattattgtagtcgatcttgtagctgcacaagaactgttgaactcaattaatttcttataatatctcagaaaactattttcactacatttctatatcgtgggccgaatgccacttggacatttgtgcagctcagcaccgaaacatttatgtatttatatgtgtatatctcaaaccattgtaattataaggaataacgacttttgatgaacttgatatgtttcacatagtttccaactggaaacactttattcctatataaattttacgaacactttgatcccattgattcactttattgagagatagatctagctatttttgtgacaatctaactcaaatctccttaggagttcaacagttttcatctcatgtcatgtttttatcatatggttattggttgctattattttttaaattaattattagttttaaagtgattatacgaatcctatgcctgccaggttaaattatttttttttttgaaagaaaatattttataacttttgttcagcaagtttcatctttaataatttatatatacactacaaaaaattactacttttagtgaaaattttttagtcacaatataattttttttgtgactaaatgggactccttttagtcacaacacaatgttacttgtgactaaaacatagtctttagatacaagttgtcactaatttaattttagtcacaacaagtattatgattaaaaatacgtttagtcacaacaaattctaatttttgagactaatactttttgccacggaccttttaatcacaacataagaacaataatttataattagtcacaactttttcacttttaatcacaagttttgttgtgactaaaagtaaattttttttgtagtgatagataatgttacaatatctcaatacgttaacattgttacactctttctctaattaatcattggtttttattagaagccatccttagtacctataatatgctattctacattcaatattattcttaagactcttaagaatacatcaccaaatacaagaatatgatcctataaatgaaacgtaggaacgggaattagaataagaataaaattgaataaaaattgatatacatgagaaaaattgataaaaagatttactagttttttattttatatttgaattatttatttttcattttaaaataaaatagtcactagaatggtgggaaatctattccattaaaattaatttagtacatttataatacaattaaacaaaaaaatatcatgaaagttgattcttttttttacattctgttcaattttattgcgctgaaccaaaaccaattagtctaaactttaattctgccatcatctgtatcctaataaaaaccccaatgtcatatatagcatacatatcgagagacgaaacaattctgatttttcatctttaaacttggtggaatttaattctgtttttatgtatttatgtagacaatttctatacggtacgtcttaagttgctttgcccagtaagaattacatctatatatataaattaaattaagtactgatcacaactttttgtttataatatgttttagtatgcagaatattatcgaacgataccataaacatgcaaaaattcaagagcaaaccaataaaatggaagtcgagcaacacacgcaggtaagaaactccattatgcatcttgatgatatacagtgttattccaatatgaaaagaaaattagttaaccctgaacttcatttatacaattttacatttttactagtttatataactaatttgaagatttttttatccttctaattaattgaggttggcattcatttattccaatgtgaaaagaatgttagttaatcctaaaattccttcattcaattttgccttcaattaattttactaattttgttatagtggtttgatatttatgattatttttggtgcatacgtctcaacactattgcttttggcgtttacatgaattttgttgagctttattgatgattctcaatgtgttcaggcttatatatattatcccatatttttttaaattttctcaaaattaagagtttatgggaaaataaatgagtatttaaatgcaaacccctatgaattggtctataggcaacattattctcttctttgtattttcattatctatgtatggtaattcactaccaaaaataactacctttagtgatcatttttaagtcacaacaaaaattttttgtaattaaatgtgatttttagtcataataaaaaattacttgtgactaaaacataatatttagatacaagttgtcactacttaatttatgttacaacaaagtattgtgactaaaaatatattttgtcacaacaaattttaatttttgtgactaatacttttagctacggatctttaagccataatatatgactgatgatttaaaattagtcacaactattttactttagtgacaaattttattgtgactaaaaataagattttttgtagtgattagattatataaatatgcagaaattatttacgttaagatttgagattgtgaaagagaaaattagacctttttttttaatcaatggcattagactagtccatcttaccgaacaactttatccatgtagagaccaagatgagctttaagaactctagaaaacaacttataaacagagacacaagcgtaaaatgttataactcttgaaaatatttttttgattaaggggaggtgccaaggcacccaaaaattttattgttgttgctagagtttttagagtatacctacatttactaaagtttctagtattttattgtatagcttgtttgagtactttttgaatttcctataattctccttcacttgtgttagtaatgggaattatgtagaaaaatatagaagcgagtcattttgtaccaagtcaaaaatctcactaatcagtggcggaaccagcccttagtcttaggaggggcctaagtatgttgattttttttagcataaggataaagattttttgttcttttttagcacaaatatgaagaatttagtacattgagagcatagggtaaatttatagtataccccttaaggggttgtatttgttttagcattcaggacaacttttagtcaaatatttttccataattgcgtacattacaactatataggatcacttataaatttttagaaaatttcgaatagtatatagtgtaaaaaataaggtttaaatatttagttgaacacacgactgttttttcttatacgtgtggtaaataactgtttgagctttattttggtactgtaaactatttaaattttttttgaaaattttatatatggtccta

SEQ ID NO: 380543 - DNA, 4856 bp, Cannabis indica
cccagagacgtgcaaataaccactaatggcggtgagtttggatgatatcaagccctaatttgaagaagaagatggttgtagtattcaatatcgtgttctagaattgcttaactcatagtcgatatctcctctataagctctaaagaaatttgggtaaaagtggtcaacagtggcgttacaaagtagttatacctagaagttgtatccacgtgaagctcaaatcaatggtctatatttactgtccaaaaaaacaaagtcgatgcaatgattcagaaggccatcagttaagcattaaatgcaatatctgggaccaagataaatcgcatgatgatattctcttcaagactcgcacaaaaataaatagccaccacttcatttattttgcttcaagcgcctcctcgacgaacaggtactccatgaactaatgatgcatccacacatatcgccttaaattcaaaaaatggaaagttatcttgcatctatagaaagtatatggaattcctaaaggttttacctttagcctccacctgtccatccatgcagtccgaaaataagcctccgtaacccacaacattctagaagcttgggggtaaatgttatttgtgtttttagcagaggacatgtggaatctaaatagaaaacccaatccaaatattcaaagcccaacaatgggcccaacaatgtcactggactgaatccataagtcatcagtttttctagataaataattatcaactcgtctaggaaagtccccatccagcatggtcaacatccgaaagacatataatcgcatagctgaaagaagtctgcaacgtatatgcgaaagcccagtgtagttacccatttcttaccaaatgtataagaccaggaacaatcttctcagaatattggacaaagatcatatcttattaaataaggaaaccaaataattacaaaatcaggtaattaatacgccattagttacccacaaagataggacacaattttgacaattaatatcgtgatatggcattcaagtcagcaaacacaaggtgccccatgggtcaggcttcatcagataagcccaaagtcaatgtattatttgtaaactcctcattagaagaaaaagggtaactagtatgacctctatgcactataaatactcaataaaccctacatgcaaagggttggaaaatcctttgcatgtaaaattattttatttcctttgagttgtatttctttaactcatacatttaaattatcgtttttagaaaatctcgctaagtaagaataaaaccatgtcttttccttttcatggttttagaataaaaccctatcatgcaccatcataccccatcttacaggctccttcaattatgcaaattttaataaaaccaagtcttataaagatgaccctattagatcaccatcgtaccatattaggtataacataaaatttattaaaaaaaaacacattaaaagcttttataatgggtttataccccatcaggcacagtcgtaccatatcatatgaacattaaaattatctaaaacaggaaaagatagagtcatatcaaactctatcgtacaccatcgagctactttaaataagttatagatggagtgttggaaaaggaaaaaaaaacaaaaaaaagtagccaattctagcacataacaattgtagtagttcaactagaatatagacaaaaaatctttaatttcggtacttgcaagacactttgttgtgccctttaccaccacactttctacaattacaatatttcacaatcttttctcccgctgaagaaaattgattttgccaaattcttctaactttttgcttcattggtcggcctatagctttaatttcaactggtactccaacttggatgttcttaatgtctttaggcaattcccaatcattcacgtcaccaactgccataattgactcctcatatgtgttgtttcaacactctctaatgtaatattaagaggacaatgtgtacatgctaatatttttatcttgagctgtagcacaaacataatgacagtggatcttaatgatttggaataggtcgtaaatacatgtttgttcctgcaagtccactataccaccgctgtcaactgatcctccatggtgaacattgaatgtataaggtcaagatgtgtgtcgacgtttaaaaaactagatatctaaaattagagtgccaagtccccgtccataattggtgtgatagagttgtggtacacttttaagtaagttcctttcaactagcaaactacgtttgaataatgagcctgatgaattctataaaagcaatgattgggaaggctcttacgcccttagtcgtgctattgaagctttcattctagttgcttgtcattatgttgtaatggaaacatccattgcttttatcttctcaaattctctttaaaattttgtgttcttaaatgagtacacacaagcataaatatgatccttaaagttgttagtcttgaacttgccaacatcatttataataatgtgatggtagcatgcactgtaggattcatcagggaacacaagagcatgaataatgatttgatgcctatctaatacgaaggctaagttttcaacatcaacaattgcttcttttaacttgctcatgaaataggtcaaagagtcgtgattctcactttcaactatcgcgaaagcaatcagaaaatatgtggttatttgcatctaatgtcattgcacacaacatttgcccaccatacctaatcttcgagaaggatccatcattacatataataggttgacaaaacctaaatccctgcctacaaggactcaaaaaaaaaaagcaatacttgaagcgaccgtcatctagaacaaaattcgtaatagaacttggattcttcacttgtagcacgtgcaagtaaccaggtaactttggatatgaagcttcatgcgtacccctactatgtgcagggccttttctctgcacctccaagctttctcataactcattcgaatcctgtaatctttcttcatatcttcccttattttggtggccacataattcgtgccacaaactaagaatttatccttagtaaggtggatacctatgtgcagggcatttacgctacatggatacctattggtaaaacactaacactaagacccacctctacatttgtttctagaaatataatttctaacctcactacgagtatcattaacagtacttgatggaggactaagatccacaataacattcttcttcaccaaagtcacaaatagaggtacaaattcatctggcttcttcaaagtattgatagatataaacttacactcttatcattcattagaagtttgtgccaatatattaaccatttcatatagttgtaattcacttctaatttcaagtcatattgtgctttgttgacctccaactttgagtataaaagctcaaccaaatgtgagtatgagtaagttatgtcgtccaacttgaatgttatattttctattccattaaaaacttaatctctaccctcacgcttccaaacaccattatacatcaagtaggcgaacatagttgaccctgtaatgtgcaaagaaaaaataattaaaaaaactatgaaaggcaaaaataattgttgaatataaagaatatatgaccaatatctgacactattgggcataattgagcaacaacaatcgagctagtatcaggtaaccatcaggcaatatcatacttttagggtgtataagttcaaagaacaactatcaagcatgaatcaagcactatcgggccatcatcgttcttaagtcaagggttaatttcatccataaccatcgtgctagtatcaggcaactatcatacacctatcaaaacttcatccttaaccttcatacactagaacccatggagcccttatcgtactaccatcaaatactattatacaatttttaaaagaaatccaaaaaacgtagatttttacctaaactcgattttcaccaaaaaaatttagcaaaaaataccaacaaccctcatatcaaacatctaaacaacattcttaatcatcacaagaaccaataactacaagagtcaaagaaagtctcttacccatttattttcttcaccatggacaaaaatgtgaaaaaacttagtgtttctcctccaattttctacaatgtaccactgatatagtatactttaaccgaatgtgtatcttcttacaagattttactacaaaaatttttcacaatgtattatgtcataagagagaatgagagaaaatgtatggtgaagatagaaagagaaagagaatgacgaagtgaaaagagtggttttttgtagggtcggaaaaataagtaagacatgataacacgactcgaaatctgcacaaaagttagcgggtttatgtttaccttaaatgggtcgtgtttggattgactcgtctaacccgtttaataaacagatcgtgttcgagttgacacgagtaacacgaaactaacctgttaatcacctatcgaaagttattttagtaatttaacaagtcataaatgagtcataagtgtgttgaatatgtcataaacccattaaacatgtcattaatatattaataggttgacatgtttaaacaaaatctatttataaatgagttacacgggtggtgtcgggtcaacctgtttataaacggattgtgtttgattttcattttttgatacgattatcaaacgggtcgtgttcagatcaaacatatacttgtaatacatgagtctcgacacgacacgatacgaatacgaccagggccggccctgagggtaggcgggctaggcgtgcgcctcgagcccccaaacgctcagggccccgaaattgtaaaaacaaaaaaaa

SEQ ID NO: 380544 - DNA, 3433 bp, Cannabis indica
aaattagtactcttgtgaatgttaaatttgtctgaattaaaagaccaaccaattaacactactaactaatactatttacttgtccttttgtttttacagatcctaataaatggaacaacatagtgaagaagattatggaaattgacaatagttggaacaacacagctgggaaatatattgagctgtatagctcagtcaaagcaaatgttaactaatactaaaaacacaacaaaggccttcaatttcaactctcattttggctatactttctcagaatatgatcatcatcttggtcatttagagtatggtacctgcaaaaatgtattaggctattgtgtacatataataataataataataagattttgaaatttctttagacattttgaatttctttattgatttgccctttctcccataataactttacaaaaccttgctcgccggaccgaagaaaaccagcaaagaattcgacagacacttactactttaggtattaggcatcagcatagtatacatagttcactctctccccacccccattcgactacttcagcgaaaagcctaaaaaccgactactttaagaaacgaaaaatttaaagaagaaaaatgaaaacgaaaaataaaagacgagtatgtaagaaagatatcaaacaccctccctctccttgaggagcaggacccggcgtaatacctaactgcaccgaaccacacaagagatgcccaaaataccacccctaatgtggtcagcaaatgaaatgaagaaaaatgaaaacaaaggtaagagaagtccactaggtcaaagcaaaggaccccgaaggatatggtgtctaaaacgcagctcgaagctagcttacttaacagttgcttccttgtcaatggattcattaccacccgaactagatcccactacttctttgtcactctcctcctttcccaaaccttgggataaggattctgaaacatcttttcttgtactagcaccaccaacttcggatgctagtgcctggttgctactctctttcagattcagcgcttgagaaaaagtagttgacacgtcatgaacaacgctatcagtcaatgaatcagtaccgtctgaagttgagcaagcttggtgtctggccttcctatccctcgagagtttttcccgatcatcataaaagtaaaaatcgtctaggatagatgttcgtgcatcgtgatccttgaaaattttcaacatctcaataccctgtataaatcctacctggttttttttagcaacaagaaataattgtaagaaaccttgccaagccatacaaacccaaaataaatgcataaaagccaatataaattaattaatctcaaattcatgcacacatggaagacaatgaaataacatgtaatcgttacctcttgagaatcgcgactgtgagtaacaggcttgttatcattgttctcaagtagaatatggcggaatcgaatgttgggaacatccttaacaatatgccattgaaccgggaattgtccactccatctgtcttgctgccagtaatctgcatccttatcaaaatcaacaggtccaaccatttctgctactccgcagaactgcccacttgcgttaacctatcaaaacaatatttacaagaaaattaataacgtgttatgcaccaccaaaaatattgaaaatgccttccccaacgagaaaaagtttcttatttaagtcctgttgtatcatatcatgtagcatactagcaagaacatacttttcaataaagcaaatagaaggctaaaactaatcccagtatacaaaattgaatccttttaattcatgcagttgtatgaaatggggtagttcaaatcaactaaaattttatctaattagcggaaaccaagtgtgtgttctgtgtatttccaaaatgtaaatgcatttggtgatgagttcagttcttaagagaattttccttcaaaagccactagcaagggagattaactttgagctgtcaaacataccgaaaaaaaaaggaagactgggcagcgtgaatttttctcctttgcctcatgataagcaacatcgagtttcttgtttccatggggggtactagcccaaacattgtatttaatactcttgtgaacattgtcttcactgaaagacttgatgataaagaattttgcattctcataatcggtgacaaaatccaaccggttgtatgaatcaagaagaattccagaaacagataagttgtttttggtagcaccagatgaagaaccttgttcagtggcactctttcccttctgctttgatgcccttggcccccgattacgatcattaaagatgtcacgggaatcaatagaaacactacttgagtcttggtctctctctcttcttctgcctttgtcaacaggtaattgattcagaccattaggaaccgagtaaggaaacgaagcaccaccatagccagagctctgatatgaactaccatgatgataatgagaaccaggcgccaaaccatatccatgagttggtctctgttggggagaaagctgaaaaaaagaccctgtctcgtaagcaaaaatatttatataaatatatttataaggcttatccatcaccatattcataatggcaataacaaataaggctaagatactagttttagtcctaagtacagtataatttttcacagctaaacatagttcaaggaactaatcccttgggttttacatggagggtgaaggcctaaagaatggagtgaaaagacttaatagacaaaataatgagatgctatattacctaagaggagcaataacattcttttgcccaaattcaaaagatgcacaatgactctttttcgctggtctatatatgacttaagaacaatctacttatcattttcgttctttttgccatccccaagttcaaaacttttcattttttcgtgataaaattttctattcagtaattttgtgtcatccaaagacctattcaaattccaataaaattgatgaaaacaaacctgcccaaaattgttctcgtatgacccaagaatgcccattggttggggataaactgttggcgatgtcactggactattatgaatattaccagaaaggtttcctccgcctaacgaaccaaaattgactaggtaacctgatcctggcccaaaaaacatgttatcaatagtactactttctggtgtcatcaattcagttggtgaaacttgaagacccgaagtaatatgaggcagatttggcgctgtttggtgaaaataggatggagagaaaggaagctgctgcggagagaatagttgaccatctaccataagaggcataggtgtagcaactggagaatattgtccatatgctatttcaggattgaagccataaccagaatggaagacaagagaggaattatcattgtagacaacctattacacaataaagaagaaaaaaaaaa

SEQ ID NO: 380545 - DNA, 1757 bp, Cannabis indica
tgtgatcacaaaaaaacttttcaagctttttacaaaaaggtggagaatgctcgctgtttcaagactcgctagatgaagatgactctcggctagaggagaatcaggctataaatcaaggaggggagattctcctacctcaaatggatagaatcatgagttggaacatctaggggatcaataaacttagtaagcaataagaggttaagcatttaatctctaaaatataaaatgggtttggttgttcttctcgagacgagagtaaaagctcctaagttaggagctttatacttaaatatgtttcagggttggttttttgtggcaaataatgcttgacatctaggaggaaagataatagttagttgaaatccaatattgtttcatgtagatatcaaattttgttctaatcaactaattcatttagaggttaaggtcggtaaggagactttctaagtttgttttgtttatggtatgaacggtgaagaagataggaaaaggttatggcaagagctgatggacttggctcatggaattaaaactccttggttcatgttggggaattttgatgaagatttaagtgtgaatgaaaggataggtaaaagggtgaagtctcacagaataaagcattttcaaagttgtgtggaattttgtaaagttgacgacatcaaatttttgggtaatttctttacttggaataacaaacaagagaaagaggggaggtctattctaagattgataggatcaaggaaaacaagttgtggcttcaaaattttagtgtacctgaaatgattttcttatcggaagggagttttgatcacagtccgaggatcctaattgtgcatcttgatattagagtgggaagaatctattcaagtttttttttttttatgtggaataaggctccatattttttaagagaagatagctaagttgggagcttcctattggagggactacaatgtatcgtcttgtccaaaagctaaagagactgaagcttgttcttaaagatatcaataaggttcagttttatggtattcaacagcaaaatgacggtgatttttaagagataatagattgccaaaaagaactgcagaattctccattatgcagtgaactaattgaaaaagaactttaagctcataagaattaccaaatcattcataaagctttgctttcttttctccatcaaaaagttaaagtgaaatggctcaaagatggagatgaaagcactgctatctttcatgccttaatttgagctcgaagaactactaacaaaattcattcaattatggatatggcgggtaacgggaataaccagctagaggaagtgagtaaagcctttcttaattattattatgaattactgggcaccaatttggagagtagaagggcaatgatatctagtattattaaacagggtccgattatttcagattagcacaagcatattttaaagtcaaattttgttaggattttatgccctaaataaattcatttctatataatcaagtttactaattaataaaagatcaaaaatcattttatgttgcatggttcacatgatttctttcatgattatatgtttaatgtgtaagttctattaaatttagaacatatagttattcataattatagtgttgtctacacagtggaaaataatcatgattatatatttcaaagtttaagtctcatgatttgttagtacactagatttacactgacatgataatcaacgataaagtttacttacaccttggata

SEQ ID NO: 380546 - DNA, 1912 bp, Cannabis indica
ctctctctctctctctgactataataatacattacccaaaccaaaattatgctgcacttattacaactactaattcaaatccagataaaaaaaaaatataaaatacaattcttttcctttttatttactatattttgttattggagttggttgattcatatattttaaagtattatttttttttatttgtacagtaaatttagtataaattataaatacacgatactttactgtgaatactttaatggtcacctatacagccatttaaattggaactgaattcaattcgtaatccacactaaaactaatgcagcaattcaaattgcaactaaaattaaaaaacaaaaaacaattaaactaaaaaaaatgtgtaacttaccgtatattgggggtaattccccttttttcttttttatccctgctacaatgttcaaccaaagtcgaactcaatgctggccccttaattaaagttataagcattattaaaaaaaatacatattgtccaatttttctaagcaatgtttttgaatttataaatagtatttagttctaagttgtaactttatattgttaattttgtaattaaacttttattgtatttaaaaatttggtaatatttaatataattttgtgctagtagtatttagtttactgtctgacataacaattaacttgtcatcaaatcccctttataaaaaaaatattataatttacattaattgtaaatttctaaataaattagagtgattagttagttgctaattacattaaacttaatttaaatataattttcctaatttcgaaaattttaaaaggagaatgaatattatttgttatatatttttttaagttgtcatatcgtatatatatttataagagaatgtaattgccaaaattttaaaattggaccttaaaaaaaatatattaaaattggtgttcgttatttagattatttttgtaaaaaaatttaagagctaaataattagaaaaatttacatctcatactattttttttctattttatttcatttgtactattgtaaagtaattataattttttttttttaacaaaaaggatgaatattattcaaaagacaaacaagcacaaacaaaagccagctgcccaacacagccccccaaagagaaaactaccaactcttaatttcattttggatatacatatccccccttcaacttgttcatgcaaagactgagaaatctatatttgacaacatacttaatttccctgctaataaaaccagtagcattgcagtaacttttaaaacaacaacaattcctattttgccaaagaaaataatggcagcagctattacagcattcatcatcaaactatcttgcaaacaagtcattggtttctcacaccacaccttccactgctcagtaacactcggccagcaagcaaaactgatcccaggtgtttacttctaacatcacctttttggctaagcaacattcaaagaaaatgtgttggtttacaatatttacttgttttttttttttttaatttggagaagagcacacgtgaataccattaccaataaaatatagaataatcaataattttgtcccttgaactttcgacaatattaattttggctccaaaaatatacggcttgttaagaatcccctaaacaattacatttataaaaattttgtccttctgtgaggttctgtcatattattctgtttaattgatgatgtgtctttttcaattagcaactttgtcccctaaactttgataactatcaaatcgcatcccctcaaaataaaatgagaaagatttaacattttttttcaataaatcttaaaaaattaatttagatctaaagaaaaaattattttgaatgattaacaaaattaaaaatgaattaaaattttgaaactaattaag

SEQ ID NO: 380547 - DNA, 2259 bp, Cannabis indica
tttttttttacttttttgttacgataatactttctaatactgtttctttttctcatgttcttgttttacagcagaaacgttgcccagtggttggagtagctcagtttctttattgtaagtaagcatatatttggtctctgattttgatcatattattatctgtaattaatggtcttctttcttgcaggctgttgggcaggggatttggcagggactattattttatcgatttgcctccaaaagaactacagtattgaagttatgttaacatgtttttggtgatttttcatattgactagtgtaaacttataacagtttttatgatagatttttaggaggattaaaaaagtgacataattctgagatgttatcttgagctgcgggtaagtcaataaatgagaatgtgtatctaaatatgcctgattgaaatgccttttcttgtctattgtaatttgtatttatttttagttcctaattgtacccagtctttcctagtttacaatatatttgattaatgccctcaactttgaggactccactattgttaagacaacacgactaggccgcccttctttgatccgagctcattcactatggtgagatggtccaaatttgctacaattccttcaacttcaacccattctccaagtactgctccacctgcagatgcatcagttgcaactacttctgatgtctatccatggccacccgccgtgtctgcgaagtcattggctacaatggctgctctcttctttgtcacacaaggtattttatttgagtttgaagattttatttgaattgttttcaagggtttacttgttttaatacttgcttgtattgtttttccatagtaattgaattccctatcataatcatgttacttgtttttccaaagtaattgtagattaagaagttgttgtattttaaagaaaattgttataattaattcgttatataaaataaaaatatttttaatgtgggtgacttcaccaatgcttcggtgagttcaccaaagcttattttacacccttatgcatcatgtcatagtaaattaattcaaaaagcttaaccaagttcattttaggctctccagtgtcagaccacactattcatattcaggccgaacgcacacctgctctttccgtctctctctctctctctctctcaggtgtgtatgcattgctagtaatattattctactatcatcatcatcttgtgtacctaaacatagtttctggttttggtgtttatgaattgaatccagttcagtcataatctgattacgctacttgtacaaatatatgtatattttgtaggtttagttagttgacaatggcgggaatagctatggccttggatctgttgaggaaaaccccaacttcatacaatacacttcactcttgtgcgttcatttctgccacggctgctgcctctgctgccgctggaaccccttatgcctataaagctttatttgggtagtttttatctttcccaattttctctcttttccaatatgcagtgaatttaaatcttaatttgatcttgtttctatatgttaactcttatccaccatgtattggtttaatgttacttaacagtaatttggtttaatgttacttaacagtaatttcaggataccaattgttcaatgcgatgctgctggtgcattgggttctgatgattatgcaactagtttcaaatctgtatctgaaaaactctttcagaatgatgctcttaaatgcagtagtactaataaggagtacaaaattgagttaaagcctctgttttcggcttttaagtttaggcccatagcagtgattatcttgaggtcgtttttaatcttctattcacaattggagcctcgtacggatgatgatgatgaggatgaacagcctgtagactatgttgctgcccttaaaaaaacagtaatacatttctgtcgtgaggtaagttttgacttttcatagtttcgtttccagtttattataattcttttctgaaagatactgtttattgtttaaacaggatctgacttgtacttttcctcttgacacagactgctattgcctcaactagaccaattttggaaagagtggctgttcatcatgtttccaagcgaatgacatggaaacttctaaaaggtagtttcaactttcattcttatataataatttatagaattgatatgagaaactaatggtaatggatgtaatataacactactgacagatgttccaaaatcagccacacgcaaggcca

SEQ ID NO: 380548 - DNA, 2490 bp, Cannabis indica
atcctattgattcatcagcctttaagttttcaaacaactcctctctcttctcttctttttaaggctttggaatctacagcaaaggaagacaagttagaaccataaaattgaagaaaactatgcatttcttcagaaccatttgaatggataagcagcgacacaaatccaacaaagaacagttcttcaaattttagcactattcagaacttgtgagagtaccaattataattacaattaacattcaagaagtcgttcgaagttcaacatccacatcctgatgtatttaaatttaaaaacatacacaagaaccactcaaatacacaaaataaccaaccccccccccccccccaaccaatattttcaaaatttgttgcaaaatataatctttttgtatcgttgagtttggttgacaatagcaactattttgtaaattgtttaaaaatgtaggaagtcacattcgaaggggtctattttgcaaaggaaccagtttgagaaagcattaataatctcaaattcacacatgtttctctttcattactttgaaacatactccaaatagctatatactgagaaagctaacaactttcatctcagactagtatttcagaaatgttaaaatataaaatttattgttcaagttcattagcataatctaggaaaacaggcattaaagacccatcaaattccaaaagtaagcaccacaaaacataaccctcatattaattttaagataaacttagaagttggaatccaaacctgcaaactccaaagtggagagcgtcttctggtaggaacgagcacagtacaagcatccgtacaccatgggtcctgtaatatagcaaaaaagattccaaaagacaaaaatcagaaatcaaaggaaagatcttgatagaaacgaaggaagaagaagaagaggaagaccgagaactgggcctcgtcccgcttcatcgatgcccataatgcaaggctccgaagcccacttgggcagagccgcctccgatcccatttcacagtgatagcttccactcgtttcagttttcagtcacctcttttttgccactctatacttcccgccaccaccaagggatttttgtttctttgctaatttgtttttactgtgtgcaagtagaaacatccaatcagaatatgccacgtcatatatacgcactgagtgtacatgttattttttttagaaaggccaatcaaaatagtaaaacacctcagtcaaaacttccaacttccaaacgcattggacagaattttctttgagctttttgtgtaagaaatagtgactgtgaaagtgaaacaaaaattatttagtttataaaagagaaaagaaaaaaaaagatccaacaaaaattatacacggaaaggaaaatcaagtataaagagcatgtaatgaaaactcaaaaggatttttttttttaatgagaaatcttaattaaagaggcaaagagccaaacattaagccactaaggctagtttagtgatgagagaaggatgaaaaaaaaaaggtcataggttcgaactcgaaacctttaaactacaagctataaattgattgtaaaatagctatactcaaaaaaaatcaaactactacaatatgtcataatgtatacctcttcccataatatcaaaaaaaaaaaaagaacaaatctatccaaattctaaaatatatgtgaagaaaatcatatatttcaaagagagaatcttatggagcatatctcctataattcatcttcaatttttcctacttattagtacattcaattaatcaatttaatgatgttgcacgctattaaataatttgaataattgatgaagttttgaaggctgtttcttttttattttcctacttaagtagtagtttatataggtttggtgatgcccctagtccataatttatctagacaaaaacataataaattgaagttgttatgaagtctagaaagagttttgtgagtagttagaatggattaatctctaacttattttcttgccaatttactcaaaacattgtctaacacacacttgatgtgatgcttgactttacatgtctccatattttgacttttattcctaccaattatgagaagttatactatcatttgccaattatgatagtttgagttttttaatgcctatctctaattaaatacaaacaatttaaaaaagaagaagagtttgatgaaacgcatatgcggaaaataccgttagaataatattgatattatattaccttttttaaaacactattcagtatattatttttgtgaaccagtcataatctcattaattattaactaaaaatatgttaagatctgtatttagaatagtatcataagttgaatagaaaaagaaaacaatgtagcttcactcatcaaatgggctcattcaatgctatatgattaaaattcatacctcgataagtttcaataattgtaaccaaactagatgagaagaatgttagacttttatttgggcttacat

SEQ ID NO: 380549 - DNA, 1311 bp, Cannabis indica
ttttgtatattatatagtatacaatataaaaggagttacaaaaatactatgtactagtataaatataataatttaaaaaaaatatatattagacagtgcaaataccccttaattatatatacttggatacatataaagagacgagcaatccgaagtgggaaataaagttatattaatataagatatagttagttgcaattgttaaagagttatcttcaatgagaatcgagttgattgagatttgaagaaccaagttgtgttaaattaattataaatgatgagcacataactcaagtacttaatttcattattattattccaaggcctagcctctcacattttggtctcactatgacatgaaagaaatatttaataagtttgacccaaagttccaatgagataaacacgtgggttatgctctaatgtgattctcctcatatctcaaaatagaaacaaaattatattgttgcttcaaatgcatgttgaagaagagcagtgagcattattatatctccaaattaatcagaatgttttcttttggggttaatattttcataatctgacaaatgatcagagcattgtgatagattgtaaggatcttattcttaaatataataaagaacggacggagaagattaaaaaggttaaaagtaaagaaaataggacaatgaataaattttaactgcacgtgtggtaacttttgcagggtattggaaccatgatgcacgaatgtaaatcattagtgaaactacaataataagataatgtagtataaagcatcaacaaatcagcttggttgtagtggtagagatttagagtgagagaccaatcaattctttgaattacacaattattcttctctatctacacattatatatataaatattatatatatatatattaatgccttcattttgatgcataaaatatatgtaaaaataaatagaaaagggaataggtagtggtggtgtgagttaggtgagtgagtgttgaaggtgtgctttgtttactttggatgctctgaattattgacagtatcacagaacgatgacggagcgataattggacggtgctgctttgtcttaataaaattgccacgtggagataaaacaagtcagcagctagtagtattatcatattcaaaaaaaagaaaatatagtatagaagttatataataatactaatctcttcgaattgtgtggaatgaagtttggatctagttatagcttctcaattatagattcattaagaaacaaactcgttcggttatattttatttagtaataattaaattataaaattatatttaa

SEQ ID NO: 380550 - DNA, 987 bp, Cannabis indica
aaaaaaaaaaagagagaagaaaagcaaatggtaaaaagtaagaatatatgaaacaaaacacatatattatatttatgaatgattttaaattagataatgtaattacattgtaatagatttattgtccatttgattgaggtatgtgaattggacagaaggcataataggttagtgatatgactatttaaccagaagcattattctcttgtgtatagttaggaggaccacattattaaattatatgattagatatgaattgaatttatatttgataaaataaatatgtgtatagttatataaagagtattggaccacatgacttggctgacccttattccacatgcaaacagacacataaattgatacacaattttggggttaaaaaatggatgaagtggaaagatctcattcacaaaggagtaaaaggcaaaagtggtatttttctaaaatacgaaaaccgacatcactgccaatcaatttccaaataaaaaaatatatagacattttctcacatttggaggcctcatattttgctttcttagatattaagaacatgtgttacaaaagaaaagtataaaaattaatatatatttatataattcttccttgaattgtggaggaatttatccagatagtcacacattgcagttgtaagtaacctcaaagacaaaatgtgctgtagtagtagcatattatgaggcctttcttatacgaataatggtattcttaaatactaaatactgaatgcaaagaaggatagtatattataagagaaaggctaataacaccaccaaatatctagttgggtgagtatacttgaaaatttaatgttggggcaatatgctttatatgtaacaataataatattctatttattgattgttgttgaaaaatgtcacacaatatttttaaatcagttagtctctcttgtttctctcaatcctatccgtatatggctttttttttttcatattatattatgggttt

SEQ ID NO: 380551 - DNA, 4731 bp, Cannabis indica
cttcataatccaaaaaataacagtagttgctaaacttcagtgcttaagtgacaggtttcttgtccctacctcctttggatcggcgagcatgttgacatggctgcatcaatagcatcctgattttccagccttgatgctctggctgctagcaagataattgtgtctttgtccatattttggtgaaaaacctgaaaaatgtatatgtatgcaacattagcttttgaaatttctttatttagtagacataatgcatggtttaacatgtgtacctcaatgaggtttctatcaacagtgaggcggttcagggtaagagttccagttttatcgctgcagaggatatccatgcctgccatttcttcaattgctgtcatcctttttgtaatggcaccctaatcaaattagagataaaaccattacaacacttcacacttcatcattatggaaaactagtgaaatggaatctgcaggagacttatgccatggcattaatatcccatgtctgagtgacacaactgaaagttattctagttgtaaattacaacaaagatcaaagcagcagactatagttgtaaaggggtgaacctgttgagagagtctatgagaaccgatagcaagtgtcacagacaacactgtaggcatagctatgggtattcctccaattaagagaacaagaaggttgttgattccatctctgtaagagcggtgctgtatagggaacatgacaatgatttccagaatcattcctacagctatagaacaaatgcagaaatttccaatggaggtaaggacctgtagaagaggatgcagcaatgttacatgccttgtactcaggtttccatacatagataatttctagtttttcaaaatattattaatgacctgctgaaaatgtccaacaacttctgttgagtcaactaaatgtgctgcttttccaaagaaagagttaactccagttgctataacaacagcttcaatttctccatgcttgcaggttgaaccagaaaacacctcatcacctgttctcttagtgactggtagagactctccagtaagagctgactgtacacaacagtattagacattcttacattgtgataccaatcatcttaaactcatctaaagaaactacaaataagtccaattataaaaggaatatgctaggccttaaagggttactcaacaaaaggcaataaaatgcttgcctgatcaatttttaatgaatccccttctagcaggcgagcatcagctggaataatatctccaagctttataccaattatatctcctggtactaggattgctgcatctttctcttgccactggccatctctgagaacctacagtaaaaattgttaattgacctgattatgtaacaaagaattcgatattctcgtagactaaggaattcatcaaagaggaccctactcttgtttttggagctaaacgggccatgagggctgaagcagcatttccagcattattttcttctataaaacttattgtggagttgattattagtaggcagataatccctacaaaatcttgccaatctggaccttgcccctgaaatgtgaggattaagtatgtaaagaaaactatggaataaacagaaagtaaatgtcagcattaaatctactcactccaccattagcaagggcaattgccatcacagcagcagcttccatgacccatgataatggattccacataaaactaagaaatttcaatattttgttctcctgaaatgtaagtaatcaattgccttagaaaataagagacatgagtatcaatttacagaaccaatttcctttatagcatttcattttggtaattttggataaacttattttccttaataaactttttaacttgacattattggatgacttagagccaaattgctcactatgttaatccaatttttgactatgcctactttgtttcaaaaactgaaaaaagacattagtacatactggcttctcttcaagcatgttaggaccaaagattgtcaatcttgcttcagcatcattggatgagagtccttccggcgatgttcttagttgctcaaaaacttcttccaagggtaatcgttcctagtaagaacaaaatgcaccaacatttttttataggatatgcaattgaaaatgtagtcaaatagaattggaattattgaaaaagaaaaacttaccaaatcaactccttccctattaaaattatcgggatcaagcaacggcttctccaactcctcagccatgatttagtcttcaaatcctgcatttttcatgaaatgatgaaatgtttctcatgagcattagctaagtggtggttttgcaactcacatgtactagtgtctttaatcattaacacagctatatatgtacatatatattttaatttatactccacactagtcaagcacattcaatccaagcatgtattaaacccaacacaattcttaacaaacattaagctgtttgatgaggagtttaatgcgtatctttaacaccattattctcatgaagtaaataaatcaagacacaacaattgaaggacagtacaagtaactaaataattgaagcaacttactagtaaggcaagattttgaaaggtttatttacttcccaagaaatgaggagaagaattaccaattcctcctcttttccaaggatgaataaaaggaaattgaataagaacgaactataagaagggagtacacttctactgatatcatgctcaagatggtttggtagctgaccgttggttggcactattactagtgacgtagtattagtataaacctcataacgagaagagtggaaaacactccactgtacttagtacatgtctttattcgggtcgtgccattttcccactattaatttttaccttggctgagaattaattaattaaacgagatgaaaatagtacctatcaatatagtttaagagactcttcggcctaactacctttcaaaactgtacttctagttccaacctaacattcccttgcacttccaatatattatgactttggatcattatcttttatagtatcttgcttacgattttaattaatgtatataaaagataagtagctgaaacatttgccacacctttagaaaacctggagagtccgaacgttaccagatattattagtgcctaacacccttctaaacattattagtgcctaacacccttcttaagcatcaattatattatttgtttattatttataagtacaattaaatatcttgttgggaatatatagcaatgctcaaataatttaccatgattggaattgcctatttctcaaatgtaaaatgtataattaagtctttagataagacccacctaaacctaatcaagttaatagtctaacgtgtaatttatctagcattactatgttctaatagtcaagaaggaaatttacattacgaaagtgataatacggttattaaaggaagagaaatgctaagagaaaatagaaaaagtgagtttccttagcactcatcaaagctataaacccgaattaaaacaaaaataaagctcaaagtaagcagaaaacatcgagtgctaacgattttgcatcctctattactgtaaaagtaatctcttgtagtttgacagtaatatattaaaccatgaagatccaaactacaaaacaatcactagtagaggctgagcgtaaaaataaaatatataaagataatcctggcgcattaagaaaaatgtacaacaaaaaaagcaaataaaaatttcaaagaaatgcatataaagcctccaaacgaccatgtgccccccatatcaaccagatgctaacttagttgtagaccatgtacttaggtgtggcgctgaacttttgatatcccttaatgactttgttcacagcatcaaggaagtctttctctgttactgtcttccttcgtgctcgaatggcatacattccagcttccgtgcaaacactcctaatatcggctcctgtgaaagaaagactcaggtgtcaagacaagaaaaccgatgtttcaaaaccaaaatcatatcaaatctcaaatcagcactgacacccatgaccattagaatcagaataaccaacaaatagagaatgatagatggtctctctgtagaagaattggagaatatagaagcttcaaagcatcattcttaccagtagaatttgggcagagccgagccagaagttcaaatcggatatctctttcacagttcattgttcttgtatggattttgaatatttgtgttctgctctccagatcggggagaccaaactcaacttttctatccaatcgtccaggacgaagcaacgctggatctagtgtatcaggcctacacaagtaaccagtgagagttaactaaaagcagacaagcaacacatagagttacaaagcacgcaaagtgattctctaaatcccccatttcccataaaataaggataagatatgcaattcgtagcaaaaaaaaaaggttgagttatgcacctgtttgttgccataagaactttgatgtttccacgagcatcaaatccatcaagctgattcacaatctcaagcatagtacgttgaacctcattgtctccacccacaccatcatcaaaacgtgcacctccaatggcatcaacttcatcaaagaaaacaatgcatgccttctttgaacgtgccatctattgcaaacatcaaactagtaagacaaggctatacaaatgtaaaaaataaaaaa

SEQ ID NO: 380552 - DNA, 2654 bp, Cannabis indica
tttttgtaaataaacttgtgcttcaatagataaaacagaaagtacaaagcaaataagtttacaaaaaagataaaagaccattccaaaccaactcattatctaatcctagacctaacttagcaactttatgagccaacttattggactttctatgaacatagactatagttaggttaggactgaacgacaacaagttcttgacacaaattaaaatgtcatccagaaggctactattccaattacaagaaacaagcttatcaacaatagttttacaatcaattttgagaacatccaaaggaagataaatcaattgagcccattgtatggcttgaaggatagcctttgcttccgctacagcaggaggaacgcttccaagaaagggtttggaaaaccgtgatttaacctggtttaattcatccataacaacgacaccaatactatgtttcttgcaattgagatcaatggttgcatttgtgaaaatctgaagggtacccatggaaacagatttcaaagcattatttggtgcagtagcagaatgattaggttggtttcgaatctgctgcacatccaaatacttgaagaaaaagttaacactccaatcaaacacttcattaggaggaagagcatgatgtttatgaaaaatattattcctttgattccaaagagcccacaaaaagcaatataatatattaatataatctttatctaatacattagtaatacttagtaaaaattcattaatatcaaaatatttataattataataatgtgttgtaaatcttgaagatttctaagctttcctcgatctggagcagtctagcagagcgtgcctaatagtttcaggactcagcttgcaaagagtacatatgggagaatcaataacactcttcttaaaaagggaggaagctacagtaatagcattagacaacactctccaaacaaaatatttaacttttgagggtgttttagagttccaaatcttgttccaaaatttttttgaatcagaaaaggaagaggaagagggaatatcttgcttggaaagagctaaatgataggcaaattttacactaaaaatgctagaattttctctttcccaaataatctcatctttattatgaaaaccagtaacagggacttcaagaatatcattgatcaaaggctcttcaaaatgggttctaagtttagccaaatcccaagttcctaaatcatcaatgagataagaaagcagacatgaggtaggagcaccattagcattataagatttaagcttgttattgggaatccagtggtcctcctcagttctaatatgttccccatctccaatcttccaaataagacccgaagccatcagatctctctcccaaataatacttctccaagtaaaagaaggactgtgagcaggaacagcctcaaggatagatgagcggggaaaatacctagccttgaaaaccaaactaagaagggggttggggttcttaaaaattcgccaagcctgcttagctagcatagcttggttaaaatggattagggatcgaaaaccaagcccccccataaacttagattgacacacagatttccaggatttccaacgattttttttaaattcccagtagaaccccaccagaacctagccatcgcagctccaattcctttacacaacttgatgggcaacctgaaacaagccatcacataggcagggatggcctgaatcacagccttaagaagaacctccctaccaaccctagaaaaacacttagcagaccaattactaagaacaaaaataaatttatctttaaggaaagcaaaagagtgatacttagatctagaaatacactgggaaagacctaaatatttactaatgaaaggtctatcctctatgttaagagtagtaaagaaaaggtttctaacatcctgcaagatattaggagagaaaaggacaaaagatttagaaaaattaataacccgatccaatgctctagagtaaatgttaaaaatgtcttaaagtgcattacaagaactcctatcagcaaaacaaaatataagactatcatctgcaaaaaagatgtgagagatggagggagctcttctagagatagcaatccctttgagaagaccctcatcttgcctagccctaaaaagagaagacaatcctttcgcacaaaggataaagagataaggggataaatgattcccttgcctaagacccctagaaggtttgagagaacctttaactacaccattgattaaaaaagaaaaactagtggtataaatgcatttcataacaagattaacaaaactaataaggaaattaacgggatgaattcctctattaaggagaccaagatctcacaagaggagaagagagatcgcacacttgctagaaggctaaaaacaaaacactactgtcctaataaaattacttttcattaaaatttgaatggtcataatttgccattaatttgttatataggaaaatttgcggtaaaagtcctcaaaaacttagggttgatgcagattagtctccaacctaaaaaattggcagtaatatagtccccaaggtgacattttctgtaagtccgttgatcccttttctagcggatccgttaaacccaaataaagtgtcacgtgtcaattttttattggtccaaataata

SEQ ID NO: 380553 - DNA, 2186 bp, Cannabis indica
gtggccttaacaaagatgaagaccctcttgattcaacaggaacttgaaatgagaggaaaatctccgacaagaagtttgaagaaaagggtgataaggtttatagtgtcattatcatgagttttggtgacaaagtgttgagacaagtctccaaatagaatttagctgtgggtatggaaagatatcaaaggttgtatatgaccaaatcctaggtaaattatttatacctacaacaagctttatattcttctaagatgcaagaatgtaaacatgttgaatattagttagatatttttaataaactaattctttacttagaaaatatagatgttattatatatattaaagatctgaccttgcttttactatgctctttgccaagaatttatgctcattttaagtaaacattggtggatgaattaaatgttgaggtggagtctaatgataaacctttggatgatcaagctgataatgagctaaaaaaaattgaggaatgttgatgacagttatctactagctatagataaaataaaaagggcaaacaaaagcttcatattggtatgacaatattgatttaaggatgcacttaacattaaggaaaataataaattgctaaagtttgtggagaaagagaggatagaagtcattgcatggttgataaccatacatggactatgtttaagaagactatatgctcacaaggggtcaactgcaaatggatattcaaacgaaagagggtattacaggtatttgaaccagctagattcaagtaaagactttgagttcaaggtttcaattagatagaaaaggtggatttcagagatgttttttcataagtagttaagcacggaacaataagagttcttttgttcatggtaacaaaacttggcttcaatttgaaataattggatgcgaaaatttttttcttgtatgaaaagcttgatgaaactatttcgatggtacatttgaaggatttcagtaaaaggttaaagatggtgtaaatttgtgttaaatttgccttaaaaaatgagtcaaagttatatttggcctgaattttacaattgtacttcaatgcactagagtaaaatgaatttaatttttatggaaaaattacgactaaaagtgcagaatcaaaataactaatctttaaacaatctaacgattaacaaatacaaaatagtaatcagatgaaaaataaggatgaacaaagtatgaaaaaccataaaagaataaaataataaaatcaataccaaaatatactcattcaagatcgatagagggatgtgatcgatagatcgatgagtctactccggttctggaacacaaccaaattcctctttattgattgagcaagaacatgtaaaatacaatcgtaatatctattctctgaaggattctctcaaagtgtttcaactctcacactcttattcaagaatcttcttcatctacataagattcttcatacaaaactaaactcaatctctctcttttctttatacctctctctctacctctcaatctttttttctttctgtctctcaatctcaatctgaaccatgttctgaaagacaagtgtgggtggtatttatagccttaggatcaggatcctaaagtttgtggctgcaagatatgagattgttaagttagttagacaataactaacttaatcaatcctcatttgagcgagatctccacgttagcataagtcaaaaggcttccgggaacatatatgagcttccaggatcacggaccaaagacactcactaaggagcttacggataggatatagccagctgaagtcgactatctagaactacctttctaagatgaacaactagccatctgaaactccatcctggagaaaggctagcttttcctgaagacccttctcgaaatgataagagagccttttagaattgacttttgtgagtgaacaactttctaggattgacttttgtagaccttttcacttggaagaactataccacaattttaatagaagggatgatggtaacataagttaattattccactatttcactatgaatctttcttggtctcaaattgacaccaaagtattgttatattatttttaatataataatatgtagattaaaatgtggtaatatataatattatgtgaataatatatattaagtgtgtatggtaaataaatgtgtaacctataa

SEQ ID NO: 380554 - DNA, 2735 bp, Cannabis indica
ttatcaccatgattataagagggcccaataaggtttttacaaaacccaatttgtggtagaaataggaacaaacaaccggcaaggtatcatatggttgaatgttactatgtgaacatgtctaaggtgaggccaaccgaagcacatgattgtaggaagagcaactaagtaatttctacactcgtcccctccctttgttaccactacaacaagcccatcaacaaacattgggccatcaaatactatttattattattttttatttatttatgataatggagagggaaggtaaccttacattttagattcaatacacaacttggcccatatgtagtgcaaggggacgattagtacttgaacatgatgcaacccttcaatcaagcttattgtatttttgtgtatatatgctttcaaatttttagacatagaataaatatctgtactcatttcttgatggtgagctttgtacttgtacgtatgtcagtagaaaaatactttgattgaaacaatatttttgatgaatttgattgaaacaatatactatgctattttcttgctcatttgaattttccttctattttcatataaaaaagaatatagataaaagttgcaggttattacgaattagtgggttttttttttattatattttataatatagcttcaaacatggaaattaaactctcacctgaatttatgagctcattaattaccaagtcctacgtccgttccctccatgcatatgagcttatccatacattactagttgcaaattgcaatcaaaaaataataagtctaagttttttttttttccaaaataaaaaataagaataagaataaagggatttactggctgaaggagaattgctgattactattcatcagcatacgtagagtaagttcttccacaaatacaatatgtgaatagcctcactcttactcttaccttctcacttataagccatgcacttctagatatttttagtgttatttttaccacttatgttttattgatagtgaactttgttgtcactgaaaagccaagaatttgatacgtgaatttaattgtcagattttttttttttttacaaaaactccacatgttttacaaatgatttaggtattgtattttaagctataaataaagcattcttaaattcatattattttgttgtgtgattgaaattgaatagcataatcgtatctaattagttataattttttcacattaattaatgtgtgcatattagaattaaaatttaatataaatagtatttatatataaattttgtaaattccaaaatgtatattgtagtataacatttaaatttataaatttaatattatataattagaaaaataatataatatatacaggaaggattgtaaggtgtataacaaactaaattttggccctatatgtagtttaattattatcaaactaatagatctagtgccatggtttaatagtaaagttttttaaaactttgaagggcttaagtttcaatcattcatagctacacattaaatatttttttaagaaaataaaaaagtaaaagttgagaattgattacttgacctcttaacttaaagtaagactttttactactacacaaaattgtatttgtaatattttttttattatatttaatatgttatctatatattaataattttttttttcataatttcagggtcttgagcgttcaaggacccgaagtgcacgcccagcttgtctactctcaaggtcgaccctaaatatactgtaacaacagtatatatatttataaatacataattttgtttaaaacaatatatacatatttatcatgtttattattttttcaaatttttttttatagatgcgtataaaaaaattatagtataattaaatttagtagaaaaatatctataagctccaatttattaataagttctatacaattagagaaaattaaaatcatatacataatattatttattataattattttatgtactaattataatactcgaaattcgacaagtaaatcagaagaagacacgtgtcgagctgggaagaatggagaacttacacgcaatcgtaattacacttgacgtggaataactcgttaaaagcataattaacagagtatatttataactcagttgactgaatagtcttatacgagaaactattgatttgtgtctcgacgagaaaccatgtaattgcaagtgtgcaagacgaggcattaacctcattgtgtggaagagatataatgacaatagaaatacttagcgtatagcacacggtatacaaactaagtataagcagaggggtgaatcaaggtgatagatagtgaggcgttgatctccctgtaagagggcatgcatgcgagaaagatcatctcgacaccagaaactgtagttgtcagaattaaagtaaaagaattatcaacctcaggaagacatatgacgagctccagctcgccatcaaaattaactcagctccattcccagcgtggtatcccaatgggataaggctcaccatatatctttaatatgcgtccattttggcccaagaaaagcgggatattcacaattgtgtgaaatttaaatagaaactgcatttacttagcgtgatttgtaatcaaattccatgattctaggggatgatcatcgtaaaacgattacagtcaaactttgtaattaactgctcactatatgattataaatagtggcaagtagatcaaaaaggg

SEQ ID NO: 380555 - DNA, 1431 bp, Cannabis indica
ttaaaagaggtatgtagtgtaatcttctcaagtattaatgatataaattgagaaaaaaaagaagaaaaaaaataatggtataaactataaaaggattcaatatataaaatatgaatgaaagacattttgctgtaaataaattggatacagtgaaacaaatataagagtataccctttgatttgataaatttagtgtttttctttcttttcctttcaattaaggataaaacaaagaaaatccatgagaaagttataaaaatactacaatttaaattaatgtttacaaaaatactgtcatagagaattttttcaaaaatattgtctttttataaaataatcgtaaaataaccaaacaaaacaatcaaaaataacagtggaacaactaaaaaataacagtggaacaactaaaaaataatagtggaacaacggtgaaaacttaacatagtatacagtatttttttaaaaaattcccccccacagtaaaaaagaaaaaaagctggaaactttagtatgtggtgtaaaaactccaaaattcatttcatttgttatccaatggatatggaacaccaagtataagaatattcccttgacaatgctattttttattgttttttcttttaatatatctactaaggaactaatttgtgcttcacgcgttattgcacaataattattgttaaactcactttttcataaataaaaaaagtcaaactttaagacattgaccaagactcaagaggaccaaacatggttaggacttgatctacgactacatggtatactattagagtgccccatgtcataactagaagatcatgtgagcattgaccattcattggtgtcatagctcgcaccgtagggtttcgtgaatctaaagtaggatttttgctccaaaatcctaatttgagaagaaatccaacaagtacatgacttattgaagtatagggataccaaggcttgaacatagagccaaagttgcacaagaatggctcctctaatgtgttacgcgagctctggccacaatggtattgttgggatttatgctctaaataaaatccatttcaatataatcttatctgttatcaatagaagattagaagttatatatgtttacatgtattattcctgtttatggtttgatatacaatttcagttaaatttagaacatattgtatttcataattacagtgatgtcaacacagtagaaggtaattgtgattatatgcttcaaaagtttatgttccatgattcatcagtgcactagatttacactgatgtgatagtcagtgataaagcttacttacaccttgaataagtgttatgtcctttccaaggcattgacaaagtatgctagtatcagatgtatggtgtatacattggactgggatcgatattgatcttggaaaagatattataatcttaccgttgtat

SEQ ID NO: 380556 - DNA, 4958 bp, Cannabis indica
ctgaatcatccttcgtctctcgacacccaaagccatttctcttctcgccctcactctcttatttttttttttggcttcgcaggtgcccaagtgggattcagtagtgggtgttttgaaagcatctgctagtgtacatacattgtttgggaaaatgcctcaaacaatgacataatcagatttgtatggtatgtgtcgtgttagtttcttattagtgttgatacgaacggaaatgttcgttttctatgtttgttgtggtggtgtttgaagtggtattgttctaaaccttaataatgtgattgactttttaatgaaatatatgtacatccaagatataaatgcattaaagttaattttgtattaaggactttgtaacttgctgcgaaactttcaaattggagacctgaaatggtttttttagattgctgaatgatagcttttatcttctttgtacgcttggcaaaggatatcctgatatgttggtctattatgcagactttggaccccattgatgatgaatttgataattacatttccctatatgtatacaatagaatgtggaaatttaaagaaaagtaaatatgcttactttgatgttatgctctgttttgctgtttgatgtttgctgtttaactgcaattttaaatttgttttggttttgaaatgttatttttggggtaatttcacagatgttgtttgatccagaactttggttagtgcttggacttgctggctacgaactattttaactatagaaagttgtatacctatttctacaagaatgtatgagaaatatacaactttcttagattgtttcttggagtgttgaagtttagtggattgatttgggtgagtgcttttccttgttaatgttggtttaatgtgtgtttttttgtgtttaaatttagtttatggaatggaggatagtcttttatttctacatattagatttgttttttggtatattttcactgttcggacttcatagtgtataatatgattaaattggtttggatttctttagataattttgtagatttgtactacttgctatctgtttgactttagttaattttttgtgtttatatgtgtaagtatgctaagacgtgcttatcaaaatgccaagagattttgttggtgttgtgatataaataatactatgaaaggcaaattggattgacatttgaaggttatgaaacttattgttgtgatataatttatagattccttaattatcaacttatattttatatattgggtagcatgttatgagtttgaagatttggcaaaaatttgaagcttgagttgagagctatatatttgactgatatttaaatttgatatgtcagaaattagtgttctttcatggttgtagacgagacatttcacttaaaataagttcaataattcatattattgtttcgtctgtcaagtgtctttcattgcagcatttagttttttagtgtagtttgggattcgttacttatacttctaaatgaaattagcttttataaagcataataataattaatgaataaatttaggagtaatacttatttactctgtttttggtgtgtagttctcaagtgtataaatataaaccataaatttatctgcagtagttacgtccattttaatggattatttgcttacatcagttatatattaacaaaataaaaagcatgaatcaataatcaattgaagttaacataaccttgctttctctgtttcacatttcatggatattggagttaagtgaaagagaaaaaaataatccccttatcaatttatatgtaatgacaaagctttatacttgaaagaatttcatctatgaagctctattctcaatcatcttttgtttttaaaaaaaagaacgtaacttgatgtactgctagatatacctttgttatatatgtcatatatgaccatctaaaagttttttctggtgatgttgctatttcaggcccttgaacagaggtgtttaaaactttcatttccaacaagtggttggtgtgtgtagaaacattccttgctataaaatagttagttggagaaaagaaacatggttaagtcactggaagctataaaaggtggtggaggatccatcagggttgggaccactggcacaatcatttccttgatgacaagggaattgcaatccatggatatagcatctaaaaaaccttcatcatctttcgataacaaacctcaagctgaccctgttactccaagaagacttaaaccaaagaaatcctctgatgaagccaccagcagtggagtcatgaactacaggaaaagcccggaattttccaggaaaacaaaggggtatcctaaaaaagcacatagaatccctatgcttaactctgacaatgtagttatagatagaactcatataagagggaaacctgaaaagaaaggatctaacattgttgaagttgtagacataaagtgtggaaacactgatagagcttggaaaagccccataacaagcaggttgaggaagctaggcttctcaaagctctcagagagcattatctaagccctcaaatttttcacgtctgttttcaagttcgtgtagctgaaacctgaaatcccaactgtcggcttttctcccgacacttccaccatagaacacatgctgggtaggagttttttgcctccttttttttcttcttttgggttgatgaggcagatccaactgttggtttcgaagaatgactactactagaagaagctgtatttgtaacatgtgaccgatgcttctccaacttactgtgactgctcggttcaagttggccaaagtaatcaatttccttcattactagcgaaccaacagttcctctggtgcctatctccacaggattgtaggcagccattttcccagcatcagttgtgagaactgtgtttggtttatgcattttttgcttgtttggattggtgcttgaggaaagaaagaggcctttttattaaaagatgtggttttgagtttactttgatgtggaagttgctttcaaattgggacattttggtgtgttgtgtttctctcacatgaattattcaccattcgttctttatcttaaagtgaacaacttaagtctttgcctttgtgaaagattagatggtcgtatagttcaccgtactcatgtgattaagctgctttaacctatgacatttaagtttcttaactaactttagactttggtttcttcactggtatttagattaacttttcttcgtagcactgtacgcaaattgtgaaacttttctctcattttaatgctgaatcaaaaccaaaatattgtggtttgataacttttttatgcctattctaatttaactggcaaactcttgaaatacttgagtaaaacgtttgtgtggtgttttgttgtacggaaaagcccgagagcttttactatcatgcacattatgggattttgtgtgcctattatatgggcacattatgttggggatattttgtttggttttcccttacaatctttgaatagttcagcataaaaaaaaaaaaaagggggaaaagttgaagagaatagtaaatgtaaaattattaccttcacaagtacagctatgtctataatctatctataactataataaaagtgtaaaaaaatttagtcctctaacaatcgatttacaaaaaacccgtttaattatttaaagggaattagtgtcttcctgtcattatatatattatgagaaaatccttttctaaaaaaataaataaaataaatttattatatgattgctttttcattataataatttaggtaaataattagaattatttatttggataaaaaaatatattatattctctatctgttaaatttataattaaatttaaaaaatgaatttaacaaaaaataagtagacatacaacacaaacaattatgagaaactaaatatagataatcaaagataataataaaataagactataactaatttgttttttatccaaatagttttaatcttatttttttattagctatatcatagttttttaaaacaattgcaaaatttcaataaattcagaagctgaaaataagattcaaacaatttattgtattgttgcatgtctattttttttttattattttattttatccgtgtgaaatagacctttaaactctactttagaatattataaaaagatttattttttattttttataaaaatttatatttacttaagcaaatcaaatttaaatttctttatatttacaaattcatatttacattttgcttactgatatttctttagttaaacataaaaaataaagatgcaaaaaatactaatttacgataaaaaataataaaagctaataaaagtattatatttttgtaaatcaatgagatcacgaaattcttcgacatgatgtatattttagaggatatgtatacttaggtattgtcataagtttagtagataaaaatactaattattcttgaaaataattgtaccctctaaatatttttagaaaccattcgctcacgtccgaagaagcacgtgtaaccctactagtatatataaaagcctaaaaagagagggttttggtggaaatctatttattaccttaataaatatctttggttttattctcactaggggtgttcataaaatagccgatccaatccaattcgcacgatccaatccaatccaatccgcaaagtgcagatatccgcacttgtgcggattggatgttgattggcatgtaaaagtaaccgatccaatccaatccaatccacacatatttataacaaaattaaaaaattatatatacatataacattttaatgtagaaaaaacagtaatttaaaagtccaatacatatcatacaattatattgcaaaacttaatagataatgtatattctattcttatatatatttttttctacatacaatttaaaataaaattaaatatctttttatacatacaa

SEQ ID NO: 380557 - DNA, 3600 bp, Cannabis indica
attcattctttgttttattttttagaaaactataaatataaggctttgtctctggcttagattacaatttactgagaccaagtttccctcccaccaaactatgttctcaactttctaattataatggttaattagaatttttgcatgaacacatgtaccaaatgatgcccctgaatttttaaagtcgttaaaaatgcctcatgaactattgagattgttagatttaaagatttttttttttaattttaataaaaaatctaacatatactaaaattccggaactataatttagtacattttaaaattcaatggacataatttggtaaatatcaaaatttgaagagtatagtttaatacataaacaatcgaaataataaaattgaatgacaatagacagaagtcttcaaatccaacaatctcaataattcatggaacatttttaacgaccttaaaagttcagggggcataatttaatacatgtcaaagttcagaggacaaaaatcttaattagccaattataatctcacactttcattcccatatacacaaaactttataatactaaaaaacaaaagcctctgtatttacatataataatcagtgactcaaggactaaatgatagaaaataatccaatatttgatttatgcaacaccagcatagtacttactaattacaatcaatgacaagatggtgaacagacttcgtattattctgaaaagcaaatttaagaattataatgcaaataacagactcctataactctatgaacaattttaatttatgaactctcttacttgatcaaaaatcactgtacaaacttgcaaatgatcattgaaagagaaagaataacatttcttactttattgaaatcttgttttctttaatctaaccattaatgattctatagacttttgtattctactgctatctgtttgcctcacctgctgagatatctcttgcaatctctcaactccacgacccaaacttgcgattgatggggcagcaggtgcagattcggcagcacactcaatcccatctccataagcaagcaatcctgtgcacgttgcgacactacacccaaaagttgcccatggtagaaaaccgattggccgaacctggcgctttctcattatttcataaaaagctgttctcatggctgagaggctagttttctcagctgaggctataacaccgtgggcaactgccctgatcttctcagcagaagctgtggctttgaaaagtgatgttgttttgaatccagaaccggcaaaacttggagcaacaacttttgttggaccaagagttttgccaaggacaagcgccaatgccttctgtgtttgagtcaaaatgattttaagtgatgcagggacattcatggttataaccttcatgaaggttgatgcagggacaactttagaaagcgatgaaactcccagagctgctgtagcccctgctcctacagctaccacaggtttattagttatcaaaagtttcttgtctgtctgatttggcatttcctcatcaccttcatcacctatacaaagctgtccaatcatatccttgacttctggaggaactggatggttccagtgctttcttagacccgctaagctactggcatccaccactgcaactatggtcttgaacttcttagtctgggattggagggcgtgtgcaagaagtacttgagatttttcctgaagagaaagatcagagaactcggccttaactgagctgggatcccctattttgttgagaggcagtctagcagcattgttcagagcaattctcagcccctcaactgcaattcggaaggtgtaaacctcagacatgacttttccatcaacagcttcccctttgtttacatcatatagcatcttttgagcatgagcaagagcccttccaatggatgggagatctgcaaatatattatgcaaatcaacaagcagtggataaatggactgagcaaatgatggagcctcataactatcttgaggctgagtttcccccaatcccattttgggtgcagaacttgatggacttaaccttgatattgacatctccataactggtgataaaaccttcaccatttgcgactgaatatcattggtcaagagaaacctccttgagctcaatgtagcaactgaactaaaagccttctgaggaaccaaactactaactaaaccctgaaacttgttcaatacatcggtttcacccggtgtaccattgccagcgagtgataaacatggcgattctatcaccaagaatgaagaccccacctcccgagccgcctttttggctgccaaaagatgtccatgaaaactaacaccaaaaacctctcgtaaaactaaactaccagcaacatcctcgtacttctccttactaactttttccacaaaacatcgtcttaaaacttcaaacgatgaggtaggaagtgggttctcaacacactgatccaattcactctcttgtgcaagtatttcagcaccatgagaaacacccacttgagcaactacagcatcaggcttaatctccctaatcaaacacttaacatccaatgctgactgctcagataaactttgagtagaaagtacgtatatcaccgattgagtttctggctcccaaattgcataaacgaattgcttagtccgctcaggaattggaagcttgcgaactaaatcacaagagactcttaaatcatcgtgtttaagcaccttaaagggccaaagattacgcagatttgagataaacccaagtgccattacatcacaataatgataaacccctgcttgatttactgggaaaaccacctaaacttaataataccttggatgattactcggaaacacgactaacaattaatccaccagcaacctattcacacaaaatttgaatatcatgaattaagacaaataaaaaaacgaaaagaaattcaatgcttgcccagatgaacatatgtgaaaaaactaaaacatgattacttagtcttctttcaagatgaagcccaaaaacacaaagcaagactcatcttgaacatattgaagaaaagcttaatatataaacagcatactctagctaatatataaaccctaattaacgaaaaagaagagaatttaacttttcgtatgtatattatattcgtaattggacctgcaattgatcttaactaaacaaaattaatacataaagattgtctaactcaaagatacaaacttcagactcaaagcttaatgataccatggataatggcttaagtcgattgccttcgaggttggagcagccacggcgctgagagaaagacgtagatagtgttatgagcagagcaggtgcttcgcttgagaggtgagaagggaaaaaatgagaagattttaggatattgatttagggtttttctgagtctgctacacaataaacgtgaatattgatttgaatttaattttgagaaaatccaacaccattgatgagaaggaactgttctgagggttttgaagtgcttaggtcgacgacgaattaatttaacagaaataaaataatagaatatcacatattggaatttggagtgttaaaaaatagggaaaaaaataggaatattctaaaa

SEQ ID NO: 380558 - DNA, 1515 bp, Cannabis indica
ctcactatgtctatttgtaaaaatattgatagtcttatgactaaatttttgtgggggtctataggtaataaaaaaatcattgaaaaaacggtctaatctctgtgattctaagttttttggaagtttgggtttcagatctattattcatcacaatcaagctatacttactaagcaggcttagaggattttctctaatcgtgactctcttctttctaggttgcttagggctgaatactttaagaataatacttttcttcatgcttctaagggtcactacttactgttcttctttaacttcgagaagtctattatggggaaaatatttacttaagcaaaagcttctttggaaggtggggtatggtaatctatctctacccttagctcttactggattcttgctattagattcctcaagtataagcagaatcttcctcctccagatgatattatttcttactttatcaatgatagtggttgttgggatttaaaaaaattaagtggttattttgatgatgatttggttagttctactcttcaggttcctattcatccttctatggatgctgtctcattttgggcatcattcctctaggtgtcttaatgttaaaactgtcaccatttggctaaattatcttcttcttttccttcttctaacccttcttatcataataaaaagttgtttggactcttaaaatacttcataaaattaaacattttatttagaaagtctttaacaacattctcccttctactttaaatctcttcaagaaaaatatcattcctataatcccttttgttccttgtgttcttgtaaagtggagttactcatgcccttaagttttccaaaactaaatctaaatggaggggtactttatttaattagttttataatactatcaagaattgtgatattaaagaatttttattgagaggttcggataatctaagaaaagatgaagtccctttgttttttggtattgcttgggcagtttggaacaaccgtcataatattttgtttaataaatggcacaagacaactgcatgaatagcatgaacatcagtgccaattatgttccacaaagtctgtttgatcattgcagagggattattagccaggatgacaagttacctccatcacacaagttaaaattgaatgttgatgtctctgttgatgaaaagaacatgcgaataggttttggagcagttgtgagaaattgtaaaggagaagcagttgttggttgtagtgctggttgttactcttctattcctagtgggttgtctctaactttaatttggagaggctgaagctttatacaaagctttgaattggtgctctttggtggagttttccattgttatggtgagtcagattgccatgttttaaccactaaagtgagacataaataaaaagataggtcttcattatcatatttggagcaaaagattattgtaaagcccgcttagttaatttggaaattagcagttgtttatgattaattatggaattatttatag

SEQ ID NO: 380559 - DNA, 2944 bp, Cannabis indica
gccaagatatatgtgtgttatcacttattaatctcttatatgacgctaatataaatatatatatatatatatatatatatatataaatatatatatagtatctacattttcttgtaaatttataatataagtaaacatacttagaaaagctcatatcctagttaagtactttattcttaaatttgtgagtaagccatcttaattttcttttctttttcttttctttgtaaatacatatcaggatcatctcttcttttatttagtggccaaaagtagaatttaaactccacaactatttatcaatagcatataaataaaattaaatctaatacgaccacaatgtgataccttataatttttttatattacttattaaattaaattatctatatatatattataataatatgatgttgccataattataaattaattttgactcaaaggaattaaggtagagctagggcttgttttgagaggaaagacataatattgataagcaagtgggtgagtgaatggtgtcaagagtgggtagaaagtgatgatatgagaattaaaccacaaaactcactttggccttaaccacaatggattctctatataaccacttctgccattgtctttataaatatatattatatgctgctctacttgtgggtagtagttcatccaaagactttgtcttattattattattattattccaaattaattaagcttaattatttaacaagccatctcacagcagtcaactatatattattttttttttgcaggggtgaccccataatatgtggagagtatttatatatataaacaaaaggtcctaaattatatataaaaaaattgtaataaaataaagaccgggtgttaaagagaatctgagactatatatgaaattttgttcatgtatgtatgtatttatccacattaaaaatgtcaaaggaaaaaaaaaagaaagattctcaacaatgtcgacaacttatgtaatattgttgatttattaattaagcgcaatattcaggcatacattatcaagctataatgtcaatcttgaatcaaagagcaagatcattgttttattttatataatatacttttaattttttttttattgaagtgtattatgtatatatatgcataatattaagttgggttcaatcttaaaatcccacacacacttcacaattatattttatcgccacttgaactagcctcaatacgaatacgagaactcttaaaaaatcacctatcttaatattattctcatcaaagacgcttaactgcgaaatactaatgaaatctggtgcataagttatttcaaaaaagaaaatattatttattattattattattattattactattaattacagacatttaacattaatatattttaacctgttaaaatagttcttgtttttcagagtgttttatctctcgttctattgagagtgtttgtttatcccttctgagtttgtccttatgagaatttatctttttgagttttgtccaagcaatgtttgatgaagaaaatgtggatcgaaggtgaacccgagattgatgaaagatggtatcttgttggttgattgttggttgacttatgtgtagttaatgatctcccacataatttggctatattagaatgcaattgattctgataaattgccaaccattactaatgtgaacagagccactcagcactgtatttgcgagggaaaggacactgctcttaatgaccatgttattgtggtcaatgaacattttccacatatgcaaatgtggagagtactgaattaaaaagaaaaagatttggctctgaatctcctcatgggcttccgatttccaaaagtgagtctatggatactgatatagtaactattaataatctttcctccaataatgttattgagttaccaaaaaaacgaagcaggtgggttctggtgtctagacccaccaagaattatgagcaccattagttggaatttctgcggtcttaagaatctacgggcctaacaattccttgaagatatttttaaggatatttacatgttatactaacttttgttatttttttttacaaaaatactgtcaaatggtattttttattttttaaatgtatttttttgtaagtttcatactgtaatatactgtgttaagttttcactgatattctactagtattttttaagtgttctactggtgttttgagttgttttgctttgtgttttactagtgttttgtaaaaatacaataattttgaaaagatttctatgtgacagtattttttaataaaagttaaccaaaatttctgtatttttataagtttcgtgtttttatccaaaagaaaccgaagtttttatttttatgtgaaagagatgttgtggaccgagacccggttaggatttgagagttatttttctttagatatctggcattgctttcttttggagagtctctgatgaggctcatcttttaggctattctcaaaaccatattgacattgaagttcgaatcttaggaatgataaaatggcatctgataattaaataaaatttgatcaaaaatttttatgggggaaaaggcgaggtaccatcaccctgcaaattagataaaagtaaaaagagaagtgagaagcaacctaatttcatttcatattttcatatttggtatttgtagagtagaggccaaaaattggattacacccaacgcaaaagcccaatgttgaaacgcccaagtccatttgtgttaattaagcaagacagaaagctggagttaggcccacatatatactaggcccaaacatcaactttcggtcttaacctgaacgaaccctagtagatctaatcgtgttagagtgaaacaacccaagcctatgattatttttttttttgtaaataccattttggaccctctgttttacaaaagttaccaattggaccat

SEQ ID NO: 380560 - DNA, 2529 bp, Cannabis indica
aaaaaaataggttggtctatttaggaaaaatagactgacttgaataagaatttgagcatagaacaaaattactggacttattggtcgtgttgggcctaccctataaattatgggatttttacaaaaaatatcatattttggataaaagtttacaattttactgccacacggaattttcacaaaaatgtttttttttttttttttataaaacagctcgtaaaacaacaaaacagaacaattaaatcaacaacagaaaaactaaaaaataatcatgaacaatgaaaatttaatacagtacacagtataaataatacatagtatttttttaaaaaaattctgtcccaccgtgaaaaaataaatatttttttttgtgtgaaaattcctaaaattattgtacgattcaacacaattcatattttttttagcagcacgactcgaaaccgtagttaaaaaggcatgcacgtatttatacttacgctaagtataacacatttatgtttttcttctgcaattttattggctgacgaatgagaattaatatttaaaacataattatatatcttagtttacctttgtcccttactccttcgtttgagtatgttatataatgaaagctgtaaaacgttttgccccaatatatattataaaattaacaatatactcagctttagaacaatcctaaccaccccaatgtatttaaatctctatatatatattgtttcttctaaactttaattatgttttaataaaatagtcaattttaaaaagaaacttgtaaaaaaaagaaaacaaaaataaataaataaaaagaagaagatgaaaatggctatataaccccaaatcaaaaataattattgtgagaacttatactcatcacgtgtagtactggttagggagtacatatttttcttatagagatggacctcgcagggacaagcccttaatggtggagatttcctgtttacatagagaacgaggtgggaagtgaagatcactttcgttcctgaattaacgttaaatagggcggagacatggatgagatccccgttaatattttagctatctttttaataatattttataatttataatttatattttttttttaatataaatttttaaattgtgttttggattatatttagtatattgaataattaattattataaaatattttaatttttatgtaatttaatatgttatagattttattttttaatattaaactttggttttatattaggagattctcctaatattcctttccttcattacttatatgagatatagattaaaatccttaacaagactaagaattattccccacccaacgtgtgcattattcctagtactattatgtgtgtatatatatattgtgatttatattaaatcaattatatatatatattgatttatagattgataattatactcttaaaattcctctaatttcgtgattcataccctagctaataaaattcaaaccattaatttaagaataaattaattaattataactattatattacatataattatcttctatataataatatatttaaaatatagagttatgttaaggcatctctttcatgtattattttagccctatatatactggataagattactttcaattactactaattaatataacagtaattaattaattaaagacactgtgttacatgaatttataggccgaagaacaagtcacataaagttaattatgatcttaattagggtttttacctaactaattaatctacgttgtttggtcttcatgcatggattcaccaataattaatattgtcaattatattatagttcagatcaaatcaaataaagaaagcaaaacatgatctaactttaatatttaattaattcattaattgaaacaaattattttctttcaaattggacttcattaagcttctataaatatacgtaattcaccatgaaataattcaagacctagctcataattaataatctcattgcatgatcttattctttgttgtataaattgtcatatatatatatataaatataccaagtttttctataatattattatataatacttttctatatatatatatataataattaagaaattaaatatatggaaggaagcaatattggaggaagtttggaaacttcatcgagtccaataattattaggagtagaagaaatctaatcactgttctcagcattgatgggggtgggattagaggaattatcccagcaatcattctcacttttttagaaaaacaattacaggttccaataatatttatatatattatatatatcatgcatattttactaacaatatatatataaaattattttatattattttcgtaattatttttcacatataattttaaaaaaattaaaaatatttgggggtcacggcccctcggccccctctagctctgtcaattcactagctataattttaaaaatacactacaagaaatttgtgctggtaaaagtttggtattgcgctggtaaaatagaa

SEQ ID NO: 380561 - DNA, 2687 bp, Cannabis indica
ttttttttttttttgtgtgttctagggaagtttttaagttttttgggtaatgatcaatctcaatttattcctttaatctaggttttttttattcttattacttaattaaagtaaatattactattgagtactaatagtgccaatcactatctagacgtggtaattagttagcgatattctctaaaaataatttagtaataattattttcaattttaattaacttattggtttctcattttataactatttttctcaaatgatttttattataattttaaataattatagtaggtgaactaatataaatgtgtcacatgtacaaaaatatacacataagtaattcatgttgacatttaacttatataaataaatatgaccttggtctttttaaaaataaataccactttaaatttgctaatggtttaataatttaaaaaattttactcttaaaatttgagtttagagaattattagtaagtcgaatgacaattagaaaaatttaactgccaaaaactcaaacaaacatatatatttctacgaggggcagaaaaaaaaatttgaaattttgaaaaaataaaaagaaaaaaacaaaaaacaaataagattatattttgatttttttttttttttttttttggttcagaatagttgttaataatagaactttttaaaatggaacaaaacgtttaggatgccaaaatcgattttacaatattccatattgagattgtacctggcgcatttgatcaccagcgactagggagtaaccaaaattgaaggaggcaattttaataagttactagccagaaaaggtctcactacttgatattgtaataagttactccttttttacacgtttggaatggttttgcttcatccaatctagacattcctctgcggtcccagagggatgggccagttgccatgcaagcagtttttgttgctgcaaccaacaataataataataataataattgatttagccttgaaatttttattttattacaaatggcattagtttggtaatgcaaacgacttacccattccctaacttgtggtcctcctgatttaagctccaacacattcattatctcctttccattcactaatggtttgacttcccatactttttcaagatctgcacattcatacacaagatttaagaaaataacatacctggattactattagagaaatgctaaaaggcaacagagcgtttatgaaacaaaacagattatttcctcgaaaggagagaataaagcaagggttataatgccgtgtaatcagcaaaggaaaatagtttcctatgagacgcaagccaagtatctactctagtcaccatatatattaaactaccttaagattaatcatatggttgaaaggtgggggaaatgattttcataccaaaaattaaaaagtggggaaaagacagaaattccacatccattatatttccgagttaacataaagttgaaaagggaatggatgaaaaagtttcctacctaattcaagaacggtattctcagctgctttaaatatatccttcagcttctcaagttgaaagttctcgttgagaagatcttcactagaatcaatttcatataataacgtagacatcattaatgcaactctccagaaatctttgatttctcgaagcagaaagcctgaaaaagttagtgactatgttaaaacacatatcacatcacagacttggtatgataaaacaatctgacaacaaatatagggacttatcacaaacaaattagattcgaagaggctttgcatctgttaatgatgtcaactaaagataaacctttagttcacataattaaattgttactataacaacaattttatacctgtcaacactcgtaattttgaagtgatggggatatcaacaagttctgatgcccattcaacttcagttagtttgatgtcttcatttaatgctagagaaggaagcaaagacgagaatttcttcaatgcgcggtatacatttaatatctgttttttttttttaaaaaaaaaaaaaaaaaaaaaaagaagaagaaattgtaactggatttaatatagccaacaattcaagaagtccaacaaggtctaaaattgaaaggagagtcaaactgaccgtttctgcatcactggtttttcgcttaagagagtcccggaaaatgaagttaattacaggaatctgtagaacagaagtttagctcagagtaacagatgacagaaattcaatggtgtcacaattgaatgcatgtcaacattaacaaatgatgttaaacatttgatatgagataatcacccgtggaattccataaatgtcataacttagcagatgcttaaaacagaacgacaatctcttctttacttttttctattgtttattgaagagaataaatttacacctcttttgatttgttatctttatatattgtctcccttaatgggagaaacatagcagcaaacagagacagccttctttgatcatcctgaaaattacatgcaaaataaatcaataattttaaaaaacaagtaaaacagcataataaatagaaaataaaaaaaaaataataaattagtttatccgtcaaacttggatcatgttgccactcacattaaaggaagaacgtccaattaactgtataaggttccatgtaacatccaaataagcaatacaaagcct

SEQ ID NO: 380562 - DNA, 4119 bp, Cannabis indica
tttatacaaaatacctaaaatcgtatttgttttatatttttactgatttttttttatatttttacgaatttttttacaaattttatacttatactttaaatcaaaaaagtaaaactaacattgttttcatgttgctttcactttcatgtagcatcaacgtgaacgtgaaagcaacattattttgaaaataattgtatatattttgaaaaaaagaaagtataaaaatgtttaaaaaaagctatagatatgtatttttatactgtggttggtacgatagtatctggagattggagatgaaggttcgaaagggtacaatatggtttaagttgttgcttaaaatttatgtcaaataaaatattgtacctttatcaactatcgtactaccatcgtatcctattgaaccttcatcactaacctccatattacattattatcgcacccaccatcgtaccctgtcataacttatcataccataacctctatattatcatgccataaattttatcatggtataaatttaaagcaactatcatagtctatcaattatcgtaccatatcgaacattcatctctaacctccagattacctactatcgtatccaccatcatattctatcgtacctcatcgtaccatatacaaaaaaatcagatagaacccaaaaatacaaattttaccaaaactcgattttcataggagtgttttaatattctcgagaaacttacaaatattttagcagcgtgtagctcttagaaagtcaaaaaaaatgatccattctcaatggaatgactctactatttatagaaaaaaatacaagatgtaagtttgagaatataggagatgaattcgggaaactaaatatcaaatctcgattctctcaataaaataatcccataaaaataaagattctaattaagttataattgagaagatatttaaggaaaatatatttggagatctttaattaccacgttcctctgtacggaaaatggaactcggctaggcatatctaatttgttcaaagaagcctggataatacttgctgtagaactatatttatctgatttggctttgaatcgttctagacaaaaccccaaactagtataccccttccaattataaatacacttgacatttgttaccctggtgagtgccatgtcatcttgtgcaaattttggaatagtatttgcccccaagtccgcgggaactgttagtcgcatggggacttccaaggtctgcatattgctcggatcaataacatgtgttacggttcacatgttgtattggagatgacgtttgtcctgctcgagacgtgtgtatttaatctcttcagatctcaacatttaatgctcattcaaaaaccaagaaatggggaaacgtgctttgacagtttgcacgcccccattcttttaatgattatattttttgttactttttggaggaaaactcaatttcaattgcataccgatactaccctttaatgggtctataagaggaatttctaaattcatttagaactttcaccagttcttcaatcttcaaagcttggagaaaaagaaaaagttgttcttcaagctgtgtgatattcgctttccgtccatatgttttccatgaagataatcaactctccacgcaaaagtgagtacattatttccttttaaactttcccttcactcttctttgcttaaatgtgtttagaattactggaatatatacatgtgcattttgttgtggcccgttagattttaagttttcttcaaatttatttctaaaaaagaaacgaaataataaacctaagaatcatgtgtcttacttgaaaatgtttggtgtggaactttcgcgagaaaaaatcgcccctttttctctattatgttcttcggagcttctggttgtaaaaattctaagattggtttttatgtaggtgttttgtcattaggaggaatttcctttattttgatctatttttctcttctggtaggagtatttgggatgttcttcttttagaaggacaatctaaaccttttcggacactcacctgtccattattcttcttctttatagatgaacccaggtgacttttggggagttgactttcaaatagatgacaatctgcttcaacttcttcacgacaaccaacctagacttcgagcagacaaatcgccttcatctccaagtgattcttcatctacctcaatattttttgagtgggaagtcagcagtgattccccaaaaccaaaagtacaatgccaccaccaatctgaccagattggtggagaagtgtatggacattttgtgtggaagctaaaccgaggttggaggaaatttcttccagcatcgtggacatacaaagtctgggaggacgtacaggatacaccacccatgggtcaactgggacctttgaagagaagctctgtgcaagctgaagtagcagttacagttgttcgccataatcaaatatcactttttgaggccaagtcaaaattagcccatacaaagcaaaccatccgtgcaatatcagccaacgatccccacatcgcgaggtatatggttgttgttaggaaagccacggtgcctatggagcatgaggattaggaggaacataagaacccagaggcttctgagggggaaatggagcttgatgctgatgaagagtttacctacgagggattcgacgaagctggtaaacgtgtttcatcatccagccaattacttgttattggcaaggattacactaacgaagatttggtggagactttatcgaagtcatctaggtctaagcactgtcgcactaggtttcaccaccatccaagtttactgtcaaaaggctaaacaacttccacaccaaaggccaggtcggagatgtggcattttttccaagggaggacaattggctcataaccttggtgaagggctttgtgcctggtcaggcctcatgccaagcagggtgctctactgccccctcactcatactttcagaaggtggccaactattacgggatctgctcgacacaaattagtccaaaggggataaagtatctagtcgcactgtttgtgctttatgtcgagcagggatgggaaatgccttctccccatgatgtgaactggttttttaaccttaagtcaaacccacatcataactggtccagatatttttatgtttccctactggagtttgcatggctaacaggtaccacctacaagaaggttttcaagattggtggatattgtgctgattattacattgctgaaggagttgaggcataccatctttcctttcagcaggccaagcctttctaccaccccctattcactttggcccttaggaataacacccacacaatcttcgacctttctggagctacgctggccattgaggcaaagttttggaggcacaaagtatatccgtccaagaagttcaagaagaagtcatttgtgcctaagggtaaggcttttgagtgctagaaattaacttaaggttagttgtattttaaaaaaatgtaaaaaaattaacaaaataaaaaattcaatcaataacttttgcaaaatacaggttctaaaataatattttaccattatatatattccataaaatgaacaaagaataaatagtatatatccccccaaactatgatccgtgtagagttttgcccttgaacttttctctgtcacaaaaactttccgtgaactaaaaaaattgttgcaaatgtctccctgtacttcaattctggtcatttatttaaacaatttgctgggataacacttacataaaattaatctagcccagttcaagagtctagacaaaaaaaatatatatatatataaatagtagtctaatagtaaattatgagagtatgtttgtgtattcttaatgatagtatttgtatatttagtgctaataaattaaattttaagtagcttaaaattattaaataagccccagtcaaaactcgtataaataaagaaataaagaaagtcgatttttaaaaaataaaaaaaaatcctataaatatatgagacgtttaggtaactatttttattttttaattattttaattctacaaaaataaaaaataaaatttatgtttttaaaaaacaaaaatgtattctataactacttttatt

SEQ ID NO: 380563 - DNA, 3740 bp, Cannabis indica
agtatgatttattgccactatcacactctggtaataaatttacttggaagcatggaaatctccttgaacgctttgactggtgcattgtgaatagccactgaaattctctttttcctttcgcatccctctcccatcttggtttttatggctctgaccatagggcccttcaagtcatcctggaggaccatttaagggactgcgagaaaaggaataactttgttttcgagaaccactggctcacaaataaagactttttctttattcttgattcctctgggtctgactctactcctgcttcaaatctcccttcactcaatttctttatctctaaacaaacttcatatatcaatgcgattcacagatggagtttgtctcaagaccccctaaaagacagaatttctaaaactcaaaacgaattagacatcctgcccagcatcaatcaactgaatgagagcattatgtcccaaactaaagctctccaatctaccctggacaaccttctctacaaaataagatttattgaaaacaaagatctcatgttgattggcttaaatctggcggtaagaatactaaattcttcaaccacaaagcttctacccgtaggaaaatagccttcattagaactattacccttgagaatggatcccctgctaagggaactcccaccatcctttcccattttgtgactttctattcttaacttttttgttcccagggtgttgatacggatgcaaccgccaatattctctggagaatctgtagtcacctctcacattcctaagtcctatttttggaaaccccttttacccaagaggaggttaggcatgccctgtttagcctatcaggggacaaagcaccaggaacttatgggctcaatgctttcttctagtagaagaattggaacactctagggcatgattttagtagagccatcctggatgttctcaataataatatggaaatctctcttataaatgaaactatcctagtgttaattccaaaaaagaagaaagcctcaaccctccgtgatttttaacctattagcatgtgcactactatgtataaagttgtctaataggttttggcaaataggatcaaatttgttctccgcaccatcatttcttgcaatcaaagtgcttttcctactggtagactcatttttgataatatcctgattgccaatgagctaatccatgttgttcatttaaagaagaaaggtaaaatttgttaggctacccttaagcttgacatggaaaatgcttttgatagggttgagttgagctttctaaaagatattatttatatattggcttcccccctaggttcatctcccttgtcatgaaatgtatctcttttgttaactatcgcatctcgattggtgggaacatttctgacaccttctcctcctttaggagaattaaataggaagaccctttgtctctttattttttacttttagtggctgagggactctctgctgcgatttgtaagagtgagctcaacaatgattactctggtattcgaatttgtaggggagctcccattgtttcccatcttctttttgctgatgacaatattcttttcacctctgttaccaagcgatctagtgtggctattatggacatcatcaatacttatcgtaaagctactggtcagcatgttaacctggccaatcttctatccttttctccccaaacactcaaactgagtctcaaaatcactgcagaacatcttttggggctaaacagtgaggagttcataagcaaatatttgggggttccccattgtgtggaaagaatgcataattcagtctttcactaccttattcaaagtttttcttctaagatgaatgtttggaatggtaaattcttctctaaggcaggcaaggaaattctcattaaagttgtgattcaagcaatctcgtcttatgccatgtcctgttttaaacttcctcaaagcaacttgtcataccatgcaacaaatgatatccgaattctggtgggggtctgcttcaaatgataagaaaaaattattggaagaagtggtctgccctttctgtttctaaattcttcggtggtctgggattttgaactttaactagccataattaagcgcttcttgctaagcaatcgtggaggatttggacaaatcctgcttcacttcttcattccatccttagagctagatattttaaaaacaatgacttccttactactcccaagggacataactcttctattacctagagaagtctcctttggggaagagatttaatgaaccttatttggaatgtgggcaaaggcagcttcatccctctgaatgcttgtaactgggttcctcccctgtactcgcttactttcttacatggccttaacccctctgattacactgtttctttttcataaaccttgataacacttggaataaagataaacttttacattattttcctgaataccaagccaatgccatcctcaagacccccagcgacccttcactttaagatagccttatttgggggtatcaccattctggtatcctaactgttgatttgacctatcatctagcttatactgctagtaacattgtttctccctcaacctcaaactcaaacagcttaaagcattggtagaaatttgtttggaacctgcgaattctcctaaagataaaacacttttcttggaaagctttccatcacatcctccccttttcccttaatctattccataaaaaatccctcaatgatccccactgccatcattgtaagagtaaggttgaaaccgtctcccacgctctactagaatgtccaaaggctaagactgtttggaagaactcttctcttaaaatattttatgccaataatcaaaattgtaacaccaaggacttttttcttcaaggactagatcaccttaacaaagaaagtttcacattactaatcagtattctctggcatatttggaatagaaggaataatgctctatttattaatcatcatactaataaaattgatgtggggattttgttattagcttaatgcaggattacaaggaagctcggcaattaaatgcagacccaagaacacaggacacaaggaataagcatggatcccctggaaacaccaccctcaccatgccctttcccctggaagttttagcttaagtgtggaagttgctttggattacgaagcttataaacaggccttggagcaactattaaaaattgccacaaccaagcgattgcagacttctccattccaaaactaggtgcttcaacacccctctttgctgaagctcaagccctcctggaaggcctcaattggtgtgctgcaattgatcttcaaccaagtttgattatgtctaattgctctcaactagtaaccaatgttcgaagcaaatggaaggataaatctgctctttcaatccttgtggagttgatccgtgagtccttatcctatttccctaatgcctccctacagcatatccctagaactgataacagagaagctcaccaaaatgctagggatgcacttcagcgtgataaggacttcaccatgagagtatgatttctctctatctttgtgtaactacagcctgtgtttttcttctcttctcttgttgcagtgcattaaaaaaaactaccaaacaagctacacaaaacacagcatactaagctaatacattgaacttatagactcaatcacttttcattctctactacacaggtctagtttttcgtttaca

SEQ ID NO: 380564 - DNA, 2629 bp, Cannabis indica
tcaaattatcaaaattgaacatctctaaatatttttcctaaataacaaataaaaacaaaatcaagcataattctgtacaaaaaattataaaatactaaaatatatcttaaattgaactataaaaaatacataaaaatatatgtaatataaagtgtacatataatatatcacatcatttctttagttgtagtatcattccttagctcaacagtatattctctttggcactgataatttatacataaaaattcgatgactcatgcaaggaatatgaacgaaacgaattatttaacatataattaagattaattgtgctcaccacacacacacaacacaacaatgaacagctcttacaatgcaagatggtgtttttttttcctctgaaggaataggattcctcttattagtcttaccatttaattatgtataataaattatagaccaattacctataaaaaaaaaatgaaaaaggagaagaaaaagtcaagaagaagaacatataaaattaagcatttactatggtttgctactcaggcgagcactcatcatcattcatggcttccggcaaagacaaaaaacaaagccagcagcagccggagttagcggctgatattcttatcccatcccttacaaacgacgtcgcttcaaactgcctcgcacgagtaccaagatggcatcacatcattctttcccaggtctctagacccatcaggtcccttcttttctcccatcaattctacaccgcacgatcaattctcaactgcacccatgatctcctttacataagggtcggatcctactctgcctggcccgccacatggttctatatccaacagaaacccgacccgagttcaacccggaatggtgctcttatccgagtcccgcaacaacctcttcatatagaatcttccgcctacgctgccgtaggctacaagatctacgtcctcggcggcttcgtcgacggagaattctcctcccacgtttggattctcgactgtaggttccacacgtgggagcgcgggccgaacatgaaaatggctaggtgtggcgcctcggctgcggttttgggcggtaaaatatacgtggcgggaggaggtggtgggccaagctcatcacacggaggtacccattgggttgaatcgttcgacccagatatcggagtctgggaagccgttccttgtcctgatggggttcgaaacaagtgggtctcggactgcgccattgtgggtggcggggtttgcatttgggtgggccaaaccgggttcaaatttgacccggaaacgaatgtttgggaagcctttgagaatgagctgcagtcgggttggaatggacagaactgtgtggtgaatggtgttttgtattgctatgacagttgtgggaggttcaaagggttcgatgaagtgaatgggaggtggaaagaggttaatggggttgttaaagatttgcctgcgtacatgagtggagctaggatggtgagcttggaaggaaagttggttgtggtttggggtgagagtgatttaaatggggtttttgagcattttcaaaagaagagaatggagttacagtgggctgaaattgaagtgaagaaagatgggaatggtgatttttggggaaaagtttattggtggggaaatattgaaattccggattggattttagagagatgtcccttgttctaccattgcctttctgtatcaatttgatttgatgaggcagccatcgtttacctgaacagcttcgacttatacaaatttttgggttgttttgtttattaaatttcagtggttaacttatttctactggatgtgtatgatcactgagtctgatgtgattttatgaattatatatacggtgtaagaatagagaatgaaaatataaacagattaaagcaataaaggagtaacattcaagatgttgaaattattagtgaagaaattaacaatgattaaagtatacaaatttcatacagtctaatgaaatgtttattattaaaaaatagatataactctatatatttacaaacattaattgaagtttctattaattgctaataatcttagatagtaacactcaaatcatcctatgcgaaaattatcaaatattttatttaatttaatttatgaaatataattaattatttgataattaattaaaattaatttaattataatcatatataattattaaatatttttttttgatattgaggaggagagattagaacttgggacctcctttttgtaaagaaaagtgtagaactactaaactatgcctatgaccacaattaccaaatattttatttacgcgatttaatttcttaaattaattgtcaaaatattctaacaattaactgaggtacaaatacttatggattatcttacctataaatatagagtgtcagtcctcaaattcactacttatttttgtgtattacagtaattctatcgaaacaagttagagagagcatggaagtctaattacacattctaacttgttttcagttttcttttgttgatccaaaagtttgtagatcaaaactctctgaatttggaggcaagggtgaagcaaaaaaaaataaaatttaggtggggcaactatgtatttttatagtgaaatgctaagcatctat

SEQ ID NO: 380565 - DNA, 3848 bp, Cannabis indica
taaactgcccaaaccgaccgatgcacagccataccctaatccccttactattagatgcaactttctgttgcctcaaaattgatcgcccctaaaagtcatatttattgtagtgaaaatacaagaaaaataaaataaaatggggatgagagtaggaataggaatacaatgaaatgtaatcaaatttaaattttagaaaaaaataattgataaaaattattaagtttttcataatcttgcattagaatagtctttactttcattttaaaatagaagtcgttgcactaaaatggtgaaaaagtcattcttttagaatggtaatacaatagtttgcaaccaaacaaagtaatggaatgaaaatagagtttttacattccattccattatctttgatcaaatactacctaaaataataagtgtcattctaaaaatatttgaatggtttgagattgtgaggctgactggagagttgagggaaaacatggaaaaaaatgtatggtaatgcataaatagacccttccactcaaaaataagttacgaaagttctgtacacactcttaatgagatatttcagtacaacttttacatattttgacattcatgaaaaaaatttaattagtctattttttataatgttgccaattataattatttaaaaaaacctgtaaatttttcagaaaattatgaatagtttcaaatgccaaaaatgagatctaaactttataagaaaaaatattcacgtgtgcaataaaatgtttgaactttatttttaatattataatttattcgaaattgtttaaaaatttacaaatggtcctaaataagtataaaataacccaatatcaaaagaaatttaactaaagagatactcccccaataagttatgcataaactagtgaagtttttaaagattcaataaatgaatttgatcagctcaaacgatgttgatagtaagatcttcattatatagtcaatacagaggtacaaatagaaaagatgaaaacaatcatagccttacatgtggtacaagcaatcattacaaaaaagagaatatgctaataacaatgcaataacagaatgtaaaaggacaactggattgattctctcgagattaccaaaatctccaataaacttgacacacacatagctctgaccataatgccctgcataaactgtgtattttcttctgtaacaccaccctcaagcgagagggtgttttcaacacaccaagcttgtcaaccaagaactggaatcgagtgtgtgtgagacctttggtaagccaatcaacaattgattgtgagaagggacatatctgatttcaagctctttactgagtaccttatcacttacaaagtgcacatctagttcattgtgtttagttcttgcatgatacattggattagcagccattgcacttgcactcatgttgtcacaccaaatcacagggacatcagggagtttgaatctcatttctttgagtagttcttctaaccaagcaatctcagtagctagttgtgtcaaggccttgtactcaaattcattacttgatatagccataaaaatttgctttatagatgaccaagaaatgagggaatctcttaagatcatacagtatccaactatagagcgtcgatcatctgggcaacaagtccaatcaacatctaagaaaccagttaagaaaagcctatcacttagagagatgtgtattccatgatctaatgtccctttgagatatctcaggacccttttggtggcattccaatggactgttgttgggctttttaggatttgactaagttttttgactgcaaaagagatatctggccttgtgtgacttagatattgaagagctcctattacgcttctgtagtgtgaaggttttgccataagctctccatcatgaatagacataggtttgcttgcagtcatgggggtaggacttggcttcaggttggtcatgttaattttgtttagtaattctaatatgtacttcccttgagataattaaagcctagtttcatctctaaaaactttgatccctaggaaaaagtttaaagctcccatgtctttgattgagaaagtcttgtgtagcttgctaataaattattctagctccttggaattgctccctatgatgatgatatcatctacataaatcagtatcatggtcacatacttagaatactttagcataaagaatgaggaatttacttttgagttgacaaagtgacactgcagtagagttattttaagctggccgtaccaggccctcggtgcctgtttaagaccataaatagatttagtgagcttgcatacatagtggggtttcaagggatcttcaaatcctgaggattgaaccatgtaaacatcctcatccaatgtgtcattgaggaaggcattgatgatgtcaagttgtctaatttcccagttgtgagctactgctatagtgagaacaactcttactgtggaagctttaatgacagggctaaatgtttctccaaaatctatcacaggtctttgatggaagcacttggccacgagtctcgctttaaaacttttaaaactaccatctgcgttgagtttctctttgtatacccacttacacccaaccacattatagttaggtgatggtggcactaaataccaggttttgtttcattttaaagccacgatttcagagttcatggcactgttccaccccttatggtgaagagcatcctggagagaaagtagtattagggaagctagaggcaaatgagttgtgctaagcaagactcttggtttaaaaatacatgccttacccctagttaccatatagtgaatatatgttgcaggtctaagcaggggttcaggtatgctatgtattgatgcttgaggtgaagagggttgttgagtatgatctgaacctgaagctgcaacttgaatagcaggttcagcagtaggtgttgaactactagcagggtgaattggtgagtgctcaaagtacatatctaagtggttaaaagaaacaacaaaagtaggacatacaagctaagatttttgcaatacctaatctgatgtgtgaggtgcttggattggtgaatctaaagaggtctaaggtgaaggagaagagactggtaggtcgaacaaggaatgaggtatggtaactgtgattgtttgttctagtttttagttattgagaaaggcattcttaaatgggaattccttttcattaaaaacaacatgcatcgatatatatattcttccatatggaataagacacttatatcctttatacacctcactatagcctagattaacatacttaatggagtgctattaaaatttatgtgtttgacaggctcttagacatggaaaataagcagtcctaaacaatctgagaaacttgtaatttagtttttttattgtataatttcaaaaggagacttatgttgaagtagaggtgttagtaatctatttatgaggaatatagccgtcagaaatgcattagactagtatttttgtggcattgcagcttgagcaagcaatgtcaaacccaatctatgatattgttggaattattttaccaggatcttagatctactcacagtatgttgatttaacaacctaaatataaacttctaaaacgatggaaaattaaacacataaaagtaagagaaatcttacttgttgaatctgaattctacacagccttcctcactatgattgaggtattacttgatgtgtgtgggcactactctatcacttagagaatttcgaaaacagagaaggtagagagagagagagagtgtggcggcttgagcagagtttttgtgtgagagaaaattctgtcaaagtgttacaaaaactga

SEQ ID NO: 380566 - DNA, 1083 bp, Cannabis indica
aaaaaaaaaaagttgaaacggtcaagtgcatgtcgtatcctagcttaaagagctcgattaattggtcaactttctaaatcatcctcttatatgatttatacgtatactgtatacatatatatatttatatatgcgtggcattaattgtagcttgcttttcattgtgaactgaacactgtacgtatcttagtactagtagatagtaggaggaatatagagacaaagtattcgtcgaagggatctaaaagaatcttctattttgtgtgtgtgtgcagtatatgctagctagtatgactcagtcaaacgtaatgaaataatgtttttttccctgataacataatgagataatgttaagaattttccttttcattcgattatttatgaagagttcacattcggtatacgtatgtgagtcaagacaattaaacatttgtggaaggatctaaatggatttttgacaaggtcataggtttatttaattttaataattaaattcatcagcatcatcgttcgtaagcacgtaggttgagctatattgttagtaataaattcagaggctaacttactgtatatacaatgagtaacaaactcaaagtaaaaatattacgcgcacacctccttattaatttatacaccagcattcttgtgggcactaacactacttttatactttaatgatatgacgtacgtatcataattgattagcagttctttataatttttatgctgtgggatggccatagcacttcatgggggtgccggcgacatgcatccctctttctctctcttccaacagagcgtcgacagccacgtgaggatgcccttcattactgcctccagattggcattgaaactatcaaagcaggaaagccggtcttggacattgttgaccttgtgctatacatatataaattccctaacctcaacctcttttttggtctttattttgggttttcttcttctcaactcatactcaattagttcaatacgaaaaatagttatttttaatcacaacaatataaattttttgtgactaaatgtaacttttagtcacaacaaaaagttacttgtgaataaaacata

SEQ ID NO: 380567 - DNA, 5134 bp, Cannabis indica
aaaagactgttttgatgtttaaaaagatgatgtgaaaattgcaggttgcgggttctgatcggtcctcaatcattctccctctctctggactcaagcagttccatgaaatagtaggtcactttgtggagatcaccaaagacagaattgaagggatgacaggagcaaatgttcgaacagtggagcccccgcagagataaatgaatgcaaacatgggttttttggtgattaaataaataattcctgtctgccaaaggttgctgatctagaggtagaaatgggattttgattaggggtgggattgtgcgttaagctgtttgttctgtaattttttttattcttcttcttctttctctcttcgttctattattcaagtctgaaataatccgattcatatatgagcaaccctagaattcggagatgattgtgaagcttgaattgaattagggaataataggaaaaccaaccaagttacttgtaattgccagtttgaatagtgtcccttctcatttacaacatcttaataatgataattgcttaagttaagtgatttattcttgttcagtcttttagctgactaaactctccattgacttcattaataaacagattgttattgcaggttggtttttgtttttgtttcaaatatagcttttacattatgataatcattggtattgtattgtattgtatgtcaaagattattttgatgcaaattctcaaataaagaaacaaaattagcttctccattttctctttaatttcttcccttatttgcaaaagaagtcagtatggtgattctatacttttattaatcatatagtgggtgacattacatactgtagattagaaaagggttgttgctccatcctaacaattttgtttttcttttctctttggttggtgtgatcctgaacttttacataattttgtgtcttgtaacactaattgattgactgaaacgaattgtggcctgctggatgatgagtttagatggtgtatggaggtgggaatggcagtttcttaacgatgccgcagcgcaaggcattgtctgggatgttgtactcgtccctgagtgaccgtgccggcgacaacacgcttatgtagagctgctgccccaggtaccgattctctgtcaactctgatctcaaattccacatcccagcattgtcaaatgtcagtaaaattgcagcatatgactttgggaacacctgaattgtatgcctgcttacggcatcaagaagattgtagtttcttctttgctctgggctccatttccctggtcctatgctgcatcaatagtaaaaacacacacacaaaataaagtaagtttaagtgtaatttactcagttttgaacaagggagtgtctctctacttacgcagctgcaaagaaggagtatccagccaaatgccatgactgcaagctcttctcatgattttcgaagatgatctccacgaagttgcggaaagtttggttgataacattaggagccataatcagtttttgtggggtgtcttcagctgttggctcgtctttaataatgtcgtacttgaagactttgttggctaccctgaaatactcagccagtttcaatggtgtggatgtatcaacatgggagactccattgattgagtaacgaagtttcccattaaccctgctagccgagtttactagcttgatggttcgagtaatgttgatctttccgtagtggtaagagccctgagggtttggcctggctgcactagctgtgagattccacctaaatgaacggaactggttgagtgaccatgcccagtttccaacaggggctgccgggagttgaggcgaaggagggcctcgcttggcgttggtgtaagtgataatggcttttcctgtcaaaactttcttggtgaatcttgtggaagccaccatgtagtaagcctttggctctttatcagctgtaacgagcaccgaaaagcattggccgacatggacatcgagggactcgtagatgttttggactgtgtgagagccttccatctcaacaagcttcattaggtggttttggattctgaaattgagtgaggtcttaagtcccacattacatattctgtacttgtaagtctttccaggcttcatggtgaagagaggctttcccctgcctttcttgtctagagattttccgtttatgagtaccccgtcgggtctggccagagaccgtccactgtccaagaatttcttgagagtggagtggctcttggtgtaccaatcaccgatgaggacggtgtaatcgtcctctggatcggcgtaagggacgggaatgaggagtcggctgttgacacgtaggcctccgaaacctcctgcagctctgtgcatggctgtggtgggatagtagatgtagcttcctatctgatcctttacttggaatcgataggtgtagttttggcctggtggaattgggcagttggttcctggtactccatcttgccatgaattcttcctgtgctgaactcccatcctaaacaacatcataaacatcatcatcatcaacattaagattattttcattcatccataacataacacatataataagaaggtaaaatttagggtggtgtttggttgaaagtaataaaatagaatggaatcaaaagtaaacggtttttattatattcttttgtttgattgcattttaaaatatgaaatgtagttttaatggaatagttttaatgattattctattttgaaatgaaagaaataatcataccaatgcaattattcttatgttttcattcttaggagttttaggtcttaggttaggagcattgttatttggtaccttaaagtgtctaacattacaccgatgtgacactttattattagtcaacagttttctaatatcgtttattaaattaaaatatatgagactcaatattaaaatgcacaaatatcggcgtgtcatttctctaggtcctagctcctaggtacacatgcatgattaagattatttgcatgcataacataacataacataaactctatatatgggtggtggtgaagaagaatcagtatgtaccaagtcaagagaaagggctcatcgagatggttgatgacattgacaataatgttattgttggtggtggagttgatgttgggacctgggaattgtccatttatgagaattccttgctgaggaacccctaatggggagattgtaccataagtgactttccatgtaaagtaaaggtaaggatcttctgcttcaagccttacaaccaaaccccatacccaaatcaccaatgacaacaacaaccccttcctacttataatacccatcatcatatataaatatataataaaatgacagattatatctgtctaattggtccctcttgaaataagataaagaagaagacgagggcagtcttcttctttgagcatatatatgtgtatatatatatgtatagagagagatcagaccggtgttattagagaccttatgtgttgttatataatatataatgttggtaaaaatgaaccacaaaattaattaatgaattattattagaaattaacaatggtaattggagtccttgtttaacgctcttcctctcactctctcttttacttttttttaaccccctttatatagaaattacaaccacaacttatagctcaacctttccttacaactcatcatcaaccttatgttttgtaacaaacttttattaattattactatgcactaatttggtcatatacaattataacattatcacattacattaatgtattctatcttttaatgaatacactctctttttagaactcaataaattacatgttaccatgcagaatatataatattaatatatagtttgtacaacaaatgaaggggtgaaattatgtttggtttagcataatgtaatcgtaatagaattactattgtaattctattgtttggtttggttttgaaaatattgtaatgccccctttacatcattatactattcatatgaatgagaattaattaaccatttatgtaaaaataaaattattcttatacctttgctttatacatttccattaccaaaagaattttttctgaaagggacattaccaaaagaatttaaagtaaaaatatttttattaatacactattaatctatattcctattccaaagataaatcaaacaccattatactattcttaaagttaaattttgaattttatattttacaaaaattactgattagactttttattttgttaaatgataaattgaactatgtatttatcaaaatagtactaaataatactatgaattgatttttcgtcaaaataaaacttaataataacccgatttattagaagtgttataactgattatgttttttacatttcttcgtgctaaaaattatctttaagttgattgtatatataaatgactgaaaattgagcttaggattctatttgtactattttagaaaatatatggtctattttgtcatttaacaaaaaagatggttcaatcattaacttttacaaaacacatagttcaaaatagtattaactattacaattatcattttatttcactaaatcaaaagcgacctaacttcttataagataccaagccaccattaactacactaaaagatcggaaaattatgtaacaccctaaaatattttatcggtataaatcgctttatattatatagatacatcttattttaaccctaattttgtcataaaaatatttatcgaaattataactagtcttctacaaaattttaataaagtttaaatagtttaaaatactattgacattgacattattctttaaaaatatttataaactataaatatatatagaaaaatatgtgcgtgcaccctaaactatttatgacttgttaacaaatttacttattatttctcaaaaatttataaaaaagataaatataactataaaatgtttccctttgtaccagcacaacattctccatgaacaaatatatttatataaggctaattagtaatttttcctctcgaactttaacatgtactaaatcatgttccctgaactttttttgccgttaaaaattccccctgaattattaagattgttaaattaaaggacttttgtctaatttta

SEQ ID NO: 380568 - DNA, 6422 bp, Cannabis indica
agagagagagagtggtactggtagtgttgatgggtaaccaatagcccaaacagtcttagatactctgtgtgctgagcttcaagaaacttttgatttggtcttttgaagatcttttgttgattctcatggacggcaataacacccccactccaatctcagagaccagatcgtacttcaccttcaggtacctttttaccatcacctctcaaaatcacatctttcttccttcctttctaattcatcaattgtaattatgaaatcattcttattcacttgatgggtctcattactttttgtctttgttttcgattcaaagctcatgaatttgacaagatcgcggtgtctaaaatatgtttgttaatttgtttcaaatgatagtgttctgaattatgtttggatctttgagacttgtctagtttataaattgggctttgtggcagatatagatagccttgtgtgtataatttggacttgatctgcccttccataggcttaggagtagttatcatgaagatctaggatctgggcattttgaggtatttttttttcttctctttttggctttttcatgtttgaatctcttgtaatagttcactgctatattattatctctagatttggttaaattcaatttattgtatgaattttcatgcctgtctttttgtgtggtcatatttgttgttcatgaatcatgatctcagtggcttttagctgacttaatattaaattttatttattttaagtagcgatctgaaaataattatacgaatttctaacactaagctattgcttttccacttcacgtctctctttcttagaattgtttacacaatgagcatgcccttgtgggctgttacattttatggaagagtgttgaagtttactgatatgatattgttgtacttagtagttagtatgaggtgaaactgggagcaattgcaagttgaatgttcttgaaggattgtttccgacatgttttgtagaggctttttaagtaaacatctgctgttattacttttgcaatattagtggattggattgttcaaacaagtatatggttttagaagaaatgagattatgagcacaatatatcattaattagatgaattgagagaatgcgatggagaatgtaagaatgctgatttcctaaacaggatagttttcagaggttagtcatcattgaattgtaaattgcaacacttggatcatttgtgggggtgtatacattgagcaagtgtggccagcatatattagactaagccaaccaaggaacaattttgtttagaagcttataacatttacaagtgaggactctcaataaatttgggaggtcactcatggacatctgaccgttgactcttttcctcaaaaataaaataaatattaaattgtcttgcattttaaacttcatgcaatatcaattttgggatctgaaattagaaccatctatccatcgtttagaaatcaatcacttgaaaatttaagatattaggagatgggctaatacttgtttctttttccatttgaaaaaaagaaaagaaaaaaaaaagaaagatgattgattgcttgttatgtccataccaactaagaaatacaacaatgcaacaatgtatctgtctggtgatcaatttttttattttttttattaatactaatgttataatttcatgtcttcgagatcattatttgatcaatcattacagccccactataaaaggattagatagatgttaactatttgttctgaatgaaagccattgagtgttagaatccctgtctctttaattgattgcgattttgattgagattcttttctgcatacaattgtagctctattacaagtctgttgatgtggtatgattacttcatctatatattcatatcattctatttattatgtgtgcataggtgtgcacgtctggatttgtgcgcacatattcataacttcaagttttcctatcctcgaattttgctttggttggtcaattatttgtactgcctgtgtttctaagactctaagtcactaagcctactcatggatgcagaagagaaacctgctgaactagataatctgaaggagcaggtagttttgcaatctttgaagctcatttgttaatttttttttttcttgtgtattaggatatctttagacataatgtttgactagaattttatatatttattttagcagcagctctcagcaaagaatgaaggatcaattcctccaaatccttcacaggatgctgccactgtaggtaatctgagggatccagtggtacagtcgggatctttggcttctggcggagatcgaacagtctatccacctaacatttatgctccacaggcccagccattctactatagaggtttgtccttgatttcttcgtctaaaatagaacccaagacacctggcaaataatttatgatttttcgctcatttgcttgttaattgcctttccaattactgtttctcatgcttctttagtgaggttacttttctttatgagtactacactgttttatgatacattgttgaggattactcaccgtttttgtacatttcgaaagatccggtgcagttaaatttctgtgtttactatgaagtaatttgtaattgttccgattgagaattatttgttagtgtaattgaaaaactacactgtttaaggtcctatttggtgtaggcgtaagttcatcatcaactttcattttgcccacatacagacaactttaaatatataaaagttcttatgttttacttaaagatcttgttttaaggaatcgtaaaatttgggttttaaacatgtttgctttggtttttcttttttgtagtttacaaacttgtgataaagtctatgacatttgctcttttatatcatatcaaattaaatttgaggctattcattatttatgctttgacatcttatgaattttattacattattcactgtgagtgctcttgttactagcaaaaattaaggtatattaaagtttcttactgtggtggtgcaactctaggttatgaaaatggtgaatgggatgaatatcctcagtacctcaatgctgaaggattggatatggggtctcctgtgagtattagtgttgttttttctttgtttgtttttacttttgtgtttttttaatactacttatctgttctcctttggtaatcttaactagggtgtgtacaacgaaaatccttctctcgtgttccattctggatatggttacaatccacaaatgccatatggaccttactccccagttacaacacctttgccttctgtaggtggagatgcacagatgtactccccacagcaatttcagtattcagggccaccttattatcagcagttaggcccatctagcatgccgtacatgagttcacgaactccaggttcacagccagagctcactacattgctaggtgctgaccagcaaggagatagcatgctttttggaccaaggcctggttattctgctgtaggatcttttggcagaggcagctttcctggaaatcctggcagtcctggctttcatgatatgcagcaaggttttgatggattgagatctggaggaatttggtcagattggtcaaaatcctcagacaggcagaggtcttttactcccttgtcaccggcagcttctccccagcccattggtccaattgggtcatttgggcagaatgctggaatggtttgctctctttccctttcactagtctgatgccttttgttctttaaagtttggggaatgattttcatgtctaactactatcttcgactctcaagtcattttaccaaacatcatgttatgttatatgattattcaccagtatgcataggggttttttagtcatgttttgtatcttatcatgtaacagttatgcctatcttcctgatatgacctgcatggaaataaatcttcacatttaggatttgggtatggccagcgtaaaacttcataaacgttgctgactagttaatgttttcaggcatcccaacatcaaagatctccttatggatttggatctggttcaaactcttacagtagaggctacttgcccagcggcattagtcagggctcaagtgcatcctttgccagtttgggaacaaacagtaggggatggctctcacttgacagtaccaaacggcgtatgaggggcagcgtttcactgtgcagctgtaatggaactcttgatattcttaatgaacagaaccgaggaccaagggcctcaaaaccaaagagtcacattattatagatggtacctctgccgacaataacaaacacaacacgacaactgttaaggctcgtgatgaattatacaatcgtcttgactttttaacagattacaaggaagctaaattttatatcatcaaatcatacagtgaagacaatgttcacaagagtatcaaatatggtgtgtgggcaagcacaccaaatgggaatagaaagttagatgctgcataccgtgaagctaaggagaagcaagaaaactgcccagtctttctcttcttttcggtacatatcgaatctgtttgaaggaaactcttaaatttatactctatactcttgtttttgtttggagaaaaatagcattatatccatgatgaatctgtgcctgaaatggtaactgctaattagacaaggcaacaaaattttgttttgcttcttcctgtgttcatgaaatctagttctgaaaaaagactcatgattgacagccaaaagaccaccagttattttaaatttctagttttataaaattttctctaactttcatctatctacaaaggaggggaaaaaataccatgaaatttatagtaccattgggacattaattctgttgcaactctgcataattttacacgtgtggactatgcaattaaatcattctgtttgcatctttgtacaatctttatatatatttcctaaatattgattctgatcttgttcaaacgccactagaataaattgttatttgatgtaattatatctgttccttcgcattttttggtgagaaattttgggctttcttccctcattttgtctgacctattagagttcttttcttttaacatgaaggtgaatgctagtgctcagttctgtggagtagctgaaatggttgggcctgttgattttgacaagagtgtagattactggcagcaagataaatggagtggccaatttcctgtgaagtggcatctcattaaagatgtacccaatagccagtttcgtcatattgtgcttgagaataatgacaacaaacctgtcaccaacagtagagacactcaagaggtaaaaatcttataattacattttttttattctactttattaaatctctacttgatcgaatatgatatcattcacatcgtaaaacaataaggaagcataaaagttccttactaaaggctttgatctagctggtgtattgaactggctgattttgtttgttggtacttggtagaattctatcttgtacaactaatttctgttgtggtatttaatttaatttgaattttgtaggtaaagttggagcatggtattgagatgttgaagatcttcaaaaactatgaaactgatatgtccattcttgatgatttcgacttctacgaagacaggcagaaagcaatgcaagaacgaaaggctcgtcagcaagccagtgtagttggtgttggtgttgcaaacgaaaatgagcatcgaaattctgttgcaatatctggtggttttataaagcaaatgtctaagagttttgcccaagttgtacggctagacgagggtagtaaagaaccttccctggttgaaagagcaacgcctgccaatgatgtttcggtgggcaaaattgtaaaactcgaagatgctattacagcagccgtatctcctgctcagagcagttaatattgtgatctggtttgttgtgccatatgtgacacaaaacatcaaatttactatggttttcattattttgtgataaaatgtaggctcttatgtctacttaatttattattgtattgtatgttcatcaaatatgggtattttataagttctcgaagcctgacgagcttcttgtataataatatgcttcacaagagctgcatttcaattgtagccattagtttctcctttccagagtttgtttttggtgacactgaaatcaacgttgtttacaatgattcttgttacaacaatgtttaaacatctatagaataaaaaaaactccgtacaaatgttcaaaaatttagaatttcataaaaacgtaatttttttttaattattttggacatttccaaagggaaatttgaattgctatacttacattaccttaaattttttttcctaaacttatacttaacataattagttatatatgacactttttgtgtttttctcataataccctccccaattacatctacccact

SEQ ID NO: 380569 - DNA, 1089 bp, Cannabis indica
attattgaaaattgagctcaggtttgtcatttaataaaacagtgggtccaattagtaacttttaaaaaacacagggtccaaaatggcatttaccctataaaaaatattttttttgataacaagaggaattgagatggacttgccccttttccttttattattcattaacctcagatgcagatcatatggtctaattcctttctttgatggcgttcacaggtcatatgctttagtgcctgtttatgaggctgtcacaaggccaattgaagaatccccttcagggagcacaacaaaagttgagcaagaagaggctgacagcagagaagtcgtccttcctggtgttaatcttctttttgatggctctgagttgcatccttttgacataggcgcttgcctgcaagctcgtcaaccagtctccttaatagcagaggcagctgttacctctgcagcttttgctgctgttaaataaggacttttgatagagaaccgttaacttcccccctcccattactgaaacctgtcatccatgttcatctgttctgattttttgattcgatctttttgagattggcagtatctactggcttaaagtcaaaatcagcttggaggtaaacaaaactttccccctttggtttgtgctgtcaaatatccttgaaatcagttaatgatattgtaggcaacactcttgattgcttaaccacactaatttatgatcaacactatcatgaaagactcttcttcgtatctgtatttacttgttggatacaacattatattttcatcaggtcgagccctcaaaactcttggctcatgtttatgcagttcggggctgtaaaaccttttccagttactccatccaagactcttcaggtttgacttactatgaaaagaaaagtgactgtttttttaacttccaccctccaatgtcttattatggcagtgtttatagatgaaagaattatctaaagcaaaggggaaaataaaaataaacatgtatatattttattagaaaatatgagaactcatcatttatacagttttactccttaaatttcttgtaaaaatgcatttcaaaaaagaaaaaaaaaa

SEQ ID NO: 380570 - DNA, 666 bp, Cannabis indica
gaaacagatagcttggtgtgtgttcaaacgatttagagcgatattttatgccttcacaatttgagttttgtaaaacgatctgcaaataaattgactcattgcttggcaagaaactcttgtttctctacaggttgtgtgcttcagttggaggattgttcctctgaagtacgttctattattttgaacgaatttattaattaatagatcatatgatttttattaaaaaaaaataataattcttataatattaaaaattaaagagaacatttatcattaacaagtcctttctccagaaaatatatctagttataattcacacacttaaataatagtaacatgtacaaattataacatcaccctaacttcatctcttcacccaacacaaactaatataaataattttagaaagttttctacaaaaaaaaaaaaattaaaaaaattagaaggtaaaataattaggatattctgaattcgaacaatttttaatatagggagaaggagctttagtgactaatttaaatggtgataaaccaagagggtaaaattgttgtgcttatgtatatagttatagaaaattgctaaaaggtattattacttatctaacatttttttttggtattatagtgctattggtgtaattaagtatcaagttacatataacttaaa

SEQ ID NO: 380571 - DNA, 1208 bp, Cannabis indica
ataattaaaacattatttatttattacatgtaggtgaataatgagtgaagttatgactttaatgtcaacaataatagttattaaaatgatatttacaaataaaacggcttatatatatttggcttataaattactcatcattattaaaaaaaaacatggaaaataatgtatttgatcaactgtctgatcaattcagtatcaaatttaattctagttattcaattcattactctaaatatatatgtataaaaaaaatatatcagtttttgggtaggccgagggtctcaactgataactatcttaaggattctgtataagttttaatttacttctcggtggtctatgatattactattaagccaaacagactggggatagaatgtgcattacctgatcctcttttttcacataaaatataaatatagaaaaaaaaatgattatgagtgtgtatatagtcctcacttagttgctttttagagttcgaatggtgccacttcttttaagctttttatgtggcgcgcctttgaaagtatacaggtacctgtgggtcctttggataggttcttgtgtgggagggttctcaggtcgcaaccatattaaaaataagagaagttgaagaatatttttttttatacgttaattaaatttattttttattaatattgtaccgaaattatcatcacacccttacataactaatactcaatttcaaacataatagattatgctctttggagatgaatgtgtaggtttgtcggaaagttgaggcaaaattttgattagagaaaaatagagactattgtgaagtaataagggtaaaattagtagaataattgaaaaataagtaaacataataaattttgaaagagaataggaaaattaaaggtattaatttaaaagaagcatatagtataattttcttattatcgattatgtataagtctcaatttacatctcggtgatctatgatattattattaagctgacagaatcggggaataggatgtataccacttaatttttttttcacattaaaagatatttatatatatagaataaaatgattactaatcttttataactactaactaagtgagcttaaattaaccataattacatttagattctaaacaatacaattagtagtagatccacttagtgcaataagcatttgttagagattttataacaatggaagaaaatcaaga

SEQ ID NO: 380572 - DNA, 1332 bp, Cannabis indica
ggttgaaaaaactgcctctaaaaactaacatttcatcccaattggtgttctttttccagttgcttccaatagagttcaaccaatgtagaaaaattgtcggtggttttgatactttcgatggccaaaagtaattttgatatacaattttatttactatccttgatacggaagtaactttttccattacttggccagtacctatcatatcaacaagattgatcggtttggatcttgggaccctagagagaatgatcactaaaacaattaaacgtacttcttttcatacatatatatacatacatgtatatgtataatatatataggtacatatatatgttaatgaaagagttacgtacgcaaataataaactttgagattcaatatatataagagatcgatcaattataaatacagacattgccaagctcaaaacacaatataatgagagaaagaaagttctttcatatatataacgtacatatgaaagaaattttaatttctccttattttattataacataaaaacgacataatcagccagaaaaatattaaatatgtatgatctcatgcacacacatatatatgtatatccactttttattattattaaaactccaagactccctttcctttctttcactattcccaatcatcaattaattactagaccagaactgtttctgaaggtcaagaacaatattcttgtccaaacggaaagccctagcaagaagatcagcattaataggaggagtggctccaaacacagcattagcaatggtaataactccgggattttggctactaagaccggcgaaagccaccgcgggagtctttccgatgttgagctggaagtgaatcagtccaatcgggaagacgaacacgtcacccttgttcaagatctttgtgaagagcaagttcttgccgtcggcttggttcgaggtcacgaaccccacgtacagtgttccttccaccaccaccagtatctcgctagctcgtgggtgagtgtggggcgggttttggccgtagggcgcgtagtctatacgcaccagtgagatgccgagggtgttgaggccaggtagggtgcccacgttgacggtagtgacgtttgatccgactgggttcatggtgtttcccgggatgttaagccctgagaagaagaaatcttctgcctttacaagttttgggtttttgcagaattttccattcacgaacactgctcatcatcatcaacaaataacacaatgttaatgttaatatgacttttatgtaaattataaataggtaaattttatttatttacacacaaaaaaagacactttattttaataattt

SEQ ID NO: 380573 - DNA, 1662 bp, Cannabis indica
gttaactacatatatattatatatatatatatatattcaaaccaaaaaagaaaaaaaaataacatgtcataataataatatccatgtaataacaaattacgtacggctctaaaagcttgatggctaactaactttccttaaaattaactcaacctcccacaaccttaaataataactccctaattaactctgtaaagatctcttttctcttaaaagtaataattaaaaaaaaacctatagcaaattagctctacgtaaatcaaaaaagaaaaagaggaaaaaaaaaaaagaaaaaagaaaacatatatacgtacatataaatttatgccggagatatgcccggaggacacgtggcatcagcacagatcctagaggtgaatatcttatcggcaaatgacttagctacggtggccaaattgatgaaaacattcgtggtcgcctgggttcaactcgaccggaaagtgagaacccgggtcgacccgaacggacatactaacccgacgtggaacgagaagctcgtttttcgaatcaactacgactctctcatcctcaacgactccgccgcctctctcaccgccgagatctactcaacctcggcacgtggcgtcgacacgctcgtcgggagcgtggtcgttcccatcagcagcctctttcctccctcctctatcgcctcacattccaagatgcagttcatgactctccagattctccggccctcgggtcggcctgagggggttctcaacgtcggagtctctttattggaaggaaccagacgaagcttcgatctaagctccgtcgcgcaatcggatcagatacccgacccgaaaacttaccataacaacaacaacaacaacaaccataaaaaccagttcgccaatgggtcaaaggcgacgccaaaaaatcagttacggcactcgaaaagtgaacgatcgataatgagcggagctcaggcggcggacaaaaagggatcgatgtgttcggacgtgggaccatcgccgtcggtggtggcggcggcaatcgcgatgggattatatccaagaggagcggcgacggcaacaacgatgacggaggatgatcagacggcggctagaagctcgatcgttctgaataattggatcgaagatgatagcgtggaagggcttaagacgaaaatcgagaggtggcgatcggagattcatccgatttacgagaggaggcagcagcaggtgaataaaatcaattacggaaggtcgagttatcggaggaacaacaacaatgaggcggcgccggtggcaaagaggtcagagcacagacgggccgggtcgggtggcgggttgttctcgtgctttgggacggcttatggttgcgagtttttcgatatcttgtggtggtggtagccgtaggcataatagtaagaagtttgataataatggggacaagactcatcttagcctatctgaattttcatacgatgatccgtatgtatagacttttcatcaattctttcattttactatagagagtttttcttttttccttcttaaacaatttttatgtatataacatttgatgatcatgatatatattatgcatgcacttacgcaatgtagagacgagtcagcttagcttagtttattttttatttttattttttatatatttaaaaaaaaaacaacataattt

SEQ ID NO: 380574 - DNA, 1787 bp, Cannabis indica
gatgatgatatggttgatgatgaggtaatcacatcactatttttattatgattattattattattattattggccaaattctctctcccttcctccatatgtatataattcatcatattcatattcaaccttaataatatatatgtaaatataggagaaggatgatgatgaagactgccaagggaatgcaatgcataatcaagcttaatcatatatctaattaatttcatctttcttatcatgcaccaggtaattttactttaaactataaatactttcatttaacacgtgttggttggtttgtttaaaattaaatgttttgtgccttttgtttttggtcagaggatttgttttttgtaatggaggaatatgcagtgcagtgcagggagctctcttatattttaacatattataatataatatttgtttgaggcttaattccaatcagtcccttcactaccaaccaagccttcctactttttcttagtttttgaaatgaataattaataaatagatgagcatcattgtatgtaaaaaaacaaaatcgaagatatacactatatttctagtagtgtaagaagaagagaaacctgaagaggaatatattggcttcttcccaagagtctaatagcattcaagtacccactcttaactgtgtatccctaagaagttgtaatgccaaatcagtctgtcttgagagcttcatcacacgaaaaataggtccttaagaactttgttccaatccccattaagaagcttaagatcactaaccatggcaacatgcggttgcggttgggggcaaaatgaataagagatacccgcatacttgatattcacattagaaccatccccaactctactctaccccaagggaaaagagcttctagacgtatcttccaaatatttatgatgacacttattatgatgctcaatttttttatgtaatggattggttgggaaaactaatatgatctatttggcacaacacaacatattagacaacaagagtttagaacttaatataactctcccacttaattgctaagatgattcatgattactactataatggcatgtgtacttaagaaaaatagaaatcaattttcatttgtttactaaatattgtaatgggagaagctaatgaggtccacttaaattagggagaaaataaaggaaaagttctctccctatttttccctatttttacagagaactcacttcatttttatttttaatatgctacttttgtcggcgcacttagtattgctggcaaaagtggaattgaactgctaaaagttctcactttttggctgttggtttggccaccttttgcgggcaaaactaagatacttcaccgacaaaagttacttatgacggcaacttatctcaccgacataagtaatacatgcatgatggaatgatctggctaccctttactggcgataactgcaccggtaaaagtgctttttcttataatgaaatgaaagttcaagtttatccaaaagcaaataatcaatttcaaatttgaatctaaagtattaaaattaaaattgtaaatcagtgaacacagaaattacaatcttcctctcacattagaaatacattctaaccgagtattgtttgggtccccaaaaattgggtaaaataaccttcactatgaagtcattcagaatacattcttcagtttaatttacaaatcaaacgaggtatactgaaatgattgcatacgaaagttactgatagacttgattaacaatcaagaacaaagatctaagtcctcttagatc

SEQ ID NO: 380575 - DNA, 1607 bp, Cannabis indica
tcttaatatatattttttttaatacaacttataaaaaagaatagcaatttgtttggtataatatattttttttctttatatacatgtgtatatatcatctaaaacttttgttatttattttccaaattgtttaattagacctacttggagtaacagaatctaaattaattaaacaataattttttttcaaaaaagaaaatagtatttgagtactaaatattttaatatgccgaaaatgctgacagcatatattgatagaagagttttaatttaataaaaatcaaacatttggagtctgttataacgacttttgaccatactaacccaatacaaaccaaattattttattttctcaggcagatcagaatatatataagcttgagtttccaattactttatttaattaattcaatcagttcattaattaattaatatttttgttattaacaatgcaaacacaatacgtctgttatttaatttattataattaattatctcttgccgactatagaggctcgtgtcatgcttaattgtgcttctaattattacttttaaaaagttaataataataatattcagtaattaactttccaattagtatatgttgtttgatttcaataattatgaaatattctatcttgatttttaaaaggaaggtccattggatctaggcacatataataaagcagcattttgattataaattttttatactattggatcatgaattattgtattatttatttatgttagatttcgttgggaaaatttaaaagaaaacatcaacttgcgttttccaatttttagaatttcattcaacaactacttcattattaagaataatataatgtcaaacaggataattaaaataataatattttggtcctgaagaaagaaaattactagttttatataagctaagctacacttttgggaagataatatattaatatcataataacactccaagtggattgaaaagtagcctaaacgaaggtacaatgcactctcctattttaacacgtgatgaataaaatttaatttagataatactataataataataataataatatccctaattaatattgtttattaaattttattaagggttttgtcgttttataaagagtgccttgttttttcaaagtaataaaaaaaaaaaaaatgaagccgtggagtggaagagtggaggtatgatctgcacgtgctatttttggcacgtggtgactgtaaagcacaatgtcgtttgtgtcaaataatagaacggagaatagtggaaggtggtcaaagtcaaataagacccagatagtcattggtcaatttcaacaggtttgcctttgctgacgtggcaatacgtttatcgttggtacttgtatacctgtatcgttgttcttaatcggacggtaactaatgacacttcaatcatcatttatattcttcgtaaaagcaaattatgtaataaggtttggtgttttataattccgatcaggggcggacccacattgtagcgagggggggcaatcgccccctgaaaaaaaaatcgagaaaaaaatgtatatgtattttacttagttataacatatatttgtattaaaagatgatat

SEQ ID NO: 380576 - DNA, 2280 bp, Cannabis indica
tagcttgaatttttatttttattttctaatcaaaccactattttgcagtttttctttttcattttaaattgaaaactagatcaaatcataaaatgttcaaactaaactaaatccattaaaaaaaaaactaaaccaattcacaacttataattcatgtttattctaaattttaagtaattatctcttttatttactatacttttttatttttcaaagttttctttttataaatttcaatcaaactcacaatcctattacagaaactctattttatagagttatagcttagtggttatcaaactctattataacacgtaaataattttagtacataaagattgtttacaaatgtcaatatatagaaaagatattaagtacttaagcttagtttaaaccgttgtcaagaattctaaaaacgtgattgaaatcaaaccattaggcaccgaatttgtttggtttgttctagattggttgaaatttggaattttcaaattgtatgaacaactcattttacagtggtattttttttttattaaatgtataaatatatctaattctaaccagaagtgaccttggtgttgatggtgagaactggtcaactactaacttatacttcaagttcaaaaatgagatgaagaagaaaatgaaatataaactcaaattgctatcttaaaatggagagaataatagaaaaatttatattgttctcaatatggttttacaagtatgattttctaaccttctcttacatatgagaatgagtatttataggctctaatggcgtggaatacaaagtggtcccaaggggacaaaacatcgctttcatgatgcataccgcaggtgctagaggtagccctgcaccttgtacccttgtctggtgtccggtggtctccggttgcaggagtgtgataacctggtcataggttgcaggttgtaggctgcaggagggtggttgcagcgtacccttggtcaggtcctcagatcttgcaggttcactgtcaccgctactcgtacctcctcacttttagagtcttcagaaggcgtagttgcacgcttttttcttgcacgccttgtcctttgattcctcctccaatgccattttgtcgatatgcattcacctctcaccttacatttacaaatcccaaacacacacacaagcaacacaatgaatcgcatgcaagcccccacatgggcttgcatgcgagccttcgaggctctctccttgcactacggctcgaaacctccacaacacacacgagcaacacaatggctcgcatgcgagccctcgaggctctctccttgcaccacagctcacaacctccacaacacacacaagaaacacaatggctcgtatgggtgccccccacttgggctcgcatgcgagccccagaggctacaactcgcacacacacacccctcaccataccacggctcgcacgccttacaccatgcaccaccatggcttgcatgcgagcctccgtcttgcacccctacatctgcacgcactatgcatgcacacacctgcatgcatacactcgggagcacatacttgcatgcacacatgcatgcattctctacgcctatgatttcttcattaggccaccatggggtcattcatcgtatcgtactggtgcaacccaagaattgagagtattaacgacgactttatgaaatacctaccgagtaggtaagcttgttgaatgtgcttccattaatcactctcagattaattaactaaccttggaagttagcagcgctaatttttagggttaacacttactccccaatctataagaatacgttcaagtgttcttgtcgactgagtgagctgggaaatttaccttgccaaagagtgagaccctcttagtattcttcgaggaagtgctcgatttacattgggggcttcccttacttgagtcttacttcacgacaatatgttggtgtagtggattctcctcaccttggctaatcctcttttctctcttcttctttttttactgagcgacctcagcccccatgcggtcgagctacatttttacttgacattgactgaataactctaagggtcgctctttgacctagcaactttcataactaacgttggccgagcgactttgggggtcactctttggccaagaaacttttgtaactgacattagccgagcgattctgggggtcactctttggccaagccattttcctcgctgtggtaagcagacatccatttgagggagtggctctttaagcaatctcatcctcttattatttctccatcctttt

SEQ ID NO: 380577 - DNA, 2233 bp, Cannabis indica
gatttaatatggaaaaggtaggacagcttgataactttcacagaatatctgggttggaaaatattaaagatgtaagagaagctttgaaggctaatttgaaggataagaaatgtctttctaaattgactttggagtgggaacttaatggtggtgtgacaactaattcacaaaaagaagaagagaaagggaaagaaagggatatacttgatgcacttcgaccaaatacaaacttggagcatcttgtgattcacggttacagaggctcaacattatcagagtggattggagactcttcattttgtaagttagtatcaatgagcattatcaattgtaagaattgttgtattttaccgccacttgggcagctaccttttctcaaagatcttagaatcgaggaatgtgatagtgtgatctcaataggtgatgatagttacaagggtcttcctctattcagatgtctagaatcgttacagatttcctatatgccagaatggaaagattggtcaattaatagtgaagctattcaacaaggtcaaatatcattccctcttctcaaaagacttgagctgtcgtattgtaaaaagcttagagttggattaccaagttgttatcttccatccttggaagaactcactgtatggaattgtgaacaaatggtgagtttggtcccgataacagaatcacaacagactatcacaagcataacgcttcccaatgtgaagaagattacattatgccactccaaaagggtctttgatctgcatacactctcatctttagaatccttaaaaatcgtagattgggaagatgattgttttcccgaagacgaagggctgcttccgaccactctgaagacacttcatattagggagagtagtaagcttgaaaccttaaacggcaaggcctttcaacaactaacatctcttcagaaattgtatatttactattgtgaaaggctgcagtgcttgccaaaaggactgcctacttacctttctcgtttgtggatagctggatgtcctttggtaaagcaacggtgtgagaaagagaaaggagaagattggcctaagattcaacacataacacatgtggaagtagattgggaacgtatcaattaaatggtctttctgcatcgatctctctgtctttagataggtaattaaggtttcattattattattattgtgttgagatctcgttttatttgttataaaaaaattgagttttatttattatcacattaatgatggatgatcaatccaatcatcagattcacattcaaattgtatttataactcattgaatggaagacaaagaaatgacagattgatacaaagacctacttacattcatgaggtaattaacttatataattatatatatagttaacagtattgaatactaattgtttcaagcaactaaatgagttcccttttgacagattttgatttgaagtggataactttaaacagggcaaagaagctgggttttgatcttcaaatggagaaagttggaaaacaactgcaaaatgaatataaaatggtatatttatttattttatgaaaacttgagttgaaataaacaactattatatttgttttctctaacattaaactaatcatatgatcattaaaccatgatcacaggtagtgcttacagatttctgatgccgagtcttcaatccagttttgcatctcaaagtgttacatatttaccctattttgcaatcgtcaaagacaacactattttgtagttaattattataagcttattaacttaaaagttaatatcataatcccaagtttcttgtatgcttttacatttacaactctggttcataaagtctggatgagtatttaacattaaaaaagaaaaaagtcccaatcattccttatctttacaagacaaagactacaacttcaaatcaaatatataatatccatattagacattacaaaccaaccattatataataccattaattggattccttttcatatcacatttcaaaaatgtctcataaaaataagatttcaaccaaccaaatataatgttgtgtggttgatattgaagccaacacataagaaggaataccaatccaaaatgttacaaaagatcaaatgataaatttatattagcatctaaatcctttcttcaaccacaggtacatctttcatcaatattttgttccaccctcaaccaaccatctttgctactgattttttttttttttttt

SEQ ID NO: 380578 - DNA, 1486 bp, Cannabis indica
cccgttcccgcccccattaggggattcctcgccccatccccgatggggaataacggggatggggacgggggagcactccccgccaattccccgccctgtgtgcatccctaaaaatgaggctatttttagttaactggtgaaaaaaaacaggtatatttcaacttactccaaattcttagcgttccacattagcttacgggcctattcactaagcccaaataattcaatggctcaatcagtgagcaaagccagactaagatatagttcaaccacgactctatcacaacaattaagtcaaacctatagatgtgaaaggttgatgcttattcaaattatcacgtatccaaggaaatacaaagaattacattgtatacccactttactttacattttttaatttttacctttatttttctatattttttaaatatacccacttttatagataatgtctccattatacccttagatcaatgcaaattatgtgctaaactaaagtagagagtgagggtgtattgggaaactcactcataaaagtgagtatatttgaaatataatttgaaggtatttttgattaatagatacaaaaaaaggtatttctcaacttatcccaaggaaatacatgcagagaccctcaggggtcatccagaaagagtagttgaaagggtgttgcggagcaccgactatttggaaacaatcatacgttgtatgccccaaataagaattcgaagaaactaagggtctgtctcatgtgtcaaacattagaaaggcccgcagcaaaaaagaagatcacactttttgtccaacgccatgattctgacatcccacaacaaacaggcagctcacgcccagcagtcaccatcaagtgatacgcacccctacggacaacggtcacaaactgaattgcgcctcacctaccgttgacctcatttttagtcaatgacacggtgtcagtaaaatgatgatataagtgattaagtaataggagtgttcatcaaaccgctcaaactgtctgcaccgacaaaaaaaaaaaaatgtggcttgaaattctttgcggtgcggtcgtggtttgaatttttcctaaactgcgcggtgtggcgcggtacagtttgcggttttgaattattaatatgcggttcaaatcgcgacgcactgcatattattaaaatattaatttttatatttatttaggtccaatatgtgaaggtccagtccaaacccactcattattgtattgttgaaatttgaaacttttttttcatatttattttcaagccttatggtatttttgataagtgttgctcaagttttgctgtattttttatagtttatttatttagtgatagttcaaaccgcagaaaccacactgcactgccctattttttgcggtgcagttttttagtttcgcggtgcgagtgtagtttgggaaattgaaaaaactacatgtgcgggttggtttgaaaaaatagtcaaaaactgcaccacc

SEQ ID NO: 380579 - DNA, 1666 bp, Cannabis indica
agggtgggcgaatgccccacctcacctctatttgggtccgcccctaagtgtcttgtgccatataacttagcataataatttttagaacattgctattaggcactacaattctctttcttttggaaagtctacaatatttccaaggtatacaacatcaataccaatgattcctaaaaaacaattaatttttattaagtttttttaataacagagtgtccttgattaattagctctctttagtataccagtgagtattatatcgctattaatattatatatctttaggtaacattaagtaccattactatctaataacaatgataaaaaaatcacctttcttttttattttggaaggtctacaatttcaaaggtatacaacatcattaccaatgatgctcaaaaaaaattattttattaaatttttttagtaaggaagtgtccttgattaattataactccttcagtataccaaaataaaatctttttatcacaataaaatttgtgagtaattaaaaatgaaaaaaaaaaaattgtggctaaatatatcatatatattaatattatataattatttgattttgtagtccatattatatattaatatttgaacaggaatttgaggttggagtaccttgatttgtacctaattcattggccaattgcaatgaaacctggagaatatttagatttcaagaaggaagatcttgttggtatggattttaagtgtgtatgggaaagcatggaggagtgtcaaaacttagggctcacaaaatccattggagtcagcaatttctcatctaaaaagctccaaaccctacttgccactgccaaaatccctcctgcactcaaccaagtatactttttcatctcatacatatatttgatattgttctaattttactatataaatatatgtgtggtcttaatttaatcttattttatatcacatgaaaattgtttatttcacaaaatctatatatgaatttaataaatttagttttagaattcttaatatggcggctcacaccttgactaagtatgttttattggctactgttagcaaggtttggttgcccgactatcttccttgtatttaatgaatgaatacaagtttcgtgtccgctaggtaccctctcttagaggttttctctaagaagatggagtcgttgggaccgtttctctcaagaaaattaaataattccacagaggccagatctgatgaatacatttataactaggcctaaattgtcacaattgctacaagcaattataatatgtgacactaatttaattacatgctgctattgagaaatggaagtaataattaatgaaaaaaataacaaaatagcagctgggactacatatacatgtatgtatataatttctttgtgtggaattgatgttgatttaattactctttatttgttgtaataggtggagatgaatccagtttggcaacagaaaaaattaagaaaattttgccaagaaaatggaattttaattacagcatattctcccttagggggtaacaaagagggaacatggagaacaaatagagtgatggactctgatgtgctcaaacaaattgctaattccaaaggaaaaactattgctcaggtatactatatatagaaaccaattacattaatattgtttatattattaa

SEQ ID NO: 380580 - DNA, 700 bp, Cannabis indica
tgggccagattatatgatattaatcttagctttgggtacaagaaggagagttttttccatccgcatggcgataccatacttctcactcatatcaatgtcattcaaagtctttccttgtgggagtgaccaatcaaaagaatgtataaaagcagcaacaatcaaaggaatgtgcttagcagccataggcattccgggacacattctccttcccgacccaaacggaaagtactcaaagtcatttcctttaaaatccaaacatgaattcacaaacctctctggtttgaacacacacgcatcttcccacaaactagggtctcttccaatggcccaaacgttgactaaaatctgagatccctttggaatggtatagttcataactgtgcatgtctcaatagctcggtgaggaagaaggagaggcccaactgggtgtaaccttagggtttcttttacacatgcttggagatatgtcaactttggaagatcagaatctttaactgctttatcttgacctatttctctagcaagttcctcttgaacaatcttcatgcatcttgggttctttataagctctgccattgtccattctaccatcgaactactagtttctgttcctgcaccaaaaagttcctgccatacaataaattcatattcattaatatgacctttttattttattttttaaaaagaatttaaataagtg

SEQ ID NO: 380581 - DNA, 2773 bp, Cannabis indica
gactctgcagatctcgacttggcggctccaagttcaactcctgctgtccctacacaaatgtagattagaatttttattagcatttcagcatttacattttgtattatatagactctattttcatgttctgcatagcctgtggcctttttagggcctgtggcatcttagcttcggaacactactcattttgcgttccatgtggcctatgtcctatgcggcctggagcctttttagaacaatattttcatgtcctatgtggcctggagtctttttagaacattattgtcaagtcctatgtggcctgagtcttgtcgaagaaggcttatcgaggtgcataatcctagatcgacgaagatgagtcttgttaataagtgttttgacctctcttgaatatccagtgtttcagacggtgttgaagaatcaacaattaagactaggggtagtgtttcttggttctctcgctcgtgaatgcgaagaagaagatgaatgcactaatcaatatggtggctcattcaccaaaagtcgattgtcatccttttctctttgaaaatttgaactcaattcaaaatttgggcaaaagtcataaatgggccattttcacaatatttatatataaagctggctatccgtatgactccagatcaatggtcaagattatgtccaagaaaacacacgatatcttcaacggtctgggaaagctgtcagtcatgcatttaatgagatgcttggaactaagatatctaaattatgatattctcctccagatgcgcgctcatgtaatcaaccaccattttgccaagccatactacattcattccattaaggaaattaatctcgatgagctgaaaaaattattccatgtgtcattttatttgaaaaaacaagaagctgtcaacaacaaaaagtttggtttttaattcagaaggttcctccttttagcctctacttctcctcacatcatttgggaggaagaatgcaagcttccataacccaagagttctgaaagcttgggggttaaatgttattcatgtttcctaatggggacacgtgtaattctaaaaaggttatatcaagttacttcaagcctaacaacatgcccaatcgagataatgcactagattcattaagttagctctttcggatgatggacagatgacttgtccgagcgatattaccctctagcatagcgtgtattcagaaggagtcattcaggttttctagagaagtaaatagcgagcattcggatatccatctccatatcatactcattaattactaaatcccacgatatcatgactcattttccaagatctcatctaatgattatatcttcccaatatggaaagatagtaattaacgatcaaacatttaatgtgtctttatttttcatgaaagtaggacacgattttgataactaccaaatgatgtggcatccatatcagtatacaattagcgcctcatgggccgggctccaccatatgggcccaagtcaatatattattggtatttaccccatcagtgggaacattgtaatgagaaaaaattctagcactataaatataagaaaacctactcatgcaaaggcttaaaatctcattcctcaattgctccagaaaattctagggttcaaacacttgtgtaaatcataaggcttttccaatcttatagtagtaatactgatttgtaaaataaggctcgttaataccccaatcacgtaaaaccttcgattttattttatttagtatttatctatttctttacctttcacatagtttaaatttgtatctgaaaatcttggtaaacactacgtaaccaagcccctaataagaagatccaaaatttactaagttaatttcctagcttattaatttctcctgactatccactatagattccgaaccacactcttgattataagaacactctatatactaaatatcgatactctatcaattattcattgtttcaatctaaagattcattcatactctatggtagtttacatcaagtagggacaaatttaccattttacccttcaatatattttatccttaaaacacttagctccttgaaatgatattttagtaaactaatataattaccgaaattagcgctctctcatttatcacatttagtgaagctcaaaggaagccatcgtttcacttctaaatagttatagacgctatagattctattgttaagaacactgtaaaacttaatttagccctaattaattcatgagaattaaacaatagaattatagattagcggaagcacaccgaattccgtagaatcgattttgaatggtatgatcttctaattttttcatcaaagttttctctctagaacctgagttttcttgatgatggggattcaagaataattatatgaagcgatacaaaaaaatggggactaatacctatttattaataactgaataaacagtaaattaatcctttttgactattcttaatttggcctctcatcaaaatagaaattgtccttatggtatccacatattaaaatcatggcaatcatgcccttaagtcataaactttattccaaaattgaccacataaatttgacttatttatttgatgacccaacacacattcttatatatacaattgtgacaccaataatttctaacagtctcccactgggtcgcatatgtatacatataaatgtgtttaaccttattgagctcataactttggcatcataactgtagggatgtgcaatctcgtccattaactatatcaacataggatca

SEQ ID NO: 380582 - DNA, 3745 bp, Cannabis indica
aaaccctctccaccttcggccttaagaaaccctaaggaacaaagagcaattcagagttagttcacctatctagcaagaatttcaataagaattataagggaattggaaggaaaaaccaaggtaaactttagaacacttatcttattaatcttgatgaagaaaagtttagttttatgcttgctttgtaaatttggttttgttatagtttgattgggttggaatttgttttttaaagcttgaatttaacgttttttttttttttgaagtagtgtagctgatgtagcaattggaataaagttttgagtttggaaactcaaagcttaatctccaaaggtagattttatttcagggtgtttttattgtgtttgattgttaaactatgtttagaatatgttattaaggtattctgaaaagtttgagaaactttatgggtagatttgaggtgggaaaatcgagtttaactagtagtttgtactacgaaatagtccaccaattatgtagaagcaatgaattgtttcctagacaggactcagggaaacggtgaactgtttggggatccagtctaccagttgaggtgatctttgagtaccttaattttcatgttttcttgatatttaggatattttcatgttatttatcgataggaaaacttctattttgagtttacgtccccaaaaatattttagcgagacattcactagttttacataaatgtcacttagggcctccaatcattgagcaatttttttcactcagtttgaccagcgcacctaattatggaatttagaaaagattagtataacacatgcatgtatgcacatcgttagtaggcatgtttcaggtgccattatattaacatatcaatgtattaatgaggtttacatagagttgtactgagatagcaacaaatatatgtaaggaaaaatgtaaagccatcaaatttgcatatcaaggtattggtgaggtgtacatagagttgcattgagatacgacaaatatatgctaggctttcacaaagaacgaactaatgccaccaacactagtatgcctagagtacttagtacatgaggtattatggctagttttactttccttaagaacattcaagactcagtacgaactttgtgattagatttacgggcatctagttgcgggtcggttatatttttatgttttatgcttttcttacttagtgtgtcgactcacagatatactttcatttgtatgtaacggccaggggtgaacaattatgagtattggagcgcagtgatgattgtacatatctttatgattagacctgtagtgtttgaatcttcgagattatataggctcaaagttgttagtcgcaaggtgaaatttttgttatgttcacatatgaataatagatttcgagatcccacattttataaaatgtttaaatttacaatatttatatatgaaaatatttatctatttatttattataaagttttgattaaacatgattttataataaatcctttgattagcaagggtcaccacagtaattatgaaaatcagagtggtgtacctaaaccagtagggtgttacatgttggcactaaaaaggaccaaagatttaaaaaaaaaaatattttttgacacgagggctcctcagacaaagacaacaacctcaaaatattacatgattccaccaataatagacattactattattaggaaagagcatatgagatataatcagagcaccattagcaactttacaactcaaaagatccccttggcactcaaactgcttaatgaaagaagaaaaaccttcaacaaaaattgagaaaaggtaatggaaaaatggatccccttggcgattttctcttcctgggataatataacccaacagatagcacccacgagtcagaaaataatgcattatcgaaacaaaagcaatcacaaaatcaacaactcctctatcaaagcccattctttctatcattgcttgtaaaaatccaaattcaatgcaatcataggattttccaaagtccaacttcaaagccataaaactatgtttaccactaggcttcctctttagatagtgcatgacctcataaggaaccatgatcttatccgagattagatgtctttggataaaagagctttggttattataaattacacaaggaataacagctatcaaacaattagtaatgactttagatataattttatagagcacattccaaaggaaaataggacacaaatctaccatgttaagaggttgcttcttcttcgtcaagacatggggtcttatccggatgcatctaaaataaggaaagtttaacttcctcgtcgcgaatagggcataacaaagccatgttttgctccatagtaatcgaccaccacatctgcaagtccattatctcaattaacccaccaatctcttgagtctgagagatgagtaatagtattattcttccttatagaagtagttttaggatggataaaattactattttgatccccttcatgaagccaaagatgtttagagcgttggcaccaaaacacctctctctgagtcataatttcattactaagttttttttttttttcattgtacaacttaatagaatcaacattcttccccttgttccacttttggatctcttttttacattttccaatcctctctatgaaattaccaataaagtttttctctcaatctaacaattttttcccacacaacttgcttttctccatcattgactaatcgaaacaaagctcccaacaatccttggcaccttgaagacaaaaaggctctctcaaccaagcatttctaaacggaaaaacttagaatgattaccactaataggtgccacaaagttaaggaataaagggcaatgatatgaagtagaaacttcaagattatagagtttagcaaattgaagaagatttaaccagttctgagtaatatgggctctatctaaacaaacctcaatcaaagaatcactaccacaactactttcccacataaaagggcaaccaacaaagtcttaatcatgtagatgacactcacctaccacttgttggaaaccatcaataagctaagagggataaggattacccccaagtttattagcttggctcatcacattatttaaatcctttaaaagacaccacgataaagaggaagaggaagtctctcttaattttcaaaactgctctgaagttgtgtatttagttcaccatataacctggtcaacctcaaagcttcattccacaccacactactcaaacatctatatgagtaagggaataacctataagctgaatatcctttatttctccataaaaggccaccctaccactatgaccaactggatccattgagaaaaaaaatcctgaaccctaatttcaacctaacttgctccaccacctccttatgacacaaagtttcacacataaaaataaaactgggtttcatttttatcacaagatgaataaagaattggataacccatgagttcctaagccgttcacaattccaaataatgatattgatgatgagccgtgggtctaaaaaccagtacccaccgaaagccttttttttgagcccgttaatgtattattgtctgcctccatactaaattgatcttgcaccatattagttgtgccttacaagctctcatttgttacttgggccatctcatcaggcctttttcttttagggtccacaaaaataaactacccgttaggatcctgttggaaattatttt

SEQ ID NO: 380583 - DNA, 1443 bp, Cannabis indica
atgttgcaacacctgttaactttgcctaccaacgaccagaggtaaaggcaactaacttgattcgccaagactattctaatttacttaaggttttttttttttgtttttttttttttttttgttttttttttttttttttttttaacttaaaagtctatatatgttttttttcgggggctttctgaatagaatgacatgatcaagccagcagtccagggagtactaaacgttcttaaatcttgtgtgaaagcgaaaacagttaaacgcgtcgtcttgacatcatctgctgctgctgtttcaatcaataaactaaatgggacaggtttggtgatgaacgaagagaattggagtgacactgagttcttatctaatgagaagccacccacttgggtaagtaatcgatcctcaactctgttttattattatgagaccaattaatcaatacatttttcttaagggaaaaactttttaatgtgcatttgcaggggtatcctttgtcaaagacactagctgagaaaacagcttggaaatttgctaaagaaaataacattgatctcattactgtgatcccttctcttatgactggcccttcactcactccagatatccccagcagtgttggtctagcaacagctttaattacaggtagttttaacaatctcatatcaaactccagccagatcagatagaatatataggaggaataggagtactttttgtgtgtgaatttattataatatgtgaataaacatgttccagggaatgaattcctcataaatgcaatgaagggtatggaaatgctatcaggatctatatcgattacgcatgtggatgacgcttgccgagctcacgtctttttggccgagaaagaatctgcttctggtcgatacatttgctgtgctgttaacaccagtgttactgagctagcaaagttccttagcacaaaataccctcaattcaaagtccccactgagtaagctctcaaaccaaatccaagacaagttagtgtatataaatgatgtttaaaaagtgttataaatgctaaattgggtcatttcatttgtgttgtgagatgcagttttggaaattttccttccaaggccaagttgatagtttcttcagagaagctgactaaggagggatttagtttcaagtatgggattcaagaaatatatgagcagagtgtggactatttgaagactaaagggatgcttcaggtgtaattaaattatgtcacaaaataatgggtgatctgatcatgtcaaatgaatccagtccatcatgttttaacagcttttattaccattctctttgatgggggtgtatatgcagattcattatataataaaggatcttatttaataaaatataacaatttgctttcacctaaagaaaaattaacacccattcaccaaaaaaaaaaacgaagagagagagagagag

SEQ ID NO: 380584 - DNA, 845 bp, Cannabis indica
aatctctctattttatctgcatcttaattcgttacttgctattctcctcaaataattattaaagaccactaacaatgacatcaatattgcaacaaatggaatagggtaaccgaggagagaatttcatttttaaatgtttcatatcaaaatgcaaaattactttcaatgtacagaaattaaaattaaaccattaataaaatattatacatctctttccatatcattttaaagaacaggttagtagtgaacaaaaccattaataaaacaacaatattattattaggtactttaaagtgacctaacaccataccgttataaatggttagcagttttttatattatttattaaattaaaaaatataattaatattaaattataccaataataatttgactactagtggtgcctcttattactttttatttactagtgatacattttagtatatataatttcaataatgtactacaaaattataaataaaaaaactgcaagtgttcttaatttaaaatatttttctaagttgtaaaaatcctttattaatagtagacatcaataatgtatatacttttgctgtaatctttctacgtgctaataatattttttatacgacgaactcaaactcagaatttatttatctttaattaagaaaacaattttttagtggaatataatattggagtaggacaaattcataatatgatattttatttctttttgaaccaatttaagaacatgaatttcttgaaaatgatcaatccaattctctctaattcataacaagtacataccaattgtgtaattttttttttaaaaaaaacaatgaagcgtagatggaaaagta

SEQ ID NO: 380585 - DNA, 3724 bp, Cannabis indica
aaaaaaataaagattaaaactaagtttctcttaaaacatagattactaatcattcaataaaataaaataactgtatatcgtcttcttcttccaccattatcagtttatcaccccttcttctttctttttcaatgtgcagtagaaaataaaaaacaataactcatagaaatcacattaataaataataaccagaaacaaaaaatcacaaactaaattctaacattagtcaaatccatatccagcagttcatgtgcataatgcaacacaaatgagaaactggatacactgtcaaattaatctaaaaaattacttcatattgaagttctgactgttggtacactgtcggctcatatcgtttgttgaagtttcgaaatgcccttagaggagtgatcctgaccgccgttggatctccaaagacgttttagggtctctcttcgtagcaccagatctgatttaggggacgagtttaagtgcgagataaaactgcgaaagataagaagtatattttagatattaaagcaattagatttgacagaaacaataagaaaactcattaaaaatatttttcaaaaatgcataaccaaatctgaagcacccagattccggccacctcctctctctcgtctttcgccaacacaaaccatcatcgagccctcgcgagccctcgtgagcccaaccttagaagtcctcactaccgcactctaggatgattaaaatgagatgtattttccccctacccttttgttattcaagattgatagggatgagatcgagatttaggttcgcggtgagacaatgagaagcacagttcttggaggtcagaaaatgtggtgagcttcggctgcgatgttcgtagaggtttgacaatggagtttgggcagattctgggttttcggtttggtgaagatggagcgtatttttgttttattaaaaaagctttaattaatttcactatattactttaatgatttttatattttaacgattatatttcttttaaaaaaaatatttagttttctttaatttttttatatatttaaatggcttttcaatatttttaaataattttttattaaaaaattaaaataaatgatttagaccaatgaaaagatgacaagtgggcacttacctggcacttaacggccaggtacctacggaagttccagaactctaacagaaggtatttttaccgcaaaaaatatgacttaggtatttatctgctacttagagtaaaacttaggtatttttgccgcaaattactctataaattaggtcttcatagtaaatgacatggttcacaaagacaacttaattgcatatcattccatgatatatataatctctattatatatacaaaactttcacttaaatgtcatactacattagtaatctgaatcgagattactcgcaccaaataacaggcatcagtgaactgcactcgcaactattgattaaagattccaaaactttaatagttgctgacagttttattccttgctaagtgatcttaattctccgtacaatacaagtcacaatatcgtgtatacataattttttttttgatatttatatatataaagtattcaatataaaatattaataatttaacaattaagtatatatgaaaatgttaaactcttatttataaacaaaaatatctcaacagactgtttagggcataaaccctaacactatgccctttcatatgaaactaccagatgagcatcaattttgataatcttagcaattgtctcctaattgtcttcttgagtgattcccttttatttgaggtactatgaaattatgtcaacaccaaaatgtcaatgccagttctcttgtcacactacttgtttaagtaatataggtgtagtctttgttgcctcttaggttgcatccttgatggtctttattattatataggtttttcttacaatgaaggtagtcttaatcatctcctcagcttcacaatggaggaggtcttcatcaaccttttagccttacatcatagtaggccttcctcaactccttagctttacagtgaaggaattctttctcatctcctcagctttacagtggaggaggccttcgttatctcctcagctttacagcggaagaggtcttcatcatctcctcagctttatagcggatgaggtcttcatcatctcctcatctttacaatagaggaggtcttcttggtgaatgtcaacgaagtgttgtagagaacattgactgttctttggccaattaaggatgtgaccaactctcaaattaatatatgcaatatggaggtgatgtcttcctcatctcggaggcactttggcgtgattgtaggtgcggtctccattctttccttggtcttatccatagagacctttgtcatccttttggctgtattcatagtgaaaaaggcttctttgtccccttagatgtctcagtagtggaggaggtctttttactcccctcagctattagcacgtcagaggaggttttcttctcgagtgctaacaatgtgttgtatcactcgcatggggctctttggttgccaaggagacggacgataccagctactgtcgagaacttaacaaatagatggtagataaatgatatggcttggaggtcatagagtgttgaacttccaatggtaagcaaacttggtgttgtctactatgaaggtagacatagtgatgttttccaggaggaatttttgactgtgagtggtaatttgatttcaccacaaggaatgatgtcggttctcgtgaaaccatacataagctgcttgcatggctccacatctcttagggagtaacccattcttttcagggtctattttaattagaatattttttgatgctctatcattaaccttcacctttgtcacaattatgtttgaaatttcttgacattgtctgactctgactactcttgccacccaacgttaatctcttagtaaacggggtgaaaaaatttgtagtttgtatgttgaagctatctgttgtcagggagatagaccattgatgaggtgtaatgggttatttcttgtgtgcttggtgttacggcataagtttatttcatcaacataagcaaatgaatcactattgaaaaatagtgtagaaaaacccaccaaatctctaacaaggattaaatcaattgtgttaaagaactttgtgtgatgatttcaactcatagaaccttgttagaggtttaaaagaaaaaactccaagggagaaaaaaggaaaaagaaagattgtacaaaacccatgctaagtactgcatcccatacttaagaagagtttagcaactaaaaaaagagcacaactggggtagcgtcccactccaggagggtttcttacaaatcaataagaaaatctttgttgtacgcgtgtcctacttccagagaatttattgctttattgatgatatcgtctcagatgctccacgttccaataccttgatactgacactggatttaagggttagtcatagcaggctctagcctatttattctgggttctaacgctttcgtgatgatataaggtccctccctttctcattgtgagtctttagtgttgcttttttggtcaatacctttatgggactcataagacacatcttcattgttgctccctttttcttgatcattatttgaaatagagggagaacccttgtcactgcccctctcttgagtcgtcttgggaagtaggggagattcttcattaatgcttt

SEQ ID NO: 380586 - DNA, 2311 bp, Cannabis indica
aggagggaagattgttattgcctggaacccttatagaattttgttgatatcagtaaatgcactagtcaattgatgcatttgaggatttctacagttgaaggctttaacagtttacttactattgtgtatgcatccaataatcgaggggaaagaaggctcttatggaaggatttatgtgacttgaatactattgagaattggtgtcttatgggggattttaatgacgtcttggccaaagaggagaggactgggcatagggtaaaatcctatcctgattctgacttcttaaattgtgtgaacttttgtcagttagaagatgtcaaagcaagtggaaattttttcacttggaaaaacaagcaaccgggtgaagatagaattttctccaaaattgacagaattttggccaaccaagcttggataaacaagtctgagtttgttgaagctgtatttctgaatgagggtctctttgatcattctcctggtattttaactctacatcctagattggtcagtggtaaaaagcctttcaaatatttcaagatgtggaagtctcacccaaagtatgattctattttgaaggaagtatggaacctcgaaattgaaggcaacaaaatgttccaggttgtatctaaaatgaagcagcttaaagttaggttaaaggagataaacagagatggttactctgatctaaaaaatgttgttgctgtgactaaattggatatggatgctattcaaaaccagctacaattccaaccacttgactctactttgcatctgcaggaaaaagaaatcaaagagaaattgattaaagtgttgaatgattactcttccttcttacaacagaaggctaagttagcttggattcaaaatggggatactaattctactctttttcatgcttgtatcaagcaaaggttgaggcagaatcatattctttccattgaaaagcaagatggaagcagggtacatgacataactcaaataattgaagccttcctggatttttataaggggttacttggcaccaaactagagaataggatataggtagatagcaacatcttagcttgaggacctatggtgacactagaataggcagacagactattgcaaggtttctctaaagaggaggtgaagcatgatgtattcagtatacctggaaacaaatccccaggccctgatggtttttctagtagctttttccaagataattgggacattatttgtgatgacatatgtggagctatactatcattcttggactcaggtaaaatccttaaggaaataaaatgctaccataattacctttgtgcctaagattaaatgtcctaactctgttaaagattttagaccaattgcttgttgcaatgtgatctataagattgcaaccaagctgttgggctctagaatcaataacaatctccctgaaataatatcacattttgttaaagggaggtttataggacataatattccgattcgccaagatttggggaggcattatggtaggaaagctaacaaacctagttgtatgatcaaattggatctccaaaaagcttatgatatgattgagtggaatcatttggaagagatgctaacagggtgaattttcctagaaagttcattcagttggtaatgagatgtgtcacaactccaaaattctctctcatgtttaatggaacattgcatggattctttgaagctaagagggggattagacaaagggatcctatgtctcctctgttgtttgtattgggcatggaatctctatctagaccaatgaggaagattggagagaaagaggatttccaattccatgataggtgctctgagctgaagctgaatcatttagcatttgctgatgatgtcctattgttttgtcatggagatttcaagagcattcttcacatgctacaggcactaaaattatctctcttacatcttgtttgcaaccaaataaaactacagtcttttgcagtaacatgcaacaagagtgtgttaatcacttaatgcagctatttgatttcacaaggcaggccatgccttttacttacttggggatcatttgtaaaaagatatctgggaaagagtgtgaattgctagctgaaagaatgacaactagaatcaagaactggagttccaaaaatctctcatttactgggagaattacactaataaattatgtgttagttgctatacaggcttattggagtcagatgatgatcatattgggttttgtgccctaaataaaactcatttcaatataataagatttacttactaataaagatcagaaataacattttatgtt

SEQ ID NO: 380587 - DNA, 1627 bp, Cannabis indica
ttttactggttggaatatgcgttcggggtaggttgggttttaggtttatctggtagtttttgtgtattaagaaaagcatgcaacgccgtgtagggtgatgtataatctttagttgattgagaacttagagatcgtaggatgttactgatttggaaacattttcatgcgtagaaaacccataaacaaggaacgtttataatttttttgcttttggatgactgtcgtttctaagagttttaatgatgttccttggagaatttgtcgtaattcatatattctgtctaggatcgttttggtgtcaaacaacaacatcatcactctctattccttttttcgtgttccctgtctatttatccagaaaaaatttgttcctagatattgtgttcgacgagaacctctccaagtaattagcggggaagattgtccagtacccttactattttactcggtttggatactaactgcttggtctttccttttccagacttcactatcaagagacaatcaagaacattaagcctcacgggatgaggctcgagataataatgatccagcctagaatatgaacgttagacttgttcttaccaaagaagaacgcatagtgggcacttcttgggagatggacatcacccttaataaatttgcaattaccaaatgttattaaaaacaaaagatttgtgtgggttccaaaacgcttcgtatttttttttggaatagactcttgcagagggggagaaagcgaacacaagtgtggatggatctggtgcttagagcatagagcatataattgttggagtacacttccccctaaggggttattttgccaaatttttggcctctgtagggcttgctcctttccaactgatcctgcaaggctagaagctattggcgggatggtacatatttttcaaggacaggaaattgtcaatacttaagcccacaaaagtgctctacttttatgagttgaagcgagtaccatgagggaaaattgattttacacatccggcttccctcttaacaaatatccaacttgatttcttgactttcagagatttggtaagtggactgtcctttcatttatttattttctttttatttattagggtatctcgttggttcgagttcctttcttcctttacaagtccttatggtcggacaaaaaggaccccatggataagtgtacgccattaagtctacatggcttgttataaggaggagctagatatcaacaatttggtcacgacaccaaagttgcatgaagtcggcctaatagttcctcatcagacgattgatgccccaagcttctgtgggttggtcactaaaccggaataagtgagggaaaagattgctgacattatgaaagaggaggtgaaacaggcagccgcggaagataaggtctagctagctaagcttaggaagcctcaagtggaattggatgaagccacatatatagtagtgcgattccaggacgttcttttagatgaaggtgctttgggagccagtacttcaaatgaggtaattcaccttatcttttggttcatgctccccaaacaggagacttcaaccatattaaacaagatgggtttgacccatattttctaatagatcctctcattatcctaccaaa

SEQ ID NO: 380588 - DNA, 8846 bp, Cannabis indica
caattttttttttttgtttggactagactccaaatagaccaaaaactgttcttgagctaaatgtatcacattgtaactactctttttttttttttttgaaagaaagtatgccattaaattaaagtaaatcagctgttacagaaggaccaataaatatagaacaaatatctgtccacaactgaactcctaaaggactagtaacagacttagttagtgcatgggccacaccattcgcatcacgcgaaatggcacagcaagaaccaccaccaacagccgctaaaagaaaaaattgttataactagtgccacctcatcatgtgtttagtgccacattaggctacactatagtaattatataacacaatcatcataattattataattcttccaatatgataacatacaattaatttttgggggttttgttaattagtagtagaagtcaaccaaataaaatactctacaaaaagttttctttttctttttctttctatatatttaatattatgtccaggtgctttgatatataagttttatagaattaattaatggatgccaaaccttaagccgaactccatgcttttagtatagaatttttgattaattaacaccccttaggccttatataaacacaacttataatcacaacattcacaatctcataaaacatatttcattatttctcaaataatagaagtattgagaacatattgagaaagagaaaaaaaaaacacatataattattagttatataattcttaattagagatggctagatcaagaaagtcacatgtaattgtggctctcttggttatgttaatctcaattgaattgtccatcaacgttatgggccaagcccaaggtggtaacaataacggaaacgacaacggcaacaataacactggagacaacaacggtaacagtaatggtaacaacaatactggagacaataatggaaacaacaatggcaacaacaacactggaagcaacaacggtaacggtaacggaaacaacaatagtggaagtaacaatggaaatggaaacggaaacaataacggtggaagcaataatggaaatgggaacggtaacaacaatggtggaagtaataacggtaatggtaatggtaacggtaatggaaatgggaactcaaacccaagtccaaactcaaacccaaacccaagcccaagcccaacgaagcccactaaacccactaaacccacgaaacccactaagccaccggggtacgctgcttcaacacattacgatgttttaacaccgttaggttcaggaagagaacgtgcattgtgtcaagctagaggaaaatgtaacaagaaaacgctgacgtgtccagaggaatgcccaacaagaaagcctaagaataacaagaagaagaaaggttgttatgttgattgcagcagcaaatgtgaagttacttgcaagtgtaagccttccttaatctcttaatttatttaattaattaatttccacttaattaatcatcttgccaattaatatttaacatcaactattttatattttatgcgcatcaaaatttcttaccgtaggtatcaaatataattttatgaagatatttattatgttcttatttaacgtaggtcgtcgttttactgagagcgatgttccccttgctctccagtccattgtttgaacggatatttatgtctaataaaattttcattcaaaaaaaataaaaaatttaaaatacttttcttgaaagggattcttaaaataatgacagagacaatttgctattttatattttatttaaacactacttaaaattatacataatttcccaaaattcctctatagtaaaatatacgttcataaaagaaggtaaaaaatattagaagtgtcttaattaaattgttatgattttggcagttagaagacccaactgtaatggttacggttcactctgctacgatccacgttttgttggcggtgacggtgtaatgttctacttccacggcgcaaaggatggaaactttgccatagtctccgacaaaaacctccacataaatgcccacttcatcggaacaaggcctcaaggaaggacccgagatttcacatgggtccaagccctatctgtcatgttcgacacccacacccttgtcattggagcaaaacgtgtctcacaatggaacgatggcgtggatgccctcaccgttagctgggacggtgagtccatccaaatcccaactaacggagaggctgaatggagagctgacagctctctcagcaaacgacaagtcgttttggagagaactgacgattataacagtgtcagagtaacagtggcaggtcttgtccaaatggacattaaagtgaaacccattgggaaagaggagaacaaaatccacaactatcaaatcccagaaggagattcctttgctcacttggaaactcagttcaaattcttggatttgtcagattctgttgaaggagttttgggtaagacttacagacctgggtacgtgagcccggtgaagattggagttccgatgccaatgatgggtggagaagataagtacaaaacgatgtcgttgtattctcctctctgtaagcattgcaagtttcagaggccaaacaatggtgatgaagttgctcaattctgatgataataacatatatagaaattcataacaataaatgttatatttggttttgagaaacatactttaatttcttatttatgctatattttgtaatttaatattgtaaaacacaaataaagggctaaaaaaatgtccatgtattcattttttcattaatctttttcacttgttttatattttatactgcattttttttaacaatgaacatgtaattgaaataatcaaactatgaaatgatggactgccttattcattgatgaattattagtttaaattattatacatgctatatacttacaaactaataattatgtgaatttttttttaatttactctatggtctcaattgatcaccgagaccaaaggtttaactgacgtgggtttggtctgctttatatactctttggtctcggtttgtgttttagtatcagttagctagccaaccaacactattagtttttcgtaaagttgattacaaaccgacacctcaaattgagagtactcatcggtttaaaaaaaaaaaattaaccaactctcgaaccaacacaaaacatatattttgactattttttcaactaacttgcacatttggtttttccaatttttcaaactacactcgcacaacgaaactaaaaaatcgcagaaaccgcactgcaaaaaatagtatggtgcggtgcaatttttacagtttctactgtttggactatcaccaataattaaactatcataaatacaacaaaacttgagcaacacttgtcaaagttaccataaggcttgaaattataaatatgaaaaaaattaagtttcaataatacaataattagtaggctttgagttggacattcatatattggacctaaataaatataaaaaaaatattaaataaatataaaaaatattatttttatattggacagtgaggtgcggtttgaaccgcataataacaaattaaaaccgcatgcaaactgtaccggctgtacggtttaagaaaaatttaaatcgtgaccgcaccgtaaataatttcaaactgcattttttttttgcggtgcaggtaatttaaacgggttgatgaacacccctaagtgtagaatgatatttacgctaattattattatagttttgaaaaattctgcagtagattcttttaaggttgttctactagattattatcaagaaaagttttttgctcaatttttctatgatcgtgtatgttataattatttaggattattcgtaagctttacaaaattttgaataatttacagtgctgaaaataaagtttaaacaattacttaccacgcgtatacaaaaatagtcgcaagctagtgcaacaaattgtgtaaattttattttcgacattgtaaactacttaatttttttttaaaaattttactgattatcataaataacaataacatatatgatcatgaaaagaaattaaactgaaaagctctcttatatgttgaaatagataagagtataccaaaacactatttaagagtgtgtacattcagtgactttgtgacagtcagtagtcccgtgatctgtaagaagaaatactgggtaagttgtgcaatcccacactgcttggggaaggtcaagttggatgattctgagaacagttgaagagtgcttaaatggattgattgttatcaataaggtgtatcttattttccacagttaagcgtgcttgacctaattttaggatgggtggactcctgggaagttttcctaggaagcgtgcgagtgaagacaaagcacactgaaaacactcgtgttggtttgtagggccagtcctcagtctatgaagcagccagagtgacaaacctgtgtataagagccaggtttgttggcatgccaacattccttctccttttagggcttatatgaaaaaaaatttaagtcgtgaatatctgaatagaacgaaccgctccgtacatatctttgcttcggaacaaaacttacctaatagttttgtgataccataatgtttgatgaaacttaaaggataaaagcatgataatggggcatgtggtcgatgaaaacccatcatgacaacaataattcttgcaacttaattctccacatcaaccgctccttttcttgtgggtgtccaagttcaaacacttgccttcaaaatatttataaagaaatgttagaagacaataatcacattctaggtgttatactattatttatccaattaaatagtaggttcaatagctttcaaaagaaaatattaagttcaatatatgttaatttaatgctttttttttaaaaaaattgttaaagatttgcaacacaccactttatagtaaaattgattattattgatgcctaatatagtcatacttataactatagaaatatttttaggtagatgcattttgctttatatttactttatataattgtgtatattgtagtaattatagcaagaatcttataaattttataaataatttacaatattgaaaataaaacttaaacaataaatcctgtgtctatctttttatgtatttgtaaatgattattttaaattttgtttgatactataaattatttaaaaattttcaaatatatatagtgagattcctactataattatagaattataacttttcaaatatcgaaaataaaaaccacatttacaatataaaaaagcaagtataatacccctacctaataatatattcattatataaataaatatatgtcctcttttacaacttgaagtgttgttttgttagtcttattattattgattccttttagtttgaagttactaaatgctatatataatataaaatttgcatgtggttctttgcatactatttttctactttacttcattgagaatattatgtatgtttatagttagctatatgaaagtaagatccagctatactttttgtagcttagttttaaaacaagctttgcccaactctgtttcagactgaaactctcttaaatagttcatggagtacaatgagaattatgtccattaaaattcctttcatatacataaaaaaaatgaaattacaaattttatgaatttttatatttttttttcgtaaaaggttattttatgagaaataaaaaaaataaaaattatagaaaaatctgataagggtaactagatactattatggtaaccagagtggtaactagttaccataaaaggtaactatgtatcttatatatataacaactacaactagtgattaggtatagatcaagctactaacaaaaaagcaagccatattgttaagtcttaagtataccgtacatataattattcttccaaataagatttaaaattggagtttattttgttactaaaagtcaatgtattatataacattattatttcaaacaatatatagaaacactccaaatatttttattcttttagatgtgttaatgtgtattttagtttagaagatgatcaattattattgatgccaaaacttaagcctaactccaatgctttggctactctgtacacacttgattaattaatttaccatacacattatgtatatatggtatatatacacacacataacatatatctatatacttctcatcaaacaaaaaatcccaataacaataaaaaagaaaaaatccctttgtaaagatggctacaaaaaagtcatcatatgtactattagtggctctctttgtagtgtttatctcaattgagatggccattattgttggtggcgaaggtactgataatggtaatggtaatggaaacggtggaggtaacaatggaaacaacaacgggaacaacaatagcggaaataacaatggaaatggtaacggtaatggtaacagtggaaacaatggtaacaacggaaacaacaaaggcaacaacaacaatggaaagaacaacgatggcaatggtaatggaaataataatggtaacaacgctaaggcaaagaagccacccggttatgctgcttcaacacactatgatgttctgacgccattagcttcgggaagggaacgcgcattttgtcaagctagggggaaatgtaaatcgaaaaccctaacatgtcctgccgaatgccccgagagaaaacctaagaagaacaacaagaaaaagggttgttatgttgattgcagcagcaaatgtgaagtcacttgcaagtgtaagcataaataaattaacatattttttcattaatttaatataatttaaaattaacataaatttctcaattggataattaacatttatttaccattggtaaattatttttttatacaaatattattttatatatattacataaataaataagtatagatggcagaaagaaattagtataattattcacaccaaatatttaattaatttacagcatgacaatagattctaagtttagtttttgattaatgttaagcattcaatattctgtctcatatttttttttaccaatggtactcaccaatataaagttggacattttatgaatgatattaataattattaaattaaaatatattaaattcaatattaaattgtacctacaatattaaaattttgtaatgctctttaaaaattctcactaattaaataagagtacctactaaacaatagcaacattcttataaagtaaattatatgtacttcgagggtgaaaaagagaaaaccaagcacaaaatctttctgtcaaaaagaaaaactcactcttttgtattaatttgttgtgtttgtggttttggcagttagaagacccaactgtaatggctacggctcactctgctacgacccgcgttttgttggtggtgacggtgtaatgttctacttccatggcgcaaagggtggaaactttgcaattgtctctgacaaaaatctccaaataaacgcgcacttcattggaacaaggcctcaaggaaggacccgagacttcacatgggtccaagccttgtctgtcatgttcgacactcacacccttgtcattggagcgaaacgtgtagcacaatggaacgacgacattgatgctctcaccgtcagttgggacagtgaatccatccaaatcccaactgagggtgaggccgaatggagagccgacagctctctcaccaaacgacaagtcgttttggagagaactgacgattataatagcgtcagagtagtagtggcagggctattggaaattgacattaaagtgaaacccattggtaaaaaagagaacatagtccataactatcaaatcccaaatggagattcttttgctcacttggaaactcaattcaaattctttaatctctcggattctgtggaaggagttttgggtcagacttacaggcctggatacgttagtcctgtcaaggttggagttccaatgccgatgatgggtggggaagataagtaccaaacgacgtcgttgtattctcctctttgcaagttttgcaggtttcaaaggccatccatgtttgaagaagttgctaagttctaatttatgattatgatgatgatgctaatagaaattaatcataaaaatatggaaattttttctttggttttgagaaataacatcataattgtatatgatgatatgcaaattaaaatggaaaataaaagggtataacagcccatgtattaattcattaattttttattacaattaatgtaatcattgttatttgattaactttgaactatttggattatttgttacttttctatttgctaataaaagtgaaaaaaaaattaaattacctcgtatactattttttttattttttttaaaatttacggtttgggtttctaaagtggttgcagcactagttgcaatagggatttctatacgattttttgttgcaatttatgttgcagcgctagttgcagtaggggtatctatgtagaatttcgtaaaaatgtaaaaataaacagtaaaaaataaaaaagctccaaaaaattaaaagtgtattccgatctattattatttatatgtcaatatagtttgtcccatattgagtaagaataagcttttactagtttaaaggctatattaatataagaaatgaaatttttactaatctaacagtcagtagtcccatgatccgtaagggaaaatatcgggtaagttgtgcaatcacacatcgtctagggaaggtcaagtgggatgattatgagactgtgtaggtatgggactacacagttgaagagagcttaaatggattgattggtact

SEQ ID NO: 380589 - DNA, 6013 bp, Cannabis indica
caaaaatcgatacatggttaaacaatcatttggctaagattacaaaagattcaacatgtgaaaactaagatgcaaccaaattaatttaatcccattttcttattaaacaagtaaaaaaagaaagaaagtgccagctttttcaggtctttgtgagccataaagtcaaagtcaaccactcaccaagactaagatatatttgtgatcatcaccccaattcctgaaaagatcatttcttcattaaacatttggttttgagtataacaaaatggaaaatggggagcgattaatggacgatcaagtcgagttagaagccattgatgtgttgaaaaaagctttcaaaattttagccaagaataccaacttcatcatcctaaccattctcacatcacttcctttctggtgttttttggtttattacgaaactacccttcaggatttcataacacaaacctctgatatcctcgaacaaagacccgaatacaccttttgggagtggcctataccatttcacatagtagatttactagacaagaatttctggtatgaactaatcaaactctgttttctatacttagtaccactccatctcttagaactcatcactgtgattgtgatcgttgacttttcatcaaagatttacactaaagacacacaatcattgactctaaagaacatggtacaacaacccttttgtggagcaaagctaaaagggagtttagtcaccttaatctatgttgtcttcttctcaacatgtaatttgctcggtctgatttggttagtaacaatttactattgtacaatgttgggaaatcctttatatgatgttctgtctggtttagtgtttgggacagtttttgttttgttactaggaaagtacttggaatggaatgctatgtggtctatgagtgttgtgatttcgatattggaggagttttatggtgttgaagctatagctttatctgtttatttcagcaaaggaaatgagcgtcgcgggtttgttttgatgcttgttttctttgtcttgggacagtgtttaaggttgtcttggttcttgttctatgattcatatggaattgaacagtctgaactttccattgttccacagatttgcttggtttcttttgccttgggaatgttcttaaatgggtttcttgtgttgtttattactttgattgtaaaaataggatcttggtgaagaaagtttatgaaccacctttgatctgtagtgagttgaatcttgtgttgtaacccaattttgacactaaaaagctcatgtcttgtatgcttaaacagtttggtttttggttttgttaatgaagtttaataaaagattcttaggaaaaaaaaaataaagctcaaagaatctgtcaaagtctatgccaagaacatcaacttcatcatcttaaccattgtaatctccattccttcatcatacttctcagtttactatgtaacttttctacttcaaacctttgaaatcttcttgtggtagtttacttgtcattaaagtctaaagatatagaaagaaacttcatcaacggcttttaaagaaaaaagtttgaaaggcaacttaagcacacttatttatgttgtcttcaactcttcttgtagtcttatcggattgatttggctaatagtaatatacctattgcttttaaaaaagtatgagtctaaaattttgtatttgttacatgttttggtagtactaaaaagttacttgaaattgacttctaggtggaacatgagtcttgtaatttcgatattggaaggaatatatggattcaggacttgttttagtgttgattttcttcatttggtgtcaaaatttgaggttgatttcattctattttggaacattacttggattgtgttgcagattagtttgttcttctttgggaatgtgcttaaatggattgcaactttgcaagcaccatctatttttatgaccgtaaaacccaaatttcagagaagaaagaagatattgaagtaggtgagatggataagctgaattttactcaaataggcttcactcatgtgtaaaagaaaatacttgagtagattttagttttgtcacttttataatgataccatactatgaacttctcttttgacccacacttccgaaatagggtcttgttaataatgcaaattgtaatgaagtgttatgccaaagtagaggaacaaaatgtgttttgatatgatttttgaatcaaatgatcaccccataataataggatcaatatctctcttggagggctgtgtaaactaaagatcacagcaaagtttctgaacttgaactcttaataccaatgagaaacccaaaaaaaaaatacaaacattatctaaattcatcaaaattactaggttactatttctaatgctaactaacaaatgcagacatcaatttgaatctcaacttattatttcttggttcactgccaagaaaaccacttcacctcaatagaaatgagcagcatgtgtcaaaagctttttccccttatttttcggactcgatcaccctcttcgcaaaagacggtaaacagaaagcagccgtgtgaatctgaaaacaagaacaaactcgtcaaaaataaagcaaagttggagtttttaacaacatcaagtaggtacaagaagaagggcgaaaaaaatctcgcaaaagagcagaatcaaacctcggaattgtaaaatttcaagggtcttccagaatcgtcttgttcatcaatcggattcacagggtgtttaaagtcaacatctggtccctcggtagaacatagcataaaaccaataacaccactgaaacacaagaaaaacaataacagcaaagtcagtagtgaaaaggtgttttttttgcacggatttaatcagctcaaattatacattcaagtagataaataaagggaccctttagggagtttcaaaaaatcttctaccttgggtatgtagggactgtggtccatgcataattaactgatcccttaaatatgtggcggcagtttgcaacaatatcctcaattatgtgcatgtggagccatatactctcagcctgagtacagacgactcctccaggacgaagggcccttgctactgactgaaagaatggtttctcaaaaagctcctgagcaggacctaattaaaatgaacataagtaaagtattacttaaacatactttccacaaccattcttagacaagaccaatgctgtgctgagaacaaagaatttaccaattggatcagaagaatccactataaccgcatcataagttccttctggaacagcctttaaaaatgcaactcctacaacgttgtagagagtacatggagaaattaggatgtaggaaagagcaaataaagggaaaacaaaatgaaaaggaaacagaacaaactgatcataccatcaccaatgtgaagtgtcacccgtggatcattgtatccaactgccacatcagggaaatactctttagacacctgcaaaggatgggaagtaattgtaatcggtgaatctaaagccattgcagtcgagtttcatttatgtgggaatagtattacaatttactatagtagggccgtgtgaaaggtgacatgttctatctgaatgccaattaaatcttactatttgtacccaaatgaaactattgcagtgaaacataaagaattcatcggttgactatgtatatatcaacagttaattatttatttgctctttgtttaacctaccctattacatttaaagaacataaatagtttaattatcaacattaggactcacctcaaccaccattttgtcaatttcacatatatccacttgctcgacagaggcgtggcgagcaacttccctaaggactccaccatctcctccaccaataactaaaacctgaagaaacaaataaatgtattctagatgagacaatcataaaatgaaaaaagaaaatactcatttgatcatttcaaaacataatcctgaaaaaaaacttgagtacattttatgtttctgtaagctgaaaaaattcacataacgacctttttggggtttggaattgagcacaagggtaagtgagtgatcatttcttggtaggcacattcatcccgctctgtgagctggatcactccatccaaaacaagaacctttccataggttgatgactgcaagcagataccaaagacaataatcttgtcactaaaagaagcaaacaaatgtacaagaaatttcagtaacataatgaatcatcacttgcctggaaaaccatcacatcctgataatcagacttcccctgaaataaaatcttctctaccttcaaggagtgtgcctctcctgcacataaacataattacatcaatttgcataatacaaaaccaatcatatcgaaaaaaacaaaaacatatcaaccaaaaattaaactaatgtcttcaccccaaaatcacatctaaaatgtataactgaagtgagttaatttaacaaatggaaatggataagctccagtaaaaacacaggattctaaattatcccatttacaactacagagtatccagaaatcctaatacaatttacacaaaatagtaagacctcaatacagtaaatctaagggttaaagcaacaaatttccatatgcataaaataactcatatagcaaatcaagtgcaatctctgactcaacaacaaacatctgagaaaatatttaatgaccatggaatattatcaaacatgtaataaaaagacacaaactgtgttagcaaaccaatagcttagcttagagagaaccaaatacagaaaatgaccaaaaggaaaaacaaatagtacaagtcaagacttttctttaacacaaaatgatggcataccaaaaaaacaaaaaacaatggctgaaaactcaaaaccccacagtacaaaaagctggcccagaaaacaactacgtcgcatagatcatcttatagtaaacaacaacgtatcaatcaaaattctactgaacccaccaaaagcaaacaataaacatttcaataacatttaataaagattcaaaggttttcataacaagtgccccaaatttctcatcaaacaaagacgaaaaacgttaaagataaaaagaacccaccaggccacattgggctaatctcagagaaccacccaggtatgacggttgagattgaattaggttgttttgccgcatcagtctccatagaaacaatcgaggaaactgagaccccatttgcttcttgttcttcttcttcttcttctctgggtctcttcatagacaaatcattggtagcaataccatcaccagccatagcttatctaaaagagagaataaagcaaaaacgaaaacctaacccagaaaaaggggtctctctctcacacacacacacttgaccgatcgctaaagcgtagaggcaaagagctacttctgtaaggagagaggccacacaaacttgggttttgcttgctttatatacatacaatatataatatatatagccacacgaaagaaaagttgtgaccttttttatattattattacaattatttaattaaaaaatatgtatggtgaaatgatagatttcataagcaaaaataccctagtgattgaaataatactaaatatcattttaaataatgtgaattaataataacaagatttagaaatattacgataaaaataattatattttttattatcttttcgtgttgataaattagttttatattaaaagaacaaaattaagtttatagtttattttatactgttttaaatacatagggtttagattgttatttaaaagtagaaaatttgatcaataacttttacaaaatttaaggtttaaaatagtatttacttttaaattaataaactgaagggtaattttatagtaggagagtgatacttacaacttcttattacaccttctagtcaacttttgcgcctaaattacatgtcggaattttttttttcaattttttcataacgatattcgttacagttataatatcatctctgtaaatttttaaatttttttgaatagttta

SEQ ID NO: 380590 - DNA, 1635 bp, Cannabis indica
tttgataaaagaaaagaaaaaaagactaaccttgagaagtccaaccatatcagtatactcagctggttcaggaaaatgatcatcaatgtcatacacattagcccatctcacattcttattcaattcataactttgttttcctctctcagacgaaaccacatcgattagaacaccaggataacgatccttaatcaactgaattaccggaaaaaacagcaaattctcataaacaccaccagacaccatacaacaacacctcctaacatctcccctcactttcagacccaaaggagcaatctccacattgaatcccattggaaatttcagaaatccataagggttctcggggttatcgggcggtcttggatcctcctcttgctttccgtccgtgaataaggatccgtattccatgtcggggtcggctccgtcgtcgaaaaagtcgagccagtggtccttgttgtctccggcatgggttcggagtgatggtcttttggggcgaggagggttgaagaaagagagtttgaggaattgggtgtggggaattgaaggtgggttgtggagaaatggggagaaagatttgggaagaagaggaagaggagtaattgaggccatgaatgagtgaatgaagctatgctgttatttttcagttgatgaaacttggaaagtcgttagttatcagatgatttcaagtgtgtggaggctatgctgattggataagtgggacctttatttatttatttatttatttatttattttttttttttgaggaaatttatattttaacaaaattctacaatatactctttcgaaatgtgttaatgatgttctcttaaaatatatttgatacaacttctaactattttggtatttatataaaaaaaatttataatggtgtacgttatagttatttaagatatcttgtaaattttaattcggaaaaatttaacacgtcaaaaatagtgttcaaagagtatattacacgcatgacttttttattttatacgcgtgtaaaataaacggtttaaatattaatttctatattgtaaaactacaatataagaaaaggtgtttctatattctaaaactacaattaaggaaaatgtgttccattatctcctctctctccccaacacagggaacaagagacctcctcaataagcattctcttagcaaaaagggcacgaatgggcaggacatttgagagaatgatccaccaaagaaccttgtgatgctccaaaactctagagttctgtagtttgttccataataccggagcaacattacataaaagagcttgatccaaagcttgaatcaaataagcagacttagtcgaaaacaatccatttggctctttagtctaaactcatttatctttcccataaccattcaacttaccacctttgatgatattattagttatctcctggtaaaagtttttttaaaacttatcagtgtcctaatgcccgttaaataaaattaaatccaccactttttctaaaccgtcctgcgaataggtattatacttaaaatagaaatcccaaccataaataactcatgggtcgtcccactttaatagcacctttaggggctcgtttgggaacgccgtattaagtcgtattgtattgtattgtatt

SEQ ID NO: 380591 - DNA, 3599 bp, Cannabis indica
aatatttttcatttattgtttgattgtttttttgcttgtaaagcatgacctatgttgtattaattgagaatatattgttactcatgttgtgtttttatatgttaagaataaaatactttattatgtaataaatactatatctatatatgatatttctttgtaattgatttattttattccttttctgatatgatctcattaatctcttcagctaggttgtgtaatgtccaagaaaaatttcatggggatgaacttgactttaatggaatctagattcacaatgttgactagacagataaggatttcgtttgtgcactttctatttctgttcagactgaattttgtcatttagtgagtttttataaggaaactaattaatattttctctttgtattcagaccttttgagctcggttttgtgtgccatttatcattataaatatgacctagaccaatagcaaaaggttttaactcttccacttcttaatttcttatatttttagaagagagtgtttcttttgtaagagatagttgttttgctattccttggcgagtttgtgtatctttgtgattacttttatgtaaagtaaatttcaaagtgaagaacataaagaacaacctttgggagaaggttcatccaagtcttgcttcgagagaaagtaagcaccattatctttgagagaagatttctacaagtcttaattcaggaggaagcaagcactgttgtctttgagagaagatttctacaagtctttctttgagagaaagcaagcacagctatcttcgggagaagatttgtacaagtcttgcatcgggaggaaacaagcaccactatcttcagaagaagatttctacaagtattgcatcaggaggaagcaagcattcatcaagtaatttgaacggagttcaaacctttgtgtcttaaggagattcattcaacaaataggagtcaagcttgcagtaaaatcattagagggagtctatgttttgtttaagtctattactttgtacttgttgaaatttgactaatatgaatcttatctctgggcgtgaccccgtagattggtagcaatgtgtaaggattgctgataccacgtacaaaatatcgtgtgtcattttaatttatgcaattttactttctataatataattttgatctatcgggttcattttctaatataacatgtttcaattttgttcaaataattttataacagttccatattaattaaattgtttgttaattttacttggtaattataaaaatagaatttcaattagtatcaaaagaattcactatacttttagtgtgatcttgtagttattttttgtttaatttcttgtgtgaaatgtttccttttgcgaaaggtaatttggagtatcatcctccgcttttaaatgactcaaagtatccctattagaaagttaggatgagagctttcatcaaaactcaagatgagaaagtatgttaagcgattttgtctggatggtcacctcctacttaaaaaggtgaaaatggaaacatgaagttaatatctaatttttttttttttatacagaagagaaaaactttctagctctaataataaaactcctcacaccatttttaatggtgttagggaaagcttcattgaactagtttctacttgtgtttttgctaaagatgctggataattcttcaaactcaatttgaaggaactgcagatgttaaacgttcacgattcattatgttacaaataaaatttaatgatcttaggatgtatgataatgaaactttatatgaatttaatgaaaggttatctaatatttctaatgaatattttactcttggtgagaaacttgatgattctattcttgttagaaaaagtattcgagtgcttcctaacaggttcaatattaagctcaccgctatggaggaggtaaaggattttagctctatgaaagtagaaaaattgatggggtctcttcgtacatttgtattgaatcaaaagattcatcaaaaaggtaaatcgagtgcttccaatgaaaaaacagaccataactttcaaaagtattgaaaatgaagcaacaaatgatgaagatgatgatgataaaatggcaacagttgtaatgaactttgaaaaatacatgaagaagattggaagtaaaatattcaatggaaagtcatcaaaaggtaattcttctcctcttaaatcttttcaatctaataaagaaagtattcagtgtagggacactactacaatttgaccttttagtgatactatttagtgaaccgcacaaaaagtggaggtcaataaatagtgaagagtggtttttagtgacatgtataattagtctctaaacgttcgatgttagtctcctataatgtgtgtcactaaaaataaagaggatcactaaagagtaaaactcaaaattttctaatttttattatttgaacaatactcacttatagtgacgtgccaagtgtgactgagtaaaaatatcccgactcacctggcgcgtcactatatcataactctaattctttttagaaaaatacaactataataatatacatttaataagtaaataaaaaaaaatatcaaagtttaatatttgtacacttatctaagaggcgcctaaatccatttcaaaagaattaaaaagataaaaaggaaaagaaacatgcacctaaactttcaaccaaaaaaaaaaaagatatgcctaacaaaatttttcattttaaaataaataaataaaatgggctttttcatttttacacttcaaaacattttttttttgtatttttacgaaattctatgtagaaactcctattgcaactagcgctgcaacctaaattgcaacaaaaaatcgtatagaaactcctattgcaactagcggtgcaaccactttagaaacccaaaccgtaaatttgaaaaaaaagttcaaaaaaatagtatatgggataattcccctaaataaaaaaggagcacctaatttatatagctgtaaatataattgtaaccctaatacattttttccttcttcttctctcccctttatttcttcccagaggtgtcgcacacatctaagagaccgacgacttcaacggtgcaggcgagggatggtggacgatgtaaacattggtatgggggagcgaccgtcctaggtgagggcatgttgtcagcgattgaagacttcaccgaagcatgcatttatttttggcgaccgaagctttaggtacccgcctcttcttcttctgataatagctgaggaagttaaatgataacagttgaaacttatatccaaataggtaactttggagagatccaaagaatcattttctatggttgagttccttatagtgctaaatggcatcttcaacgtcagaagaaattgtgcctgataaaaaattaaaaaaccatcatcaaaattaaaagaatagcttcgaatatcatagttgtactgaacactgcttcttccaaagctcatttttgactttaccctgaaaatcagttggctcaatctagcaggagcagcataagatggtcttctttattttttaaacttttaaataaaaaaaataattaagtgtaataattttaaattataagattatat

SEQ ID NO: 380592 - DNA, 6666 bp, Cannabis indica
ctctctctctctctctcctcccatggctcgaaagagaaagacggtctcgaagtcggcagaggtggtcttcggcatcaaagatcccttcccctgaactccttttgatccaagaggagcatttagtggctgatactgagacgttccatgatccgtgtgatttactggagacagaagtcctagacctaggcgatggagaaggaactagtttatcttccaaaccagtgagttgggctgaagaggcgaaacgatggactttcagtagacagccaagaacatttggagcaaattcaactctaatcaagttagaacccatctttcccaattagaacacattgaacccctgaaagttggagatcagattaaattatggaagaatttgattgtttgtattgttcttggagcgcatcctccattccgtgtctttgaaggtttcgtgaaaagaatttggggaagttgggtattgagacaattgttaggatgcactctgggttcacattggtgagctttagagatgaggaaacaaggaatataatactggaaacaggtgtcgtacactttgacagcaaacctgtagtgttaagaccttggtcgacagacatggatgctgccaatatggtcaaatctgtgcctatttggatgagactcaatggcctgggacttcaatactgggataagaagaaccttagtgctcttgttagcacagtgcgtaggccaataatggttgataaagtcacccaaaatagatcgatggtgatgtatgcaagggttcttgtggatatggaaattcagcgagatcctcctaagtctatagcctttataaatgagaagaaacaattggtggaacaggcaattgtatacgagtggctcccatctaaatgtgtatcatgtggtaatcttggtcacattgtggctaattgtaacaaagataagggagtggtttggaggaaaaaagaagcaccaaggggcaaaaatactgtcaaccagtaagagaagagcaagattcatgatggttcagtacattagcaagatggaatggtgacagtgggaaaggagaaagcagctacaacagggaatgaagtacaaaagtctactaaatctaataagcaacaacaggaggtgatggaactgaatgacaaggaatggagtactccaaagaggaaacaactgagacaagattctataaaagggaaaagtacaaatgaagtcaagtctaacaatggatatgaggctcttcgagatggggaaggcagtggtgacaactctcactacttgatctaatggagaactttaatgtgatagagtggaatattaggagtatgaataaaagagagaattagatcactatcttagaggtttgtagagagaataagattggttttggtgctcttttgagaccaaaatcaaggagaataagggtagtagtgttaagaataatttccctaattggaaaatatattctagtgatgttatttctggtcgaattcttctgatttgacaagctaaatttttcaatgttgaagttcttgaagaggataaacaatttgttcattgtaaggtgaagatgtgcagtttgggaggagaattttttgtcacagctgtgtatggaagtaactcaagtgttgaaagaagagagctctaggatagacttgctgcaataggtaatcctaacttaccttggcttgtgtatggggatttcaacgccatgttctattttaacgatagaaatagaggaaaccaggtcaaggttaaagaaattgaggactcccaaaattggcttgctcatggccaattggtggagttcaaatacttggggtctttttatacatggactaataaacatgatgcaggagataacttttttctaaacttgacaaggtgtttgtgaatgagatttggcttaaggttttcacaagaattgaagcttgtttgaaatgggattcgtgctctgaccatagctatatatagtatcattaaatatcaagaccacagcaacacggggttcaaaccattttgatactgcaatcactggagcctccaaccgggttacaaacaagaagttttagcttgctggaatactgctcacaaccttactgatcttgttaaaaacatgttcagaaccaagcatgtccttaagaaatttaacaaggaagtagttggtgataatcattcaaaaaaatttgctgccagagctgatcttagcaggatgcaagaggagcttgctggtgatcccatgaacccgattctacagcagaaagaaaaggaaaagctgttgatttttactgaacacgggaagagttattcttgttttttttagacagtagagtaaaatcaagtggatcaaattgggagatgaaaatactaattttttccatgcttgttcgaagaaaagaaagctagaaaattgtatcacaacctatgtggagaaagaaaaggtgattaatgactaccctaaagtggttaatcattttttaaaccattttaaaaatataatgtggagaaaaagtttaaccactaaaagggttgagttggacacactgtcgtttggcaattgtctgaatttagtgcaatcaagctgattcgcccattcaacaagaaagatgttaaaaaaactttgttcagtattcataactcgaaaagtccaagaatgcatggttttggctccagtttcttcaaagggctttggggtgagatagtatatgacattacttatgtcgttttggattttttttcaaaatggtactcttccaaaggagttgaatgaaacagtgatctccctcattccaaaaactaaaaccccaatggatgctaaggactataggtcgattgcatgctgcaacactatttacaaatgcatctcgaaaatactttgttcagatggttagtgataaccaaggtgcttttgtgaagaatagactactggctcataatcttcttattttctaggacctgttaaaaggctatacgaggaagaacatctcaactagatgtattatgaaaatagatctcagcaagacttatgacaatgtcaattggcagtttgttgatgatttattaataggtctttgttttctagctagattcattagatggattctaatctgcctccatggaacagactacactctgcttctaaatgggaggatccaaggctccttcaaaggagaaaaaagtttgagaccaggagacccgatatctcctctcttgtttgttctggttatggactacctaaccagaattctcatgcaaatggcaactagaaaaggatttagtttccatcctctttgtaagtctcttcgtttaactagcttttgttttgttgatatataataaaataaaaactaaatatgcatgatctaaaataaaaatgataaactatataataaaatttatataccatataacaaaaaatatatatattacaatagaaatatatataataacaacaaataaaaataaaaatatatagcatgctaataaaattatatgtcatgtcaaacaaaagtacaatagaaaatataacttaaatattatatttaaaaaatgatatatcgtgtaaacaaaaaataaatataccattcatcaaaatatacatactaacaatgataataataaaaatacatattactaatatatatataccatacaataaaataaaaatatactgtacaacaaaatttatatacaaacaacctacaacaactcataaaaaattcaaaaaatcgacataactttaaaataaaaaagatttaaacaaaactaatatagatataccataatttttaactaatttgcttttaattctaagaaaacatatgaaaaaaaattattaatttttttatgtggcaaaagacaatatagattataattagtttaaaatgatcatttctctacaagttttgaaatgaagacatttgttattattgggtggcttttgtcttatgtggaattgggatataatcttggagatagtaggtttggctaatggtgtttttaaagctgaagtgtgggatggtcaagtgaatacaagatggcatctgtttgccatctacaggactccctacagttgggaaagaaataaattttgggaaagcatgactcttaaagttaatttctacgactcccaatgggtggttattggggatttaaactgcattttgaatgctgaggagaaacaaggaggaaggaaggttgatgtgaatgatactaagtggctctccgaattccttgacaatacgggtggtattgatcttcgcttcaaaggttgtacttttacttggcataacaagaaattctcaggtggtctgattagggagaggctggatagagttattggatctcatgattggttgactctttatcaaaatgctcatgtgctaaattttccaatcacggtctctaatcatgctactatttggctagacacttgtatgtttgtaaataaaggttacataccgtttcgtttctttgatccttggtcaagagagccttcctactttggagttgtgtcaaaggcttggggaaatactaaagtgaatgctagtaggcgactacttcacaatctcgacagtactagacgagcattacaagattagaaaaagagttatattggagatgtagacaatgttatttgcaatctggtagaacgtctaagtcgaattcaacaacattagatcacggattcctctatgctagaagaagctgagctacagaagaagattttagaagcatggcaaagaaaagaaagtgagtggcgccagaactcccgtgatgtttggttaaagctagggaatcgcaacacaaagcttttccatacctcggcaacggttagaaggaggagaaatcaaatttgggccttaagggataactatggaaagctctatgttgataagaagagtatcttaggtattattaataaatactttactgatctgtattcctcaaatgatctggtgttgcttactgattttggagacttatttgataagaaaataagcagtgaagctaatttgagcattataacaatccattcttttaaggagatcaaaaaatgttgtgtttagtttgcatcccgttaaagctcctaggcctgacgggttctcaggcaatttctttagaaaatttttgaagattgtgggacaaggtttttgtgaagccatcagagaaattttttggggtggtaatctcaatccgaatctcaattatacatacatctctgtcttgtccctaaagtggaacatcctgccttgatcgaacaatttcgacctaagtctttgcaactttcactacaaggtagtggcagagattaactccaataagttgcggccttttatggatgacctgatatcccctatccaatatgctttcattccaggaagatagatagcaaaatcctccattcttacacaagaagttgtacacaaaattaaacaggagaaaggggtaggggccttatggcgatcaagttagatatgcacaaagcttatgataagatggagtggggctttattgctagtgtactggtgcaaaatggttttgatgaaaaggcttgtaagctcattatgaactgtgtgaagaatgtctcttattctcttgttcaatggaagtcctcttaaaaaattcatgcctaatcgaggtcttcgtcagggggattccctatctccgttcttattccttctttgccaagaagttctatcaaagttgattttcaaagctgaaaggtagggtgagattcatggtataaagatctcaagagatgcctcgaccatttctcatctcatgtttgcagatgatactattttgtttgcttgagcaaatgtgggaaatgcaaaagaaattctgaattgtttgactctatgcaaatcctagtcaggtcaagtttgtagcaaagctaaatcaagtattcttttctccaataacctgaatttgcctaagaagaaagaattgctagttgctttggaaatttctcaggtttgtggaaatgaaaggcatttggggaacccttttattttcaaatgcaggaagaaggaagagtaccatgccctaaaattgagtatgcaaaaacatcttgaaggttggaggatgaaattattgtcgtatgcaggaaggctaactctgattagctctgttgctgcatccatgcctgtgtacaatatgtctaccaacaaagtcccagtatcaccttgtcgagagctagatgcaatcattagaagattctggtggatatgcagtgttgaaaaggataagtatatggctctcaaggcttaggacaaaatctgtcaaccaaaattgcttggtgggctcggtctaagacgatttgaggatatgaatagagtattggtgtcgaaattggcttggagtttggctcaaaaagtggacaagtcatgggttacttgtcttttaagcaaaaactgtggcaaagagagtttttggtcagtcaactcaaagaatagggactctttcctatggaggagtattctggaagtttgaaacattgttgtaaagggttcggtcactttggctgctgaggggaaatacattgattttttgggcacaactgttgtgaaaattatgtacgcaagtatacgcagtcaaacaagtaataaaatgataagtaagattgtctccacagggattgcaaacaaaattggatgtaaaaccaactaatta

SEQ ID NO: 380593 - DNA, 1764 bp, Cannabis indica
agcttctctgctctaagctttttcgcctgggcctgttaaaaataaaaattaatatttaaaaatcccttatcttataataaattcacataaacaaaaggagtactcaccacatccattttatgttcaattcttttgacaatcctagcatgcttagccatggcggcttctttaatcatcttctcacgttcttccgaagatacttctcttccccatcttgcttgagcctcataaaactcagccagtgtaccagcaggtgcctgaccttgtccatcacccgatggaactacatccattgttgccttcttaattctttgttcaacctcttgaacccgcacttcctcttcaagatcttgaacctgtttcgccaatttctgtctttcagccaaagcagtagctacagttgttgggagaaagtcttttccacggtaaatgacaatgtaatatttatttctgagcagtaaaacaccacctgttaagttctgcaaagttaagacacattttagttgttggcttgatcaagcaacaactgaaagagtaatgtatcctccaagaaatattgtccaacaaatttatcagagcaagtaatttccatgagctactttgttatctgaaaataaaaaaaaattgtttattgatcattttgaagttcgcttccaccgccaattgcaaaatatttggaataggataacaagagagatacagattgtgactaaacatgatattatccttttttctgatggagtaatttcacataatggcttcgggacaagaacatatagataaacaatgcataaaacaaaagtatttagctagaagtaggaacctatttagagcttacttttatctcctcagccatcagtttgttgtttgtattctgaatacctcgtttcacagcaatctttgcaaccgagcttttctcccaaagtttgattatagcagatgccagcccttgatgatttctatttctcccttcatcaagaaattcagcacatcaaaaataagaaaagttctcatatccatagaaaaattactccaagaatgaaatggtaccaagagcaaaatgacaaggaagtgtcttggcaagtttccgcaaattagtcatctcagcattggtcaaccgtgatctcattccagtgggaagaagtcgataaggtgttttatagccaggaatcttttgaggaagtaaatcagcatcaactggaattactcctgtaccccaccactcatcaaagcggggacctaaatcatccaatagcctgtgaaactcagcttcctcttctgtcatgttctgaagggggattgtagttttcacagccatgttgcttttttcagaaattgaacttgccgtatcatcactcgtcctcattggattttcagcagaagaaacatctgggataaaattatcatctctttcccgattatttggtgagactttagaaggcccttcatagttactcccacggtacacgatcataacacttcccgacctccataatactaaccctcctgttcgacgctgacattaccaatacagtcagttgcctaggccacgtggactcatttttcattttaaaaaagattaaatcaaagaaagacagacaagtactgacttaatcaacctaatctaaaacagtgaattcagttctcagtatgaatttctttcctagcttttcagcaacaaaaccaaattgactgaaaaagctaaatattatgtagtgaaatcctcttcctattttactttctatcaacataaggccctgaaaa

SEQ ID NO: 380594 - DNA, 3897 bp, Cannabis indica
caaatattcagttcagactcagagcagcagcaacttgtgggctttgggctttttttagatgaggaattttgaaatgaaaaaacttggtcttagatgcctagaaaaattaaacacagtacatataagagagccaacctttggccatttccctaggctggctggctgctccctttctggagtcctgatccggtagtggagatctgcatccaaaagcatggatccgattttatggtgaatctgcataaagggcaactaacaaactccaatatgatccatagaaaaaggatgattagattgaaacccaagcaagcacatgtcccatggcaaaaaattcagaaactacttgatgatataggaccttcagtttagaggaggatgacagaaactacaagaccagaaaaacacatttgacacgtataaaatgtttgttttagttatagtaatacaacaattacatgtcaagccagaacagaagacaataccatttggcatagcagcttgaacctcagatacattctgtgtaaaaggatttcactgttacagaaattaaaaaaaaataaaaaaatcttctgcattcatctacctgcaagcacaaagagcaaatgagttttagatcccaaattcaatgcttattcaataaaaagaaaatatacaaataaatgagttggatagaatataaactttcaactagaaatggcaaataaacaaacaaataataaacaactaaagattgccaaaatgaagagatcctcaaaataatagtgggatagtataaaagaaattcacataacaagaaagagacattccaactgacttattattgttattaaaaaaaatggaattctgtaatttgaacttgttttccgaatattgtccaaaaatgagtgatggggtggttaaagaagcaccccactggttttcggcttatagtgataaatgattgttcgaatgcacatcaatagattaacaaaatatcatacaacaactttagtatgtatgcctatgccatgtgttttaagcagattcaaaatgttgtaaacaatgaaacaataattaaaacttaaaagtaaaatgaccacctgcaaaccaatagactctgaactcatgtcttgacattaagttatgatactagaattgttttttggaaaattttggttgggagaccacataaatcagtagattatcatacactgaactgaataacgatgactatacctgaatttattattgtcagttgaatgtccaaagtcatcttcaagcacatgtagaagcttcctatacaaatgtccatccacaaggtctttctcttggaactgcttcaatagcttcattgcatcttcaatcctgccacttctgcatacctcatccaacaccgttctatatgttatagtatcaactggcctcctctgttcaatcatctcccacagatacttaatggcctcttcaacatctccactaagagccaaagcattcacaagtgagttgtaagatttaccactaggaataaagcttttactcttcatttgattgcataactctatggcgttgttcgttcggccttgagcacataacccatggatcaaataatcataggtaaatgagttcggaatgcagttatagaccacacccatctggtggaatattctgagagcatcgttgacatgaagtgaaaggacatagcccttaaccatggaatttaaagagaagatatctggttcaataccatcattcaccatttgcctaaacaagcctctaactgtgtccatatacacatggttaatgtaagaattgtttcccctactcaaaaatgcagcaaaaagagtattataagttctaattgaaggtcgacaagccaagttcctgctgttcttcatgtgcttatatatgttgatagctctagtcaacttcctagcttcagtgaaaaaataaataatggtattaaaaagagcctcagtgcccatatgagagatagcaagcacttggttgacaacatcatccatttcctcatacatttcagccgcaccaagcttctttacggcaatgtgataagtggaagcatcgtgcttgaacctcggttgctgagaggcccaattgaacaactccaaacacacaagaggatcatcttgctgagccattacattggccaattcttcagctgtaaatctaggaagaagttgggacagtgccctttgaaactgagcttcatcaagaatgggcttattactagctttcaatctcttactaactctccttctataagacctacatataggcttagttgagtaaaaagaacacaaggtaagctgctcaaatccacgttgcaatccatttgaagaaatttcggaacatggcttgtggcccttcgtcgccatgaaacaaaagtaaggcagcttgttcccattaaccaaatttgagttacaggacgatacaaagtatcttttgaagaaatacaggtattgaccaaatgggtttacataattaagcctactagcaagattcgagtttgaaaaactgaatctacgaagagaaatcatattaagacataaacacataagcttgtgattttatgaatcaaattttctggctaaatacaataggaaaaagggaaaaaaggtatcaaaaatgttaccagcatttttgttttcagattgaggaaaatgagaatctagtaataaactcaacaaagaatgaaaggagatgattcctttgatcagatccgtacaatcagaattattttatgctggacctcggacctcacatcaagggagataagtaatgattgtggtgtagttggccagatatgaatcaagaattttcatgagtttgtatgagaaagaaactcagaggcacaccagatctgaaagtggacagcaaaagcaaatgttgtctcatactgtagatgggtttgtaagagtctatttattataattttaaacataaattatacactcacttcttatgagaaagaataaaacaatttagtttaaagtattaactaagtgtggaattttgataagcctccattaatgaaaaaaagaaatagaaatataaatgtggaacctttgttttcttacactctgttattatactaagcacaacaattagaaagaaagagtaaaccaaaagccaacaaaatcaagcaatttgaatgcaatattaatgagaatcaaatcaaagaggactgagtactgagtaataataatccaaaaaacataaaatttattcaaaatattacgcaagcattttatcaaacacttaatagacaaacataacagaaactatgaacacttgtgccaatttcctagcaaccaaggcttacaaaaataatcaaagtctgtaacagggatatagctaagtaccacagtagaacaagagtaatgaataataaagatgcatggatcattttaaaaccataaagcaaagaaaaagttgaaatatagagaagaaagagaggtaattaccagaaggttggaagatcatacggtcagattcgtgagaagaataatgggtgtgctcaaactttgtactctctaagagagagagagaaagagagattaaaggagaaaacactgaaacaaacgagaaatgctacaccggatatgttattgttattcatagaattaaggttagttgtttggttaaggattatggccggtttggttagaagtgtatgatttggcaaaagaaaaagtaattttgtttggggaatttggttttctatagttatatatatctaatattttattcttaaactaatacatatcactattgaaaatatatgaccactttatttaaaacctaaaaatatccttctcaaatttcccatactttttttagtgcaaaaacataaaaaaaaaaaataaaaaattaagtagtccgatggggtccaatggtagt

SEQ ID NO: 380595 - DNA, 876 bp, Cannabis indica
caatcatgaaattgaagcctcaaaagagaggcagccattcttgtatcattggagatagctaaacgaacaccattacgaacgatcttcgtaaggtttggacaagttttatcataatatctatagtcaagttgagatgacactatagggcttgagaatgagatacaaaacaaaaatagggcaatggaactaaacatggaattataaggcttgatcatgaggaggacttgatccataatttactatgaaactagagaatatatatatttctctctttaatttctttctttctttctttctctaagtgtacgaaatgaagtctaagttaacatcaatttatacacaaacaacactagacaatagcaacgtgtgtaaacttacatattattattaaaactaatttcatttttttgaagagtgacatagctagctccactactacgtatgcattaattggtcactatcaatggtttggtacaattcaacatgaggtctatatatatattactactgagttggggtagattgtattatttagtagtatatgaacactaaaatggacacatgtttgacttaaactcttcacaatgaccatatataattttttgttggcggctcaaatttgtatcagctatacataaatataaataagataagatgtaattaatgtttatgtgggagatttgctggaacgcatataaatggctttttgtttttcattgaagaagaagatcaaattcaaggaggagccgaaagtgtgtgattttagtatagataaaatatacaatgctgtttatcaaatgtatagtagtggaatgtgagtgtacagtattttatacataaacgggctcgtttggaacgccgtattaggtcgtattg

SEQ ID NO: 380596 - DNA, 2266 bp, Cannabis indica
atatttatatttataataaatattattaaaaaagagaggagtttgagtttcttgcagtgacgacttcttttataaaatagcacgacatcactgagtcagagagagaaagaagagagagagagagaggcatttctgtgattcttacaaggagaaacgaccctttacgtttggcgttaaagtttctgcaatcgaagggtatttttgtcattttatatataaatatagttatatagatatatatactacccacgttctcgacattatcttaatttttccgaatggagatttggtatttttttgttttttttcttattaatattttctgctggtaagtttttacaagtcccccaagaaaaaaaactagtaaaatgacttaaaagtacagcatcacgagtttataaaagatgagtggtgtgatgatggatcatcatgactcgtgagtcaattttaattatagaacgtggttggtttttgttatttattctggaaaaaagttgaaattattttcatgtgttgtctttctctaaggaaaaaaagagagaagagggcatggttagaaaaaaagattataataatactaataaaaacctatagacttagtcaaattttgttaattaccatcttatttgaaatagtccttaaaagagtatacaattccattccaataaaaataataaaattgaaatttttttgaatcatccagataatttgggaataattaataaaggagtcaacggaaaagtaaaattctaaggcaaaaacttatctttttctttatattattcatagtttataattaatatgtgtctcttttaacgagcagcatatacatatagatataactttattaaaaatgtttaaatacaattgaggggtattattgacatagttttataaaatatgttaaagagcattgataattaaataattaattaatgttcatttaattattatttgtcattgaatccgaactgttggacatccatgatacaactaataaataccgcattttccctaacttatttctttgtcgtttttctttttagtttttacaacatttaaaataaataaataaattggtgttgactaaaaaaaaaaaaaaaaatagggtgtatttcgtgggtcatattcgtattgtatgaggatttatgtattacaagtatacattaaatacgatcagtttaataattatgtcaaaaatataaaatctaaatattattaatagttttacatacaacacaacacatataatttgtttataaatatattttgtttaaatatgttaaattatattaaagacatatttgtaacatattcagaacgtctgttaaagtactaaactaactttaaataaaacattaataaattaatttcttattaactatgtcaattcgaacacaatctaaatttattaaagacaaattcaaaccgattgattgtcttgtaaatttcgagtcgtgttattttatttgacctgttttgctagtctaaccaaaaattaaataaattggtgtttgtattatatattatataatataagctatgatattatacaatatataacctatgttttaataatttaaaaatccttaataaccaaataccttgaaaatgtccatccatgatgtggtatgcctaactaggtcccacgctacaagtataactaactaaccctccttcaaacctcacaatttaactattaaaactagtcttcctagtcctacaactccactcccattactcacctataaatattaataaatttatcaaatatctttaaatctgccaaactattaaaccgtttgcaaatttaatgtgtcatccatttaatatagttaactgctaacatggactgcatttatgtacactcttgtacacgtgacacgtttatattaatacaccaactataattatttaaaaattatataaaaaaaaataaattagttataaaataaataaaataatttttttattcttaatttcttccttgactccctcatttctaagtgaaatctagttattacacacatatatgatcccaagtaattttaaagaaaataaaactttataataacttgaaaaattcaacttttattcagatcaataatacatcagtacaaaaattaatacaacatttacataataaactactggtaataaggtcgtaaatgttcgctattctaggaattctttattagcgagccattaagccaagttaatttataaactccggttctaattacagcttcaatgatgtacgggcctt

SEQ ID NO: 380597 - DNA, 4587 bp, Cannabis indica
aaatcagagtaactcataattaacaacttcatcaatttaaacaaaataccatggttgagtagaagtttagctcactaaccctcattttacaaattcaagtcaaacagctcctatttctaatcaattaaagcttaaacaaactttaaatctaacattaacacatgttctaacttcaatttataccccagctccgaagtcattcaaacctaccctaaaacctaacttaaatatataaaaatcgttaaacaaagatggagaaatcttacctcaaagtttggatatcctctaacccttgctaaaccaacagaaagtgatcaattttatgaagaaatctccttgtgctactggttcttaggatttgaagagagagaagaagaaagaaggtgatgttgtggaattcttaagtttctagattttctagcattttctatacttaagtatataatctaattcttatattaatctctttcagctaaacataatgccacaaaagaaaaaattcaaatcccaccaaattactaatttgccccctcttaagtactaaaacttaaaatcaatcttaggcgtgttttggtcatttttaatttgcttgatttaacctacgtctcaacattttaacctagtccagtataattataatataacacaatttcaaccactatgacatttctgaccactccgtcgagttttccacagtcaccgaaccttaaaatattttattctaaaaatggtatccacgatacccccatagttcaataaaatctttgtaattaataaattacgctttatttattcatttactcatatttccttcattaactcgtaattagtttaagtagaattataatcctactctaattgccacttaatcacatatttaataaaatatgtccaattaaactatcattatattttttgggatattaaatatcttaaataattgcatggcatgacaaggaccatacaagcttttttaagaagtttggggattagaaaatgtatatgcaatataaattgatttaagtcaaagtgtaagaaaatgatactacaatccagatatgatttactttatagacaatagtataagtattttggagtatcatcataagaagagatcaagaagaaaactcacaaagagaactaattttggttaaaagaatggcatttttaggcaatatagtgtctgagaaaataatggcaatagatttgtcaaaactcaaatttaaagagctaagaattttaataaatattggattttttttaaccaatagggctcgtaaaggagatatctagaaggactcttctaagcctaaagaagagaataaccaatatcttgcaaataattaaagctcgtactcttagaggtgagaaagttagacgaaaagagcaaaagagttattgataatttgagtgcgtttagacacagaatgaaacatttaagacttaaacttaaaggtagttttggaagtacaagtcaaagagttctcactaaataattttaaatagtgagtttctagtagcaaagcaaatataagttgggtgtagtaggtataatattgatggatttagtaaggtctgttcggtaaggtttgccaattatgcatattgtatccttatcctagaaacctgactgattaatatattatgagattatatggctaccctatcattaaaagtcattgacgaataaatagttgtgctacgctaacccatgatagggttgaactcttttaaattgtaactagtgtgcttataatgttttaacgcatatatgacataattttaattaactaaaatgaaatagtttttactgaaatgtacgttggtttctgagatttagagattttagcagtggaattacgaagctagcgtttatttttgttaattaaagtggtgtgtaatatgcaagacataaatatatctagaataatatatggtattacaaatatgaagtgatgagatacccagatagttaatacaataaaagaaagaaatcattgaacataactatagaattatatcaatattacacatttaaacttcaccattgtagcaaggtaacaatagaccagaaaaatttagtgtggaaaactagctaatctcacaattaagttatccttaactgaaaggagtaacggaggaccagacaccagaagagcgattagaaaagaagatacaataaagtagtacaaaaataaagagactacaaaaggaacccaagcctattatccagaataataaaaacgcatgacaagtgcaataaatacgtggataaaagaaattaagatgtgcacattagataaaaaaaattagttgaaatggatcattaaatatatatagaagaccttttaaaattcttccatattttcctaatgtaatggaacaagtatatattgatgattgagtagcaattatgaaatgacagaaatgacattgtagctttacgatgaaaaactaaatagagaagtatattttctatatataataacatttaatggaaaaatagaaatagttaaagagaaattagcataaagacttataacctactattcgttgtttattatttttctattttgtaatgcattctcaacatgcatgtaaggattttcagaagggagtaaatagttttactcttagtggcatgcaagatgttcataagtgaataaatagttgttacttttaatggcatgtaagaatgttcatttaaaaaaaaaactgaaactttatagtactatatatgagtgtaatattgccaaacctatgtatttgaagaattcattgtaagttaccgtcatttaaattatgagaagcacatgaaggcacaattcctagagggtttggtagttaaatttgagggcaaaatttctgtaaggagactaaaatgtaatactcagttcgaaattagtattcaagagttattgagatattaattatgtgagaataattatcttatttattaatgttattggtagtagagataattacttaattagggtagtagtaataaatttttaaagatagttaaagttgtattggttgcgaaggtagacaattatggtattttaacaagttaacaaattatttaattagtacccaatatgaagcccattagagtttagaaataatttagtaggtttactaaataaattattatagaattaatgttaaaaaatttgtaagctaaaagaaattcacatgtttagaaactcttttagtaaatcaatcatatttggagtttataactctgattcaggtgattttaatagtgttggaaggatgattcaaaaatttaaacaacatgtaaaaatagctttatcaaaattcaaatatttaaggtcaaaattaagctttaaagttataagatgaaagacttagaattagaaattaaaaattagataagaatttacataataatatgttaagtattgtgagtgttattattattattattattattcataaaactaaatctaataaaagttagtacgggctttattcaaacaactctaaaagttatattgttctattcatttcactcaactaagaaagccaatccataaaaaatttcatgtcatcttcctcgaggttaaatccttagccaaatctatagcacttgcactctcatattccatccctattattctgtgtttcttgatttatgaagctttaagtacttgggggagtagtgatgggataacaatagttttagcagcaagacttaaagtaagaaaattaggtagttttatatgtgttcaattttgtaacataactctttgtgtattggaatatgattcacaatttattattattaatgtttatatgatactaagaatgtatgattttagagacaatataaactatttaaaatgatatagattatggttgttatgaattatatatgttgcatgtatgttgtatattgtatgttgacgacttggttacaaataaggggccacggtagggtatgatatagtgtgagaccgttgaatattgagatactctaccctgtctttttttaattcatgtatgaaattattatggtaggtatgatgtaatgatgttattattgaatgtgtagatactctatccaacattgtcttattcgtatatgacatttattagatactcaacaaaggattctttcagaacgaactcaatccggctctgatacctcatgttgaacacgacaacacataaaaaatataattacatttattattgtaaaagtaattacactaataatttctctcacacttatatatttatcactctcaaagacacttaaaattaaacaactaactctcacttttaaacactacactttatacttgaatacaaatttgcatgatgctccttaaaagaccaaagttttcatacatatacataccactcaaagtcggttttgcacttattgactgtaatatgctagataattctagtaattatttttgagtatttatttaaggctcaagtgctagaaaacacttctctaaatatatcttgatttttcttaaagggtcaatggtaattttcaatgctagaaattatctgttaacttgattatattaaaaaaaatacattaaaaat

SEQ ID NO: 380598 - DNA, 2364 bp, Cannabis indica
attcatataatatgaatatgaactttctgagatttttgtttgaagaaattttcttcattaagtagataaattgcattagctatataagaatatgacctatgataacaaattgacaaatcatatatacttgaaactgattttaggttcagtggttatagaacaagtaatgccataactaaattcaattgagtatcgattttttcatatcatctatagcttcgaaattacaacctttgtcttatagctacgcgtagacattttgtttagagcgattcaatggactgaatcagagaattacaagcaccctagttattcaaagagcctcgtctctaccacccaccgagccaccgctctgatattttccaacagacttgatagctaaccaacttctctctctcctttctagttgtttcgctgaattcccgtacaccaatcccaagttaacacgcagaatattctttgtcttagtcagctagtaatcgaagaagtcaattaggaattacaacttggcacacacaatagagaagattcacaaacataatctagcattgcaagaatacccttcttcagctagttcttgttattactcatagttccgtcaagtttaactattggttaatcaagctttctttcagatttggtcccttagattatagaggttcaccccgtttattgtataatgtcaggatatgtattgttctctctttcctgcatagttatgtatgatttatattttcatacataatgcagtgaattaccaagcttccttttttcgtcggtgtaaagaattcggggcaaagtatgtacctttttggtgcagaaaataactgcaagaggtcaagaatagtttggttttagatcagatttcttgtataagttataaatttgtttcactcgatttagccatctagaatctgtctaagaagtttatggtagtgggctttcgacatagcttacttctgaatttttgagtcttcgatacgaggaagtaggctaaacttggtgatattgaaatgctgaattcaactaaaacttaggaactctattgcttttcgattaaccgggaagaaattcattgctgactttgaaaggttaaacaccaacaacacacacacccacccttctcaccattttacttaaattccactctttctgctacatgggaagaaatccaatttgcccgaaaacccgcatcgaaaattgaaccagaaagagttttatttatttgccagttgatttacacttatcaacaacaaattcacaagtttacttacttaaaaagttgaatattttttcgaaaggtttttgagaaattaagttctcacaagttttgtattcaaccatatggtgaatgagaattgcttgattttctatgttttgttaatgaatgagctataatacttaaactcaacaatttgtttcgattttacaggcaaaggcgttaactagacaattctcgggttcggtttaatcagtatttggaggcttaatggtgataagaacaagtcatggggatcatcttgttaaagagtaagtaaaagaattataaataaagtttgaaactaaaagagttaaattattgtaaggtaaaacagtaacaataaagtaatgaaaattgaagcacattgaattttgcttcaattggcttataattttcctatattttccctttaatcatttgtaacattatacatatgtatattttttttatatagttgttccctttgacttgtagatttttaagggtgtgaagttgtaacttttatgataattgaagtcccataagatcaataaaatagagtatttgggtattatagcaataaaggtaaaagctaatcatgataattatttgaaattttctaaaatttgaataatgaatagttgagatgataaatatattgaatgttggaaatttatgtagtagtcttcttaaaaagtcctttttggtaaaatttttatttgttttggtattaagaagattattttagtttaatttttattttttatgattatttgatccgaatttattaaagtttgaaacacagattacatattatatagacaacactataatttaacaattgaggtcctttgtacttcaaaacatatatgatttaacttttgaaattagataattcacaaagtcaaatcttggacatcattcctcacttcatattgcatacaaaatttcatcttcaacatattgctacctacttcaaatgcagtgaaaattttgaactaaacacacttacaaatgattattgagtttgaataatattttttatttttactagggtaaatattattttggattatttattttattaaatggtaaaatagttcttgtattttttaaaatagtaa

SEQ ID NO: 380599 - DNA, 5692 bp, Cannabis indica
aaaaaaaaatacatacacataaacagagatgaaaataaaacttaatataaataacaaaacatataaaaacattaaaagtagaaaaatcaaaaaaagaagtagacgcccccacaaatatattgtccattttagctcgttcaagttcaagttctagtgtagttcttacatttagtccttgatgttatagatatatggattccacaatgaacataagctgaaaatgtatgaaatgatgtgaagaatctaaaagggaatatgatcaagaagaaacaataatgtgtaaaaaaaattatagttttaaaactataaaaaaaaactacaaaacaactataaatatatacacacaaaacaaatctacaaaacaaagtcaaacccataaacacatatgaaaataaacctaatataaataacaaaatatataagaacattaaaatcagaaaaaaaaaaataataaccaaaacataaactaatttaagaagaacagaatgatcacaaccaataacaataaaaaaaaggataatacaacaaaaatcaaaataactaaaaaattctagaccctaaaatgaaatcaaaacaatctacacaaaccaaaaaataaaattaaactaataaaaaagcaaagttggggaaaaactaaaacgaaactaaaaaaaaacgaaaattttctgaggaagagaaaccttatatttcttcttcgcaggtccacgatcccgttttaatacaggcagagcaaagtcgtagtcatcatcttctacaactgggtgttttcctttggacttattggctacagatttaacacccatttttaaattttttttgggcaatggagaagaggacgataatgaatgagtaatagtcatgaatatatataactttgaaccaaaaaaaaaaataaaggacattcggttatggcaaatcggttaagggaaattagaaaagaaaatggcagaacaatctttgggtgaatgagttttgattgtgggtaggaagaaaatcagttatggaaaaattttaaaaaataaaactgaaatgaaaatgaaaaaaaaaggaataaaagagaggaaaagattggattggtaggtgtcaatcatgtctagtgtctattgacagtaagtgtaagtggtaaaatcgtaaacaaaataacttaaagtgtgaaaaagttacccagtctaggagtatatgtgtaataaaaagactattttgtatttttttatataaaaatttctatttgaaatggactttgaatttatttttttgtgaaatagaattattattttttttaacaagaaacaaatagaatttgcttttatgatgaaaagttgcattttattaataaataattgttacaggagaactcaaaaaccatggacaagaaacagtccaaaaactataacttaattgactcgtaagagacttagttagtgtatgagctacaccatctgcattagcattaggcaaatagcataagtgcatggacttgatcctattattaatttgtaggaatccaatcatgtccttggatgaagttttggactgaatacgtattaatatgttcaactggaattcggctactccacggtactctttgtgacaagtttgaccctggtccagtgttttcaaattcgccataaaatagtgtttccaaaccaacattattgtcccattccagccatccttcaggagtgatcaatgcttccatgttacatcccatgaaaattgttcttgaatactctttccatggccttcctaagaagtttttgtgcactttagggttgctcttatacaactccatgtattctttagttccattgattgagcaattttggaaaacaaagccagtaaattgtgcagggtccttccttccatgtgctgtcactgcgttcttctcgcctttctctggatcggcttgtctcggtgcgattaggatttcggaatcctggaaaaatgaagctgagtttccaaatatgaaatctacgttgccttggatgcgacatgatttgtagaattggcgaagtgagtgtgcgtagagagtgtcttggttgcctaagaattcacaattctcaatcacggaatgatcactgtctgatctgaatgctacagcttggtgtgcatcaggcccccctttgttttggaaggttatgcctttggccatgaacccatcaccaagaactcctattttaaacaaaacagatatatatatcaaaagtcatgtcaagattcatttacactaatcaaaattttactcacgacccttacctattacattaaatttgacaattatgagatacgtattatttatcatttgagtggtaggtaggattgttaaaattaggatacggcaactcaccaacatgttcttatctttttgaataaaagaaattaagataagtaataataataactgatttattaaataggaattaaataactcaccaactgttgcactatcatacgtggtaactccctgcatgccaaaattcagtgacccagtaataacagttttgccaatcccgtctcctagaaacacaacatttttcttctcaagtgggaccctcaccgtctcctcataaacccccagccattatgcggatcacaaaccttttattgccttcactgggcgcagcattaacggcctcctgcaccgtcttgtaacacccgttcctcccgtctttacacacagtcacatccaccgtcaacttcgacgggaacccgccccgggacccaatctctgatccaccgtcggatcccttctcccaaaatccatcacgctctgtcttaggtggggcccacgtggacatgtcgtctccgaaattgtcgtaagatgccatcatgctcagagcattgcttgattgttcggtcaatgagttaagaaacgacattgtctggttcaccaattgggtgtcgttggtgtacttaagcgcagaccagcagtcgtactggtacagcagcgctgcgctcatccacgcccgtgcatccttggtttttccactaggcactgcggcattggccattgatgtacggtagtcagagtaacgtaagaactctaggcagttcttggaggcccttgtacggttgaagctatcagatgatgacttggcgatatgctcgatcattgaattggcaatgtggagattgtccgatgagacctttatcgccgcctggataacctcaactggagtggccttgggtccaaggccgccaagcttggtcagcgtggtctggcatgtttgtggaaaacgggtggccttacaggcttgctggatgaggggggaaggagtagcacctggtgatggggctggcgttggagtttgcaaaggcggttcattgttggcggatgagtaggataaaaaagagaatagagaggaatatgcggttgaaagaagacatgatgatgaatgtggtcattgacacaattacttctctatatatatatgtatacctgaaagaatacaatggtggagaataatatacgaccaaattttatctggttttgtttctaagaattatttttagaaatttgtccgagtatgactgagaaggaaatacatagatttttttctttttttcattctcaaaagaaattgtcatatattttttttttttactttttttagaaaatctaaatatgaggtaaataattgcaacaataatattttctacaagtattttattagcatagactgatagaatctatatctatatttatctaattatgtaattaaagctaaatctatacaggttgagctggaatcttcaactttttgcattctatatatttagtttggtatgattttatcaaaaataaaaatatatagaatgcaaaaatttgaagattccacctcaacatgtttagatgtagctttatgtaattagaccagagaattaaatagcgtcgcgggtaatataattgttatgaaaaaaaataattagtgcctattattttcacacaagtttgtagctaaattgtaaattttgcttcaaatttacttttattttttaaaatatataattataaaatattttaaaaatctgacactttttaatttttaaagcgttgtcaaaggctttttcgagatatatgctaaagagtatcaatggtgtatcaggttatttttaatttaattaataacttttaaaaaatattgtaaatcaatcacaaaacgacatgtttagaggtgcaatagcaatgttcatttattttttgaaaataatttctttatcgacgatttaagatatacgttgacaaaaaaaaatatttgcggatgcattaaagtactagcaaaaacctacctccactcttatcttgtgtccactaatccaaatttacagtggttgtaaacaagaaaaaaatagagaaaaacttgtaaatgaaaagtcattaccaagtatcttatgaaaatagaacttcagaaattttaaaataataataaaaaaaatacatatttacatttgtaatatataatttttttttataaatttcaatcacattaataatattaatctaattaccaaaaccttattgaaactaaattctcaaactactttcactcatatataatttgagtaagtttgaaaatttgtgattagtattaatttttttactttttatacttaatattaatctttgtttaaggtaaaaataccaaattataatgcagcaataaagaaaatgtagtttggtattcttaatgaacttgctacatattatatagtttactagtttaatgaacaaacaaatcgtgcattactatttaggatttttttgtgataaatgttatttgtataaaaaaaaattaggcctatctcggggggcccagcccccggttgttgctctatcttggcggtcattgtccgccgtgaatttgagtgtcgagattgagtatgagtctagctcagcaggctaggccagccgagataggtgagcaatgtcggcgggcctagcccttcgagataggtgagcaatctcgacgagcctagccctccgagatatgtgaacaatctcggtgggctaggcccttcgagataggtcattttttttaaaaaaaaaatgtatattatttttagagataaaaattctcatgctcctaatattattcatgtgtataataaccaaattttataccacaaatatcaaacaaaaataatttatgtacagatagtacataattaataataaaaatctttcagaacaaatagacaataataaacgtaacaaacacaacttggtcactttataaatatggcaactaatgatatctcctctcatgaaagtaacaaccaactattgtttattcttagtcctcattttcaagtagtggcttatcccttaagtgcaatattttcaagagtgtcaacaacttgcatgaaagaaaattattaaagcaacatatattgatatgcagaacacaaaaacaatgttgtaaactcaaaaaattatgttgctattaaacaaaatagtagtaaatatcactgctttattaactaatataatgaagaccaatgatatgctttacaacaaagatgaactattaagtttttttccaatgctatttaggaagctaagcatttaacataagtgtatattttaacttttatacaacatgttgttaaggcttgatgaccaattattattacctatgattattaacttcatatagaatagaatgacaatccaataactataaaatagcta

SEQ ID NO: 380600 - DNA, 4928 bp, Cannabis indica
cctcaaatgaaaatgatcatcatcatatccaacaagagtccaatgatcttgtggtgatcaacaatgaagacaaagaagaagaagaagataatgggattaatattgcgattaacaacggcattgatattgaaattgcggtggaaggattaaatcatgagaataatactacgtaattgataataataataataagactgtctgtttgaattgcaatagtagccgtcatagcgtgagagggtcatccttgtatcgtagtaatggcagtgcctgcaattaaaaccgttcatagttagacaatactataattgaggattaataggaatctctttcatgtgagtttagagttttgatattacaatttttattttattattatttttttttatcattttaacatatatatttaatatgtatatatatacacaccatagaccattttattaatcaatatttttaactaattattttttaaaattaattactaatttttttatttgtttgatatttttaaaatttatatccagcaccaaatacatttaaacgggtattttttatagactattctaacgtttattatatttcaattaatacatattcaataagtgtcacaaaatgataaactttaaaatttgaattttgaactttctttttagtttttagtgcccctaaatacacaaaatatttaatcataatttaagacgttatataaaaatattattatatatattatatataaaaaaatatcgatataatagtttatatttgttcttattaaagttaacaattagataattaatacgcaaacttattaattcttttaaataaaaattagaaataaagtcggtatgagagtgctcacatcaatatctgttagcccctaagccaatacacgtgttttgttaattagtttaattagttattactgatagttaatttattttcttgaaatttgttagtattgtaattttgattctctcttgtataaatataaaggtaggttatttgcagtaaaattctgttttgattttatacactttaattttttttatttttttttggtaaaatttccttatatattttttttctttacaattttgaggtaccagtttgatatcactaatatatgcaaactggattaccactgtattggcttcaaggttttattgtaacgtatacacatgcgtacatagttgtaatgccctacttgcttaggaccgctacagtaattctaattattgtgcacgacttagcaaattaaaagatttttttgaaaatcataccatttaaacttttagttaaactttaaacctttataaatatataaccttagaacctttataactgttcctccaaattctgaagaaccttttccttcctaccgacaatctgaaccagttgttcttcataggacagatttgactatagttctagggcttcgtaacttagaacatgagtcgggtctgatatatattttctcaatattgaaatatgaaatatattatgcaaaatcaacaatgatggtgttaaggctagccaatacgctacctgtctgacattctcaagtatctcaaatggccttatgaacctaaggcttagctttcccctccttttgaagcgttttacacttttcattggtgagactcataggaaaatagattctaccacctgaaactctatgtctctgcacttaggtttaacataacttttctacctactttgcaaagcaagcattcgatacttaatcttctttattacctcactagtctgttgaactaactcaagactcaaatattacatttctctggtctcatcctaaacatttcgtaggaagtcatccctattgtactctaatagttgttgttataggaaaattctatcaaaggcaaatatttactccatgaattctcgaattccataacacaaactcgtaataaatcttctagtatttgactcgtcccctcagatttcccatttgtctgagcgtgaaaagctgtattgaactttaactttgtacccatggctatctaaaggctttcccaaaacttagaagtgaatttcaaatctctatccaaaacaatggatttcagtgctccatgaaggtgaactacctcttttacatataactctgcaaaccaattcattgtgtaagttatctttaccggaaaaaagtgtactaattatgtgaaatgatctactatgacccagatcaaatcatacattcatgtggttctaggtagaccaaccacaaagtcctttgtgatgtcttccacttctactcgggaagtgttaaaggtttgtagtaatcctggcagtttttgatgatttgctttgatctgctgacatgttagacatttggacacatagtaaactacatctttcttcattttgtaccaccagtagtaaagtttcaaatattgatatatttttgtggaacctaggtacaatgaataaggtgtagtatgagattcatcaagtattttttcctaagctcatcacttctcggaacacaaactcgagcctcaaaaagtaacaaccctttattcaagattgagaagtccgtagcctgaccagctaatacctcctctcgaatgttgattagctcaaaatctttcagttgtggacatttgattctctcaagtaaatatgattgaagcattaaataatgaagtttactgaccatgaattcaataccagtctttaccatgtatgtcgctagctgagaagagatcattatggtactaaaaatctattcgggaccttttctactcaaagcgtctgtcaccatattagctttcccaggatgatacaaatcttaaagtcataacccttgacaaactccaactactgctttgtctcatattcaaatatttctaagtgatgaagtacttgagactcttgtgattggtataaatatctcacttttttctctgtacaagtaatgtcgccaaatctttagagcaaacacaacaacaagaagttccaaatcatgtgttgagtaacgttgctcatactctttcaactgacaagaagcataagcaatgaccctgtgagcctgcattaatacacaccccaaaccctacgtggatgcatcgcaatataccataaatttctcctgatctgatggaaaagctaatactggtgctgtaatcaaccgctgctttagttcttgaaaactagtttcacatttctccgaccacacgaactgttgatttttcttggtcaattctctcaatggtatacagatcttggaaaatctttccacaaaatatcaataaatagcgtggcaatactctaaatatcaaagaaacataaaaattgaggctcccaaaatttcctaagctggtaaattatatttttaaaatggcaaaccgttttatgggatcctggatggaaaaatggttcaatgtttctggaaaaacggtggaccatttttctgtagaaattccaaagagcttcaaatctcactcaattctaccccaaatttcacatcaagcttcaaaacacctaattaaattataataaacataacccaaccaataacagccaaaactcacagaatttaaattcaccattgttgagccaagtttgatttcttgaactcaaactttctcaacaccacaatcagctcgcaaaaccatcacaagtcaactttaaacatcttaaatcaacctcagtatacaacccaaaacctctagggttcagacaaaaacacatctcaaatttttcatgcttaaattcaaaggaaaaccactaaaactcaaggagaaagatgctcgggctttacctttggtcttggctttcaacttccctttaattcttgctgaaaaattactgaaaataatgaagaaaatggttgattactctggttcttcctagagccgataatggtggagagagagaaacagataaaaacttttgttttctttacttctctaatgttataaaaaattaattaataatataaaattaatgaatatgtccgacatcttcttccgtgaccaacgactcattgtggggaaaatatacatgttttacatcttcatctgtgaaagtaattggtaagttcatcattcgcgaacgttatgcaagttattttactataatgtgcagatttttccttcattttctaactcctttaaatatcttttttgagagttttgggttattcctgcaatatgtggtcctccagagatcatggccacatgcaatcaacgggtggtggagttattcctgagggatgcgggttccctagtctcgaagctaaaactgctactgcagagtttgcagagtaggtagggttagaatttgtgttctaggagcttgagggtggcctaccccctgcaaagggtttacaactcccaactgtccctgtacgagcaactgtccgtgaataaccccttgtttgggataaataattgggattcgaatccactggcccaagtgtctcgctttgactagagtctcaatttaatccttcagataattacactcattggtgttgtggcctacgtctccatgatattcacacattttttctaatcttttttgttctttccccgtagaggcatccttggggcctttcaaaaatggaccatattacaggtcgccttgtacacattttctcgagtctcaagtaaacttgagtactcagagaattttgcttcgaactccttccttggtcttttgaagttttactttgatttttgttctttccacccctcttgctcctagaatggcttacactctattttggaacttttgtttgttgcttcgtctgtccaggagtaatactacatccagtttgtgccactccatacccaaaaaaaatgggtttgcgtaggagcgtgctcgggagcagaaggtccacagacagccaaagagtactaggttgtattggaccaataaaattgtgccacgtgtacactgtg

SEQ ID NO: 380601 - DNA, 2050 bp, Cannabis indica
acaggttcttttgatggcaccgaatggttttggttcattaggctgagaaactttctagaaattttccgtgactgtgaagtattgtctatggctgttcacttagaggtaatatattgattgtgatagcttgcttttgtcttattgtcacaatctagtataatcttttttctgtgtttcagggatttccagaagaactgagaaattatgatatgcttcctgatccgttttatgagttgaagcatttgaaaatcacgaatagcatgtttccaatttcacaacaggccaatttcttcaatgcctttgtagagcttttcccttgtgtagaaaccttttctttgaaggcatttgattgtgagctcaccattaaggtaccaatgatctcttgttcatgttaaaaagttaatgaacaagttgcttgttaagaatttcatttctctctaagccaacttcttttggtttgcatctaattttgacattgtgattcacttatgctttatctttaactgcagtatgacgaagatagagattttaatttgagctggataccctttattcgcgcctcaacaagcgatgaatatgataagaattttgaagaaatgaaggagtgcattgatacaattgtgaatgtgagccaaatccaattatgtagtgtccttcaatttataaaaattcagcttctgtttatatatttgtcatatgaatatgctaaccatgctaattatgtttcagttgcttagctggacagaggaaaattattcagaggaggaaaactgtgcagatgaatactctgagatggatgtaagtagttttggagtctgattttgatttaaattcgtttttatcagacaaattaatctggattttgttttcttttgcttaaaatgtaggtagaaatatagtgaatagttcaactcagtgaatcaaagtcccacgagaatttgtcctttaaaagaaaattgtggttattagtaaagcaaatgatgacagcttactgtgttctaaaaccaaaacataaatgttgtcacttgaatatggaaatcaattgtgtcaatatagttcttaagtttgattttgtcaaatctgttcattttcctcctttttggactatagtgtacaattttaggcaactaataatttatttgttaattaggatttttgtctcccgaactttgacatgtaccgaatcacaaggtcgttaaaaattctccctaaaccattgagattgttggatttaaggacttttgtctaattttagtaaggaaaatctaacatggatgaaggtttagaaggtatgatttggtacatgtcaaagtttgagggacatgattttgtaggtatcaaagttctgagaacatgatataggacataaataatcactgaattagtaaaattgaatgcaattatatccaacaattttaatagttcaagaaaaaattttaacgtttagaaaaattcatgggcatgatttgatatatgtcaattatgggacaaaaattttaattagtttaatttatttgtcatttcttcaaaataatgtgctagaagttagttatagggtattattcaattaataaagcttatattatggaattggtcaatttcagtgtactaattcgcctttaattatcttacatgtggaaatacatgttgagataagttttttttttgttacaaataatattaattaggcatattttttttttctaatcttaaaattgtttcatatcaatagatttgatgtaagttgccacgactggcctaaaagtatgtaagagcctaaggtaaaattaacatttgggatcttatacaaagagtttcatgataattctagtattgtagtggtaaatatttttaaatctctcgtgtaaggttcaatcatagatatattaaattttagggtaaataccattttggactctctgttttacaaaagttactaattggaccctgtgttttgttaaatgacaaaatggatcatgtattttttaaaatagtacaaataggaccctgaattgattttttgtcaaaataaagtttaattataatccga

SEQ ID NO: 380602 - DNA, 552 bp, Cannabis indica
gacttagatcctgcctaggaactctgccaagaacttagatcctacctatgaactctgtccaggacttaatttcttcctaggaactctatcaaggacttacatcctgcctaaacattctatctaggacttagatccattgtatacgcctgtctggtacttaaccccgtccaggagctctttccgatacgtctcgggctgaatcttccttgagtcaatggcctttgattcatatgttgtctggttcatgattcttgattttatactttgctaattattggctttgtatttcaaggttgtctggataatacccataggttttggccaattaacttgtcttttgtctacgtctttttatgttttctagttgttcacctccctccaccttcttacagagatgaatccgcatgacttttaggaaggtgacaatcggattgacgaagacatacttagtctggatagctagtccatctgatatgaacctgccaactccagttattattctgaagacatttgaggactttgttgtttgtttttatgcttttattttgcata

SEQ ID NO: 380603 - DNA, 4194 bp, Cannabis indica
aaaaaaaaaaaagtctgaattaatgatttttctttttaaccccttcagaaaaagacagttcaacacaagactgctgatttgttattagtctttaactaaacaatacataaaaattcaaggcttcaatggttttatactaacggtgttaattggttattcaagttgttcagtcagtaccaaaattattcgccaaataattagttaagcgaaaagcatttcatgcacattgaaaatatgcttagaagaaattatttactgatatatcgattctaacggcgttcattttttttttggtatctttagacaccttaggttttgactcactgctgtgggtgtcgtaaatatttagtaaatgaaattataattagtacataactgtttcattttccaaaaagaaaaataaggatcactgctggttttaaataatatatatatgtcatataattaattagtgtaaagaaggaaatttctattatgagtacatacattgaaaccaaaaacccaaaatataattaatgaggctataataagctagtccaaaacaaaaataagtacatttatattgtataattaaataaaaaaataagggcggaaaagccgcttgaaccaaccgacagacaaggagaagcattgagttagttttcttggcttggaattgaagggatatgaataggtatggcagttagaaccactctctcttctctcttctctcttgcgctctttcactcactactcattctttctctctctcattattttttcactctcttagacacatgttcatcataataaacatttctattttaaaaaaattagcatcagacaatatcactgaatgtgcggacatccttagccttagagctttatgttgtttcgactcggcggcgccaccagtatactacacggtcgtggaaaaagtctcttagccttctccctcctcccacttgtcacacaattatacactatgtactctcagtcctctcaatgaaactctctctctcatccacaaatttcacaggaaccaatactccaactaaaaacaaggagactactggtgcctcttattgttattattattatcaccatttgtttttttaacaccatacaactcaacaccacctttcactacaagaagaaactcctcttcctctctcttccattatcacaatatatactactatctctctctttgtttctttactataaaaatttgaagacgatttgtttttgtatatttatttaataaatagatatatattaatcgatagatgtatgcatggctttgattgtggacaagcaacaacaacaaacaaacttgaagcacttctgtagaatttgcaagaaaggttttgggtgtgggagagcattgggagggcacatgagagctcacggaataggcgacgagagcagccacctggacgaagatgacgccgctagcgattgggaggagaagcttgccttgggcgacattccggctaccaacaagcgaatgtatgccttgagaaccaaccctaacaggctgcggagttgccgggcctgtgagaattgcggcaaggaattcatgtcatggaaatcttttcttgagcacggtaaatgtagctccgaagatgccgagtctctcctatcttcaccagagtccgacggtgatgaaacgggccgagggaggggctgcaattggtcaaaaagaaaagatcattcagagcaaaagttgggaatttggtaataaataactcctctcatatttgtccttctagtgaggatgaagacttagccaattgcttgatgatgttatcgaatgctgctgttgatcctttaacggccgctgagccggaggagtcttgtgcttcggcaagcagagaagaagagcaaattcgaagaaacaccatcagcttcaacattgcaccaatatcatttaggcttccggttgagaataatcgcaatcttaataatagtaacatcaaagccaaagcagtagccaaaggtaatttgttcgagtgcaaggcatgcaaaaaagtcttcaattcccaccaagctttaggcggacatagagccagtcacaagaaagtgaaaggctgtttcgctgcccggctagacaacgtccaactggatgatagccttccctcggtcatggccgatgatgatgctatcacccaggacgaatttttccctaccaaatcaaattcaaccttacaattggatcatcaccaccgctccaattccccaatagcctccacatccaaacgaaaatcaaaggttcatgagtgttccatatgtcaccgaattttctcttccggacaagctttaggaggccataaaaggtgccattggatcacatccaacactactgctgcagcggacacttcagcggctttgtctaagttccaacagtttcaagaaagcatggaactacaaattcatcatcatcaaagccggctaaggagacccaagttcgagggtaatgctgatgataatgataaagatgaagcccttgatttgaaactcgacctcaatttgccggcaccagggggtggtgatatggcaagatcagctagaacagatcatcaccatgggatcaatagagcggtagtaggaccaacctttgaggtgtcaacagagatttacctgcagccgtggatggggccagcgaaagacgatcatcaagaagataatcatcatcaacaccatagagaagttgacaattacgtgattaacaaggaagagcacaacaacaacaacaacaacaacaacaacaacgacaacagtaataacatcattattaacacaaacaacaacaacaacaatactactagtaatggaacttatactatgcagaataatattatggtggaagatgaagctgacagtaaggtgaaattagcaaagctaagtgagcttaaggatattaacgttaatgagggttcctctccctggttgcaggtagggattggttcaacgattgatgttgttggagttggcccgtaattaaaagtgaggacttttctccatttttcacttctcctttccattttttttttaaaatatattaagaaactgtataattagagtacttaatatagttcatataattgctacaagaaaaaatttatatgtatacagttcatatataattaaatactttattattaattcttgttaatttaaattattgtaaatgttggttgggacaacgggcccaatctgatcatccaaacttataccagtcatcaatgtattcttaataaaagaaaaaaaaaacaaattgtatttatttgattctttatataagggtgatccatacaaacatattatacataatatttaatacatcttggtgttcttgagcgatatgagttcaacccatatattatatatagaaatgttaaaaagtacttgtgatttatgcctaatacttttttaaatgtcaatatcaagtaagtatcggttatagatactttaatttaaagagatattactaatcaattacaaatggacatgtctaaaagtgctagagataagttatgtgtaataacaatgttctattatatattatacaacatatattgcggtattaattatttgggtaataattagtaaaatgtgtgttttcttaatttaattctattattaactaggaaattaagtcgcgtttacttttataaattttttatatattttttattttacttattgagttatataatctaaattataacattttgatgtattgtattataaacaaagtaatagtattaaaattagaaatgcataatttgctattttaaaaatatatagaaagatagtgatattgtttgtgacaaatactaaaaatagtgaaattaacatataaattatttctatgttcacatcttggcttcaacaatgtggaggtctaatcagattgtcaacatgttatccatgtccagcagaagagaaacttgttcgtggctgagtttagcctaatttttaaagatatttatgctatttgtaaccatgttaatgtttctaagtgtctctttataatcgttctgcaaactctttagctatcaatctttttaaacttgtactgtctttagatatggcaagagtgtggtggctgggtttaccatgtgttctttgataattggtgttaaaatcctcttttgttttaattttatacgcttaactcctaatctttttgggtggaaaaaccctctt

SEQ ID NO: 380604 - DNA, 3749 bp, Cannabis indica
aaaaaaaaaaaaaaggttgttttgctaacggtggccgaaagagaacaatggatttgccccatgtttctttaatcattccatcgtgaagaacgcatgtgacccctgttttttatgtgcgtgtaccggtttaaagctaccaatgataaaagcaatataaaataaggtaaatcatacgtcttgttgatgggttttgctacagtttctctagttaaattaacacttagatgattgaactcaacttctagcatgaccataataaaatgaagctggaaaatgactggtgtgcaagacaacgattcaacgaattactataaaaagtcactatgagacagaagttaaatgtcaaaactatcttcttttctaagcagattcctgttcgagataaagctatatctgtaaacgaataactataaaagttcctattcacctaaacaacacaaagtcaacacttcacaaatgaactatatagattaaagataaccattcccaacgaccgaaagttttttctcgagatgtaattttcctgccaattgtagtgaaagcttctctctaagaatcaaggcagacttgtcagcggattcgcatgttaattgtcggtagcctgaatcatgatgatgagacaatggcacatcatcttgcaaatcatcttccatatctataacaatgttgtggagtatgcagcaaacaagaatgattctcggcaatctatgcttatcaggcttccacataactccatgaattatcttccaagtctccttcaaccttgctaatgccctctgtgccaccattcgtgtagcggagagccgtttgttaaactcggactgaaaatctggtgggcctcgtctacggtatggagtaagcagccatggcaaaagagggaatgctgtatctcctactaaatattctcttatctcggttccatcttgaagggttagcttcttgccattcaatcttgtctcctcttcagacattttgaaaaaccctgagctttcaagcacaacagcatcactaaaacttccaggccatccggcaattatgtccctgaatctcatttcagggtcaacaattgcctgcaagatcatgctgcagtttttctcacaatcaagccacacatcattatgtggatcagtagtaggcagagtcatcatgatgtgtgtggtgtcaattgcaccacaacaatttggaagaccgcgtattttttcaaagttggcctttatcttttccatctcttgttcacttgatggccaacaaagatggtgaagccctctttcttccattgcttccacaaatcgccaagtcaactgagcaaccgtagactgattcattccaaatgactcgccgacactagataacgattcaccagagctcagccttctaagagcaacagctacttgatcatttaaagacagatgcttaccattcaaatcactgaagtttgatgccttagccatcatatcttcctttacaagtgagcagatatagttgaatgtctttcttgaaattttgaaaacagattcaaatgtcactggattctttaattgagatgatggccctggaaagcaaaacatacaaaatcaccacacttatctatatctgtgtctatagagtatttatctcagttgacagaaaaggcaaacttatgctacataaggatataaatctttgttgcaagggagttacagtcttaactttcagcagacacaagccaccagatcaaagtagtttttaacttgtaacacatatgagactagaactatgaaccatagtcgatacaacaatattcaactacctcttcaacaacgaaatcaaaatagcttttctgtttcataaaatagatttcagtaggcctcaaaaattacagtgtttcgatctgtttctaactaaagagtgaatatgttcacagacacagtaagtacaagtagaaaagcttttcacaaaagaatgctccctaaactgggatatgaatgaagaataatacagtgaatctcaaagagtatcactaacatatgatcatgttcaatgtaatgttagattttatttttgatctgatacgaattacataccatcaacactagatttccatcagaaagtcagtataaacacaatgaaaaggcagtaatgaccctaatatattaagcagcatatgcagtaagattatattaaagacgactctacaaaatttgaatgaaacattaactgcagtgattctcattacagcataccagagtagttattaattgcaatgtagtgtaagcaaaaaaatcaaagagagacacatttctaaataaatcaaacagagatacatttctaaatcttatgtaatcaataacccagctcaccaagttcgcctaatatatagaattatacaaaagaagaataaaagaatggacagtagaacaaaatcaacggtgaaatttgataaaagctgtacaattgacatcaacctgagaaatgggcatacagtgatgaaataatcttacaagctatgcatattgcaatcatcaatctgatagtcagaaactggacagacccggtttatcaaactatctcaacagtgattataaggatggataagccgagtccacaaccactgcaattccctacttgaggtatcatcactgacaaatgctaagaaagacatcgtaagatcgaaatagttataccaataaatgagacatcccagaactcgatttttcttttccttcttctttccctaaaatcaccatctttggaaggtaacatgaaaatcataactacattaacccaggtcctaaaatttcaccaaatacaaagaaatccctcaccaacccccttgtaaacagcgaaaccagaattagaactaagaccaatatatgtaatgtaataaaaacatatgaatatgccatgtcaatcaacaaccatcgactgaagagaatgtattaacactaaaactttatcagaaaaaggataactattttacctgtaataatcctcttagaaaagtcgtcccaccaatccttgggattcagttgggaacccagagcaacaaccaacacatccttgtcagccttcttctcatggttcttcttcctctttaaccctctaatgggtcccattacaaaactcaaaatggaaaactcagacgagtcaaggcaggtgaaagaaaataaaaatgacccaacagcgtcaaccaagaaaaattaaaagaaaaccctttaatcataagcctcagattcaaagccagaccaatgaaggagattatgatgttaacatacaaaacatatatgatgttcttttttccttcttctttaattttcaaagcatgcaataataaaagttgaagactatatatatattgtgctcaaaaagaggaagaagaatgaatgaggattatgtgtgtgagagcttaaatcaaaagagagtgaaattgaaagaaaaggatcaatggcaatggtgagtagcatgaatatttgataacgcattcattcacaacctgagactaatatcatgaaggcgtagtgtatagtatacttccatctatatatgtatatatatacacacacaataatcaatatgatgtgtaccaatggtctttttttgtttctttttcttctttgcttatttgaattgtaagcctcaaattatatgtcttccaaaattatatatgtaaacacatatcctcaaattatgtcttccaatatgtgtaagcacattgatattatgtattactggtgtactcccttatatggttaataatttttataataatt

SEQ ID NO: 380605 - DNA, 3715 bp, Cannabis indica
gaagaaactttcaactcaataaagttgaagaattttgaaaaaagtaggaatttttggaattgggtttggattaaaaattgattttttttattatttttttaccgagtaaagaatcaccaacgttgataaagaaagagttttgatcaggtggaacagagagccaagctccatctttgattgtgatttgaaaaccagaagtgttgttggatctcaacacagaaatgatttgtgggtctgtgtgttcaccaaacccaatcaaattcctaccactcaaagctccaagctctggacatggtggataatgattgagtctgaaacacgagtcacttttctcatcactcaacattttactcagtacatttctcggttcaattcttaatccatcagccattaattcaagtatctcaaacgacatcgttttaacagccgttatatatttctccaccgccgaactattcaaaaacgacaaccaattagtcaaaacgacaaccaatatcaaaaacagagtaaaaaacataagaaaaacagagtttttattttaccggaaaatttcaggattttctcggaaagtgaagagggttttttgatcttggtttgtgttgagaagaatatattcaatccaaccaatatcaccgtttcttccaattcttttactaccatatccaaatgggtctggaggaccagatttatctttttcagattgaggaagattgaagaatttgaaagcttcatcttcgagtttgttgatgaagtccattggtacaccatggttgatgactttgaagaagccaaattcttcacaagctttgattatggaggttttagcttcatctgggttagagaggtcaacaacagggatttcattgaagaaatttgatgttggtttgtatgttttgatatgtgagaaatggtctaatgctggtcttgaaagaacaaccatgttggtttggtttgtgtatgtgtgttttgttatttgtttgtttgtttgtttctcgagaaaaaaagaaagaaaatatgagagaaaattgaggtagttatggtttatgaatgaggggagttttgggtttgggtttttgggtttttaaagggaaaatttggtgagtgagtttttgtgaaatggtctaatctaatgcatgagtgtgagaggagggaccaaggcgttactaactataaagagaagacatctgtcattgagtgtctttctttgcatttattctatcgagacataaattttcccaacttatattttagagcattgttattggccacaccatattacctatgtggcacgttttcagtggttaacggtttttttattatttattaaattaaaatatatgagactcgatattaatttgtagcaatattaatatactactttatttgataccttaaagtatcccttcacgtttttttatattttagaagagaaatgttaaaaggcactaatagtacttagcaccctcttcagtgtcatattacaaaagatgtaattaagtatcaggtctcatataactttagataataatttttaaaaaatattactaattaattgtaagatgccacctgttatttaagatcaactctctattagaaagacactagtggtgttcaacgctactaatatacaagaccttgatattaaattaaatcaatcatgatataatatcttgtacactgtaattattttcttgatgattattaatgtaattaagcatcaaatcttataaaaataattaattatatttgagagattctaattacatttatgttagacaccaataatatctaattacaatattatatatttaagagtttaaggtgtctaacaatatactagggtgacatttataattggttaataatttatcataatatttattaaattacaattatttactaagtaattgtgtaaaagtaatactatttcataagaataacatattattcttatggaagtgtacgtaattatataataactttgtgaatacaatctttaaaaaattgctaaaggcacccaatacctatgaggctatgacaattattgatatttactattcataatattaatagtaactatttcaatttgattgggtggtagaaagatactatatatgtacatatatgttataactatatgctttatatgatctgatatagaatccatcttaaattaatttgattggttgacaaaatttgtcatccaaatgtgtgtagaattttggtgtaataaaaatgtgtccacatatatttttactctatttattgtatgctctatatatatatgttgaaatgaaaatataatattataattttgcatggtaattaatgtttggtcatttatcacataagaaatggagtattttaagaagaatgttgctaataaatcacataaaattcattgctttgtatgtctattaattattgttaatattattaaatgaaagagaataggaaataaatatagcatcgtttttagtagtgagcttttaatgatgtactgacaatattttttaacggaacggcggagagagagagactcgtatagaaataataagaaaattgttaaaaatgtattatcatgtcggaccacgttatattattattaatgtaattaaatattaaatctgatataatttaaaataaaaattttaaaaaaatattactaattaattataaaacgtcacttatttagtattattagcgtctaataactatattgttctgtaaaagttacaaattgaaccctttattttattaaatgataaaatagatcttatatttttcaaaattgtacaaataggaccttgaaatattttttttatcaaaataaaacttaatgataatctgatctagagatgttatgaaaaaactggttatattttctgtatctgtttgtgttaaaaattatcttaaagttagttatattaaaaattaaaattattaaaaattgagcttaatgtgctatttttaccattttagaaaatatagagttcaatttatcatttaacaaaatgaaagatccaattaataatttttataaaatctaatgatatgtatatgtatttctatgtaatgtatgtaccacgtgacatgatattttcagtgtatatatataacgtgtttttgtatatactaaatataaataaatgaattttctaaaaactatataatatatataaataaatgaatggtatacatgttggttgtagttttcacaaataatatttggtgtagtggaaatttattagaaacagttttatgatatattagtaatgtgtagaaaaataatatcatataaaaattaattaaaatacattaaaattatttatttagttttacaaataacatattacatacttataatgcttgacacattaaaaatacatttaataaacaatatttcactttcacaaatcctatcatcttaattaattaataattttaaaaagtgttcttcattttttttttctttctatattttcgttagataatatataaaaataaaattggtgcactcttaaaatgaatattataatgttatatattatatgtagtactctatttttcaactactcgatatcttgatatcattcttttttaatttcattactaaaagaaggagaaattattattaggtataaattattcgaatttcaaaacgaatttgatgattatgggcaattaactaacaacttcctttttttttcaacgt

SEQ ID NO: 380606 - DNA, 544 bp, Cannabis indica
ttttcaagcacattccattccaaaaggctaatatatttgtttttatcttccccatttgtcagaaagcgccaatattgtttgtggcttcttcaagctctgacttgtttttgcttcctcttggttgtgcttcttcaaaaggttgcaatatttcatttcttctcaggctgccagaagtcatgcaaattatcattccctgggggaaaacctgtcattcccttcaaaattttggcaacccccaccgaaacaacctttttccgcaactcttttttatcattttattgtttaaaacagaattgccattgtggaaatggggttgcaatggaaaaagatctaattgacatcattcttactcaccagcaggttgtttctgctcggttggcttcacctgaactgcagttggaacagcatgagcataagggaagccagccggcaaaagctgatgtgggttccctgattgtgcagcagcatattggggatgcataagtgcctgagaaggtaagccaccacctttcatgttgccagcagcagcagcagcagctgcagc

SEQ ID NO: 380607 - DNA, 3360 bp, Cannabis indica
ttttctatataaataagatgtttttggctaactgtattcagttgagctttcccatttcacttcatctttttcctccattgtttttccattttttgctcgatcttgagtactgagtttcagtactcttacagaacttatgaaggagataatagaaatatataacataagttttatttatttatttaaagcatacagttaattcaagccttaaatagcattgaatgtctcaaggaatgcttatgagtatagattggagctattttcctcttgaaattaattaaattagaaacaaataacggtccaataaaaattacattgttaaattgtctgtatcaacatttataataaataaccatacccaagaaaaaaataaaataaataaacacacacattaataataaataatacaatcattcttacaagagttaaaagataagaattaagcacatgataaaataaaacaattatacaagattgactttaaagattaatttccatgaaatgatttcattgtttgaacaagttgcataatttaccctcactagacaaaaacctaagtaacttgttctcgtggcatggcataacataatgaatttaatgactttagggaaaactcactcgattaagttagttaacacattcaaaatgcatttaaactttttaagagctacaactacaaaccgcgattatttataagaaaaaaaaattatggatacttttatttttatttttgactcttataaggttactccttaaaatggacaatggtgcagtttggaaaaatatataattatattaaacttattttttaggtgacactcgacgaggactaattctagcaataacaactaattaaatcagtgatgtgacccttttaaagagaaatgttaaaggacattagtggtgtccatcactattctatatatcaatattgctattggtattgagtcatataatttaatataataatttttaaagaatattgctagctaattgcaagacgatatatttagaggtagtaggcaccattaatgtccaatagcaatactcctctctaaatcaaagagttcaaaattgtacatatttatttttattattattattttggtactcgaagtttaaattaaattgcatattgttattattaacataagtagtgtgtgatgtgttatttataaataagtaaaatagaacatgttaaagaacaaaaaaaattattaaatttaattaattcctaattaaaaggttattaaattgtgaggattactaatatcaactatgtgtagttttgcaactagacaaaatcaaactaataaataaagttaaaaaggaagaatcacattgagaataattttaaataatgaaacaaaaattttaattataaactttggagagaaaaaaaaactaaacaaacctaattaaaaattattccgacatttttttttttataattagtagctagcccatttacaacaattaaccaatagtcaatttttatagactactaaaaaaacccacataatcttacactatagaaaaggattaaatgttcatcatagattttttctaaaataatttaagtaaataaaaataaaaataaaatggggaccaatatatatttaatggagctcataatagggtgcacgcattgggatgcgtgtttaagtgaacattagattatttttcttacaaacgaaacgatattgcacttaagatttagagaaattgaataaatatgaagttgacaaaagacaatttttctatttctatttcttttgtttttttgggatatttgaatgaataataatattgtggaaaaagaacatatttggtagaactaaactagtgaggagggaaaagggcattttagtaattgtgtatgtagtctcgtgggagggtgggtaaagagaataaagataaagggacctacttgctcccaaaacgacgggcacccacgtcggatttatgctaactgacaaaaatgccaccttcactccaagattgagcaaatcttcctgtctcatttttttggatcaaattgcaaaattttcttcttaataaacgaataatctcatctcttgtaatcacatatttgcccctctctttccaatttattctctatattattctttaattatcaataaattcaacaaactattgaatctaaaaaaaatcaaccaattatttgttaagaaaaaaatataaataaattccttgccatttataaaaaaaaagagtaattactattttaaattgtgttttacaaaagttattaattggaccttctgttttattaaatgacaaaataaatcttatattttctaaaatggtaaaaataggaccttgaactcaattttcaacaatttttttattttttaataaaactaactttaatttaagacaatttctagcacgaacagattcagaaaatataaccagttttgtcataatatctctagatcaaattattattaagttttattttgacaaaaaattagttcagagtcctatttgtataattttagaaaatatacggtatattttgtcacttaataaaataaagagtccaattaacaatttttgcaaaatacggaatctgatataatatttacccaaaaaagaaagaaagaaaaaaattcttaaaattatatataaaaaaccgttccaaacaaaaactcatttaaaactatttattaattaggtttttaactgcaaaaaaatataaaaaatatatattttttattataaaaatgaagttattcttaaatctaatgttataatatgtgaaagaataggacttatttggattgaagtagcttcacaattcacaggcttgcttgcaatctttgtagcagtgtttggtggcgtgccaactattaagacttaaaatagtaattggtaaattttatttatttattagaagagtaattataatataattggttaaaaaatgaacggtatagttgtaaataaaagtgaaaatagaggatattttgggagtattaaaagtaggaagtgggggtagggtaacgtgggacggttgagatttagttaaactggagcctcaaacattgacaatttgcttgattccgtagcctttggggaaaggaaactcttttcttacacattttttttaatgttgaaaatttttgttatgcaccaagtaattagcggatactacatccatcttcaaaatattaataggaaagaatcttctatctatacaaattttttaacctaaaaatatgtacaactaatccataaatgaatatggattaggacaagctaaaaaaattgaaaaataaatttgcaggtaaaataaagattggtaaataccattttaaattctgcgttacaaaa

SEQ ID NO: 380608 - DNA, 1019 bp, Cannabis indica
aaataaaaaaaaataaaaaccttcctttaatggataaagaaaaaatattcctctaactcatcccatttgttttgtatacattttagctactgaactatagttcatgaatgatgaacgttttttttacatgagaatatgggagatctatgtgggcctcaattgggcttcacttcattaggcccataagaactcagtgattaagaatgagcacctcaatagttgggcttcaatggactgacccagttcttcagcagcagccagcccatggtattggaataaatacaagaatatgaatatgaattgtttcatggccaaaataaaagattttaaatgacataatctctcattaaactaaatataacttagctattactaagtattgaaaagaagagctttgtcaagaaaaatgtggcaaattgatacatacataaatacataagagtatccaaattaataaattagatgtacaaattgaatctcttagaactaaaatatgtaacatttagcaactaaattcaaatatataagcatcctaaaaagtcatagaattaaatactaataaaacttggaaagtactgtaattatttcaaaataaaagatgtctatctaccaagaaaaaaaaaaaagatttgaagatttagatactaattcgacattagtaatctgttattttaagaaaaaatgatatgatactaacgagtaactagttactactattaattttttaaaaattgaatggaaaaaaatcccttaaaaatttaagaaaaagaaaggctaaatacacagttttttttttttttaataaaccaaatacacaaagttaaaaatcctatacttattaaattcatattatatgtataaaaaatataaaacatatttaatgtaatttctaatcattccataacacatccgaccaattatggttgtcaaaagtgacatttgcatatggtcaatgtataaaaagattggaaattacagtaaatgaccccaaatcataagactatgttagtttatgtcct

SEQ ID NO: 380609 - DNA, 2188 bp, Cannabis indica
tagttaaggactgttgtctaaatgtacttttataattatatttttttctgctcttaaccataatgttgagtactagttgctttttatgacttgctaattttcaataaacaagtttcactcgtgatgagtggagctccaacactgaaagacttgatagaaaattgtgcattcaacttgctaaatataattatcaatttcgatgcaaaaatctaaccgggaagatttttattcaaaaacgtgcgatcaatgaaccacacatatttgcaaatttgctagtgatttgtttgtcctcacatattttgaaagtgatcattattttccattattcattgaaacttttatttttttgaagagaaattgatcacttttttcatttcattgactttgtagcatgtgtggtataagcttaatacttttcatgtgtggtatgtgatagtttgtcattttccaggtcggctatatatgctattgttggttttacctttttagagctctactatttgactatccatttatatttgttgtgagatgttggctctatatgaaccagttaagttagcgggtcccattcttatcttcaaactcacaagaatcttgaattctgacgtggtccttatccattgagaaagttcaacaactcataaaccagaccatacctttttgctcctgactctcattattctgatcgatcccatacatctctaaaagatggcttcaatgtcttctctgcagactatctttcaagcaaaaccaagaagcttttcttctcagtatggtgtctgcagtccatcaacagcatcaccagcaggtccacagctctttcttggaacctaagtgagaagaacaagaagaagacaagacctctaactgtggtggctgcggttggggatgtatcagccgatggaacagcttacttgattgctggtgcagctgctgtggctctacttggaactgctttccctatcctattctcccgaaaagacacgtatgaaaagttacctttgctctttttattactatacaactgttttctttgctcaaattcataatgttaagactcaacataggaagcctaataaggatccatattgtgtggtttgtgcgtgcagatgtcctgagtgtgatggggcagggttcgttcgaaagtcaggggtaaccttaagagcaaatgcagcaagaaaagatgagactcagatcgtttgtgctcgttgcaatggccttggcaagcttaatcaaattgataaaaattaattaccttttctttcagctctctctctttctactgtaatattcttcgtaaattgagaacatcatatcatttctttataagctccacttaacaatgagattggaaccatgagtcttattacctgtacattctattttgctgctcatactttctattatgctttccacactaatgtcagaggaaaggaaatatataactaaggaggaagctgctaaaagaattaaaagagtccaaacttctatttgctttctcttaaacttacaaattcatagcttagacagaaaaagcacaaaaaaactagaatttgaatttagtgagagaattcaatttcaactaactaaccctttccttacagtttttgtgctctttataatagagctctgttgaaggtgggaaagtcgttgtgcttgcaaaatgtagttgactaaacaataatttgaattatgagttctggacatttcgcttatgcgtggattgatggcgacagcaacacacatttcccattttagaacgtcgatgatgtcagtaaaaatatgttcatgctttcgtcaaaaccagggaaacctcatgtgtgtgtcgactctttcacgacttacacagttgggctagggtatcctttggttgggagttaaccttccttatttattaaggaaaagtgggtcaaaatatttgggctcaacaattgccccttgaatctaggtcagattaaatcgaaatatatggctagggtcggactctaaaatccatgaacacatattttgggccacgtgtcaacacctgtaatcttgatcaaggtcattgtcgattagtcgcatgttttaccactcacccgtatttttgagtgcaacgttcgggaactaagaggaatacgattgggcgtgccttaaatgttgaagtgttttcttaagtgtcacgttttcatttttttttttattagtt

SEQ ID NO: 380610 - DNA, 1136 bp, Cannabis indica
taccaaacgccaccataatatttgagtggatgtattattattttcatatacaatatatataaaagaaactacattgtatatccacttaactttatttggtttaatttttacttttatttttatattctttaagatataaccatttttatggaagatgtctccattacatcttttaaattaatgtaaattatatgctagaattacatagagagtgaagatatattagacaactcgctcaaaaaaattaatatattttaataaactttaatataaaagcatttttaattaatagataaaaaaaattactttttaatcactacatgttgacatcaaactttcttttataattatcaagaaacgtatgacgcataaatatatagctcatgagtcatgacatcatcaataatattaatatgagctaattaattaagtactaatataaatatattttattatctaacatgtgagaatagtcggtgcatactttgttatcaactactcctttacttaattatattatttatatatgttaatttaattacttaaacaatttcaacttgacaatttgtactagcttgaaaatattgttaaaaagtaatattgatgctaagcattttttttaaggtgttgttattgatgtaattaaatattaaattttatataattttaaaaaaataaattttaaaaaatatgactaaccaattatataacgtgacctataagtactactcatgtttaataacaatactactttgcattttgaaattgtccaataaactatattgttaattggttgttgaatctggttaattaatgaaggttggaatgcatgatatgaattctcttatgtcgtgtaaatttaataattataattaaaggcgtagaccaacatttataatattattataaatgtgttacatacatatgagtagtattaaagaaagatgaataacttgtatattgtttttttaacttttttttttttaatttacagtttgaatttctaaagtggttgcagcgctagttgtaatatgggtttctatacgatttttcattacgatttaggttgcagcgctagttgcaataagaatttctatatagaaatccgtaaaaatcaaaaaaaaaaaaaaaaatta

SEQ ID NO: 380611 - DNA, 1346 bp, Cannabis indica
aaaacaaaccatagtgaaaaactcatttgctttatatatgtctaagacatgtacacttggaacacttattttattttcatttcatcttacaaaagtcattaatgattccatatctaatatagtttgcactttctttagtagtattctttatgaaatttcttgagtattatctttatcttcatcctctattgaagcgagatagttaaagaagcatgtttgtctttaatttctttaaagtttgtctcatttggcatgacattaaaatttatgttggtagttataacgaaaacatgcacttaaaatataacaaaataaatgaggttcacaaaagaattcatataacgcaataagttgaaattatgacaaatactctcaagatagcaaactcatcattaatattaattctttgaacaataatattaactggaaccggtactcatgttgtagtaattaaatattgaaaacaaatcatgttaaataattaattaatctttggactgtacatattgtttatatagaaattttataattgtcacatatttattaccacaaatatatctgtaattaaaataaatattaatcttttggtcgatcaatactcacatgaaaaacacacacaaccatttaatattcctcacgatcaatactcacatgaaaaacacacacaaccatttaatattcctcatgaacaatttacagagagattacttttggccacatcatgatccaattaacccatgtagaatgaaagtcaactagtgtttagtaaatttaaaccaaattttatctaaataaatttggctttatctcaatatataacaagacatcaattccaaatagaaaagaaattaatacaataaacaaataatgtgccaaccaatatttttatatataacgtatatataaaccaagtaaatctatgaaattcaaaagaaaacttgaattctatataagcaatatataggcatatttgaatgtgctttgacccagaggcctcgtataagaaatcataaacatatatacatgaactacatctgaagtctaacacactatattaaaagagtcatatgcaaaaactagacttctatgttatattgattcaaataaatattatacatgaacataatattatatatgaacattagattagtgtttgattggtggtaataaaatgtagattgtacaaaagaaaataatttttatttcattcatttgtttagttttagattaaaatattattttaatgaaataatatttccactaaaatagcataatgactattctattttaaaataaaataaaaaaaaatcattctaatgtattatcaaaaaatatttaataatttt

SEQ ID NO: 380612 - DNA, 4680 bp, Cannabis indica
tctctcacacacacacacacacagaaaacaacttcacttggccaaactcccatatgaaaggaattctaaagagacccacttggccaccactaagtgatagaattgaggatcatctacaggtatactaacacccaaccaagtgaaaaaagaaaaaaaaaaatcaaaagaaccaaaaaaataataccccaaaaacacataaaaaagtagccatatgatcatggaagctgaaaatgggatccgcaggcctaatttcccactccagttattagagaaaaaggaagatgaccaagcatgctccaacccgggctacaactccttagccataacagtacccgtaccatccgacccaaatcggcccggttctctccaagtaaccgagccatcaaagaaggctcctccaaagcgtacctcgaccaaggataggcatactaaagttgatggccgtggccgtcgcatccgaatgcctgccacttgcgctgctagggtttttcagttgaccagagagctgggtcacaaatccgacggcgaaactattgagtggcttcttcagcaagccgagccctcagtgatcgccgccacggggaccgggacaattcccgcgaactttacatctctaaacatatcccttcggagctccggctcaagtatgtcagcgccatcgcacttccggagctcttactttaaccctaattacaacttcggtgcgcttgcggctgcatcacagtttatacgaacaacttcatcaggagcagagtgggagaggggtgctggtagtactgtaatgatggatgaatctcagcaacgccgggctttgttctcaggagggatagggttattgacctcttcacaagtcaattcatcatcatcatcatcaacatcctcttcctcactgccaatgatgttgaattttggttctgggaatgttagcgcaatgatgatgcaaacaaagcaagagctgcatcatgaggcagctgctgcaagcagcctagagcagagtgaagccggcgccggcgggcaaagaaagcgacgggccggaccagaggaggacttgtcttccgcacagagtaacaataataatagtaacagtaacaacggttatttgttgcaatctagttcgggttcagttcaggaaagtcataacattagtaatcccataccggcggcattttggatgttgcccaataattctgctggtaataataatcacttagctgctgctgctgctgctgctgccgggtcaatatgggggggttcgcgcataatcaacacgatcccatgtggacgagtagcagtactactacaacttctaataataatatgtatagaggagcacctttgcatttcatgaattttcctccggtggccttaatgcctggttcgggaacaggctgcagcaatgacagccatagccacttgctcaacgcttttaggccgattattaatgagtctccggtgactgctgcatcccaccaacatcccggtggttgtggagatgatactagcagtactactagtcatcggtgactgcagctactatatatatatatatatagatccaatatcaattacagattatatatgcgtacgatttgatttttatttcttttttccttttacatatatagatattattttaattcgcctctctctactctgatcttacaaaatatataagtatatatagatatttatatttgtgtgcaacaaaacacatgtttggtgctctaaattcgagtttatagtgtttgagtttagagtgagtaattaattagtagggtttgatatcctgaagatcgattataggttgacatggttttggtgttggttggttttctgctatgttcatttttggtgtgagtatgatctgaacaatacttacagtactgttacacatattgactgtttttctgttcattaatatatatttatattcattaaatatgacacagtcctgtcatgttttgttgtttggcacatcagtaaaatacttccatgcatgcaatttattttatgatcttactatatttatatcttcttaatattttaggactaaacatatatataataattatcactttgactaacataattctaaatagaaatgattaaaaaatttatcactcaattattggtaggattatatataccagtaaaattaagtgagaaacttaatatcattctcattattaagacgaaattaagaaaagaaaaatattccacttgaggcaattaagatctcctactcctagctagatatttcatatatatatatatattatcattgatatctcatattctactagttttggtgcactatttgaggtttaggtactgcggtatataaatatattaccatatactatgatgaaggagcccacacacgatcatttccaagggcttcaggtggtgaggcccacctctgcccattgccaaaacgagtgcgtacactcgctgactacattcttctcatacacttaaatttgactttttgcttcgctattttgataaaagtaattgtaatattatatttatttatactatacacacagttcttcataattcactatcgtaaaagaattaatgtgatactagcttaatttgcaatgcatgatctgtactggttattaatttaatttgttagtatatgaactttgtaaaatataataatttattaataaatgttttttttcatgtgtcgtcatttttgtatatattgtccattaaattaaactgtaccgtttcactttacaggcaatgcaagaggtgtacatgatatggatcatcattccggtcccatcaaggtcatgttattattattattatagtttataagataatgaatgtgattattgctttatacaattctattatatataattccagtgccctgctagctagtacaagatattgattatgattgcttttcttcatcttgataagattaactcaaatatatatgtttatttttccgtatttgatgaaattgaaatttaatatttctttttccatatatctgtgtatattatcgtgttagtaggtatttaatgtgttttgaaatttagtctttagttacatgatttcactaagttagttttagtcacaataagtattgtgattaaaaatatatttattcacaacaaattgtaagttttatgattaatacatttagtcacgaactttttagtcacaccataagaatgataatttataattactcacaattttttttaaatttagttacaaatagttttgttgtgactaaaaataaatttttttgtagtgtgaacttagatgtgcttcatgaggatgtattccgacaaagtttcgactagtatagtgtgattaataattcgttcctcttttcaaatgaggcgatcatctatttgtaggcacaaaaaatctgttagcttccctctttgcaattgctttaatttgtccacgtgtattaatttcattcgtttctcctcataattttgttttcctgattttaaagttcctcaagcgcattattctttccttcacaaattaagctatgcttttatgcctctaagtttttcgctctgcttcccttttagtgaatgagtcgtttctttattaatcttgccacatcacaatattatctctttccacattttagtcttctagaattaatttttgttaccttcgagattatttttatcacttataattgcccctccgttttacaatatctgagcttatgaatatttttagttcaagctctgttgtcatggaatcggttacaaaaattattgccatatgtcgttaatatgcaataattgatttaataggtaatcattatttcaaaattttaggaaactgtgtctgtcttttcttatttctagattattccgttttgattcatgttatatatgaaaaataaatatttatatatggggaatttaaaaaagtttcaagtcacttccatgagttttccttctaaattcttgctttctctaagtcttttctcctatactgcttcgagactcccctttttccttttagatctttgattctcttcatcttaacaatgatttctagatcttccaaaggtagaactaataatgttacttagacttgatatggtcggtataatagaaagatatgccctgccaaggtctaaacatgttcaacacatctctccttgctgagtgtcatgtcacctgtgtgaaatttgggttaacattttccccaagtttgcgtgagaatttcttctcttatggggactcctacgatttacgcgtcactagggtaggtgacacatgtttgtgcctacatgtcgacttgtatgtgacgttagccttgctcgaggcgtgcgaatctccctctgtctcttcaagtcttttcattaaattctttgccttaaaaattgtacatgggagatcgtgcgctgacggttatttatcccgtaatgataagcctttattatttttgagggaaaataaaaattttgaagttgataacaaatgtaacccctcaaaaactctataaaaagaccataaaattataattttcaattttatagctatttgcaaattctatagctagaagcaagaagtttccttgagcttttttagttgttcattaattaccgaattatttcgtcgagaagcttcaatcaaacagagaattagtgagtgagttattgttggaaattatttt

SEQ ID NO: 380613 - DNA, 1220 bp, Cannabis indica
aatctatcaaaacacctattctaaggggtgtattgtaaacgagtccaatttatttaatcatttatcattacgttgtagtaaaacaaattagacaaacaaaacctctaaccggttgtacttaaccaagtccctccgcgatacacccaatcaaaacctcccttataagacccaacaacacaccaaccaacttcttcttcttttctctcttgtttactctgcaactaaccaaagctccatcaatggcgtctcacacaatcttcctactcttcttcttcctccttcacttctctctttctcaactaacaacagcagagaacatcaacaacaactgcgattctttaacctgtaccggagcaactaatccaccaccagttcacttcccattccgattaagaaacagaaacttatcgcaaccaaatcgatgcagctaccgaacaggcttcgatctctcctgcaacaaccaaaaccagacaatcatcaggctcagttcaggcgaattcgccgttcaccaaatcaattacgaagaacagagtctcttcctcaacgaccctagcggttgcttacccaaacaattcatgaatcgagaattagatttcttcaacacttttccattcgtaatcgatcgagtcgaaaattacacgtttctcaattgctccaaggatttcatcgcgaagatgaagtacgatctcaaccctatttcttgtctcagtgacggcgaattctccgttttcgccgttccgactatgttttattactataacagaggttccatgacggtagattcacagtcactttcaccgtcaccgtcagaatcgccgttaggctcttgttctgagatttcgaccgctatggttccgcgtccgtacaacccgtttttttggcccggtacaactggagatatccaactttggtgggtcgacccgaattgcagagattgcttagcgcgtggaggagattgcgggtgctccgtttctccaaacgggtcgaatcacggtatgtttctactttgcttaattaattatattcaattccgttaaactttacgattattaattttactaagtccccaaatttaagtataaaattttagtctttgattttcgttcactttagattatcataaataaaattacacaaaaatattaagtggcgtaacacttttttaattatatataataaaattatttttaattttttaattagaaattaaaattttaaaa

SEQ ID NO: 380614 - DNA, 2107 bp, Cannabis indica
ttttattttattttatttattgcagttacaactaaaaaacatttggagagattaagtttgaacttggttgattatttcttgggtgacacgactccctcctttatcaagttcaaatataaatggacttgtgatcgcgattctgagagtgtcctcaagtctcttttagaagttgaacatgttggtccatcatcatcaaaggcgcatgaacatgtcacttgtattgagtacgaggatttgacgaaagatgtatcctttgttattagccagcagtagattcttatgtctaatgtggctgtattgagcaaaaaatggacattcttattgaggtaacttttttttgtgtagtttgtttgtagttttttttaagatattgcttaggttttaattgaaattttaattattttattttagtgctcgcatgttgcttctacacaacttgagacccaatctgatgatgtgctccgcactttaaaaaatgatgaggatgtggatgttgatgtctataataaagaagatattggtgatgaagaagctagttctgaggaagatgatgaggctgaggatgatgatgggaaaaaataatgatgttgatgaggattatggggacgatagtcaagatgatgaggaggaggatgatgatgttggagatggtcgtgggcagggtgagtctagtgctaaaaatgtgaaaaatgaggaggggagtgttgttgttgaagtaggtgcaaaggatgatgaatgtgcataagatgcatgtacttctaaagaaggcactaataatcatgttgaaatgactgatgatttaggcattcttgtagatcgtaatgagtattgtatttttatttggttatcaatttttattgttgttttgtagtctatttatctttacgtggttgttttgtagttttttcacttttgttgtctttgatttgttttagtgttgttttgccatgatttttttaaatataatttatttcgtttttaaatagatggtatcctctaacccagtgttggtggttctgccactaagaatgtgtgccaaaaaaataatcttgaaatagttgtaattcaagagactcctatattacatccttcaaagagggatcgaaagaaaagaccagttttgaagtctccatttatggggcttacttctggtgattccacatcaggttcaacatctatttcaactgatgcgtcccagtttaaaatggtcaaatatgttgctggcttgtgcctgttggacgataaaattagtgaacctgttgatctctaattggtgtctaagtttgacttttggctagctaaaggtctaagaaaacaaaaatcaatgtaagtgcttctattgtttattattatatttcattttcttttagtcgggtttatttttgtataatataattttattttccagcactacaactaatgtagattgcaagggtaaggagaaaatatctccaccattatttgttgtggtgttgagaaagttaacagcaagatgtggttccacaatcttaattagttaccctaacagcttcccaactttgattgcaaattttcttaccgttgttttgtagttatttttatttcaaaatatagatctgttttaatgtgatgttttacagctgtttattttagcttcccattttattgttcttatcttagcacatagactacattttttattacttgcccaagaaatttaagtatgccaagagccaaaaatcaaagttacaacaacaactgattaccttttcagtgctagtacataaggaatttgtataataggtttgttgcaaagcagttagatataggggtgttcatccaatccaatttgtaatattttgctcatagtgcatctgatccgcactaagtgcggatttcattttttagatcccatccaatccgcaaaatagcttaaatccaatccaatccaatccaatccgtaaaagtgcggattagatcagttattttggattggttactttttaatattaaattatgtaatatttatgaaaaaaatatttttcttcgcataactagcgacaaaataaaatatattattgttattttatgtctccaacaacaaactaaaataaataaaataacaaat

SEQ ID NO: 380615 - DNA, 1847 bp, Cannabis indica
aaagagaacttcttcggaatgacaaggttccatccaatcaacactaccagatttaaaattttacgtaagtataattcatgtccaaaatcttagttttgagttttagagttttagagtttttatggttttatatttatactaattctattatttcttccatatttttagttgctacaaagggaccgatcccaataccagagatccaaaggaggcacgagatcctagtgattctttcatatggatcgtaagtagctaacttcttgctacatgataataattcaaagtcaggtggcctccttgccaaagatcaatgcaccatggactataagaatcccaagtaccctacttggcaacaagttccagtgcccaaggatgaagaagaccgcaactacattgctcgtatccatcatctaataaatgtaaccattttgaaagccatcgatgttgaagaaagggctccccaaggtaatacttcttgcttttatggatggtctcctactgtccttagggccaagcgtactgcctcagtgaaatttaaggacaaccaatataatttttatatctggaattgtgttgacttgatatcccataggtttgatagttagtaccccaagtttcatgtccaactgacttgtaatagttcatattatggaattgctaattaatatggtactaataccaataaggctgctagtcaggattggaatatgtctccacttaacccttatcatctcttcatgatcataggttttagggagtctagtaattataacagtaatcctttcttgcctagcacttttggtaaacatttatatgagagttttgttctcgccactttaaatttatcccttttctgtagatcttaacttcctttgttttacccttgcagctatgaataatttggaagatctcatctgcagtcccaacatccctatcaagcgaggcaagaaaagaagtgttcctaaggaagttacttccgagaaacaacctaaagctctcaagaagaagaaggggctaataggaagaaagctacctcatctagtgtcatcactgagcagggaacaatcgctctaaatgtctccactcctacgtcgtctgaatgtctccacagatgtgcaacccttaggatttgtacatcaagtcaaattctttgcgacttatccagagatggtgtttttggagccttcctgcccctgccaaagtatgcaggtattgagagttcctaggcttgctcgcattatgctacccaaaattggcataactttaaaacttttcaaaaagatgactgggatctgatcaacaatggagactccactgacccattagtgaggagtgttgacctcttacagtcaattagtcaaacttccaatatttgtctatttatcatctttttacttctttctctgaccttatttttatacaggcctccttcttgacatttagggctcaacagaagagtcttcaaaacttcaaccagctaaacctagagctttgcaagtctaatgattatcacaaggttctggctaagtagtggagtgatgcccaatctgcgatttctcgtcaaaagaagagcgtcgaaaatctagagaaatttaagacaactttgaagacagattgagcaactttgcaaggctaaccaaaagggccaaaaagatcttgaaaaggctaataaaaagcttggagatgccaaagtaaatgctaatgagagggttgttgggttttatgccataaataaaactcatttcaatataatcagatttacttattaatatagatcaaaaataacatttaatgttgcatggttcacatgatttatttcatgactatatgtacataatgtataaatt

SEQ ID NO: 380616 - DNA, 1383 bp, Cannabis indica
attaatgacacgtgtacttccaagacctaaaattaaccaagacgtgcccttttcataggtttaattaagttaatggattaactaacaacaaagtcgggttactgctgtagctttggatgcggacacaagtccaaattataggcatgttaaagtcagaccattttggtcttggaaggaccatctgtctagaagatgaaaggtccatctaagtgaatatagattccttcatcagataatccagaatgggcaaatgaagagataattggaaacctctaaaaaccatcctacgcgacatcttccagacatagggtcccaccatgtcagaggtttgtcccctacataagacctaaggagtgcgtgcaccatcaaaaaaagcatgtctttttgtccaacgccatattctctgacattattgtacacttttagctatgcacgaaacctatcaccatcaaaagggtccccactcgtacgatgaccattatctcgtaaaataactcttacctaaccgacccaaagttaatatcaattgtattttgctccattagtgggtttagttaacatatttcaattttacccataaaccagactcaagcctataaatataacattaccccctcatgtaaagggttcgaaaattatttcacaacttaagggctaaagattagagttcttgaagtttggcaagaacattctcgtgtaaaaatactctctagcttttcaagcttaataatattgactcgtggactggatcattaacgccccaactacgtaaaagtttttgttgcattatctttaatttattcttctttaaccttaatctatttcttaatcggcttctaaagatctcggtaaacaacatcaaactttgaatatttctaacaagtaccctaaaatagctaaaaatgtaaaacaaacaatttattcttttatcttgtttaattaattacttttgtttatataaacaatatttatgtatatattcaaaaatataatatttaaataagaagtttttacatatttaatcaaaaaattgaagaaaaaaatacaaaaatacgttaatacagataaatttttatttttatggtttaacatttttctttataaaaatacgaatttcagtaaactgttcgatattcttttttagttgttttatagtttatttatagttgtcacgatgttggttttctcgttgttttggttgttttatagtttttgtaaggttgtttttttgttgtttttgagaaaatcgtattgttgtaattttaaaactttaaaatcatatttttgtaaataaaaatttgggaaattacctcatatactatattttaacttctttttttttctttcaaatttacggtttgaatttctaaagtggttgcagcg

SEQ ID NO: 380617 - DNA, 2353 bp, Cannabis indica
tacttaataaataaaaaatggaaacaaaaaaatagtagtaatgcacatacccagattgaataacatcacttttttttaccaaaattttactcttttttaaccatggtagacaaattttctcatacccagagtgaagaacgaataacatgtaaaagaataagaatttttgaatgaacatagacacttacttgtacaaaccaacgatgacggtcggagacagagccggagacacaaaagacgaagtacaccaaatattctttaactacttgagttttctccctcaatcttgaaatgactttatcccctataaaagaaaaatcgtcacttgccctaaaataaacgaaccaccacgactctgaaagtaaaacgacgaaggagaaagaaagtgaaatgatgattgaaaaaataaattgtcagtacatcaatcactattcactttttaaaaatattaatattttaatacaaaaccaaacaattaccaagttttttaagcctaactacccctatgttaaccccaaccctcagatcatgcaacttcccaatccaatggttacagtacaattacagattgtatacccttaattaccatcacgggacaaaatcatgtcctatataaaatatatttcttgataattttttaacttcagaaattaagttgtacctggctagtggctatagacaaaattactattaatcgattagctagcttgaagacgttccaacaaatttgatttacccaacttataagtttcataaatattccccttgaatttataccaaaagatgacagaaggaacatgatcaattttccaataaccagggcaatttggttgtagatcaaccacaaattcccttgacatgtccctaatttcaagagatttcaggtttgttaggagcttaatatctgaaggcatctctctcattaatggaaagggtccaaaagctaacttctcaagcaaaggtagtgcacccgtctcaattttcatcacatttatatcttccatgttatgcaatataagctcctttagtcttttaaaaccaccttcctcaaaatgcaatccatctccaatgtatgcctcaaccatcttcaagaaagctaaattgggcaaatgtttgaggtgttttaaagggtcattggttaaccttgaaaaccataattccaatccttgtaagtgttgaagctttgaaatccaatgaggcagttgttgtagttgacacatcaatgcaagataacgtaggaaaggtggaggagatgaaagagatttcaaatctaaaatttcatcctcattaatggtctgtaagtataaggtttctagttggctcattttctcaagggatacacaaagggtttcagcaattcctgcagtcaaatgcttcatgcctaaaatcttcaattttctcaatttctccagctctttcactaaatcaactctgctagaagatactctcacagatgaaagtgtttgcaactcctctaaacatccaatccctttgtgtattttcacaccaatatctaaatcaaatctgtaatcaatttcataactaattacagtgcgacctagaaggtggcgcagatttcgaagcttgttaatctcaattggaaggtcttgtacaaaagactttgtgacattcaaggtttgtagattttgtaaattaccaatggattttggaataagcttcacatttgtcattctcaaatttaagtacttcatattgaacaaattcccaacttctttaggaagcttatcaagaggagcatcttcaaaatccaataccttcaaaaatttacactttagaaacaaggtaattatgaatgattccgtcaattcatcatcgatgtcgaaaaagaaaatggaacgagtcttggaataatctccaataagatttagaacacctttcgtcgtgttattgattgctaggcgaagacaatctcctttgaatcttaacttgctgttgagtaaactgctagcaaaataaaagaggaacgatattaccgaatgaagaattctgggttgagtcgcggactaagtcgctctctttaagacgttcgcggcactgcccaggagtgtgcaagcagtcggaaattgccggtcgtccccaggataaaacagcccagtcgttgtactgtatcggaaccccactgcactgtagagcaccgtcgaatacacccagaaatttgatatcgcagatggaattttaattttatgataaactgtatttttctgatacgagaaagagatattttcttcccatcagttcaatcgcattatataggcgaatggattgaataaacataacgggaagaataacgttttctgaagtggggtgagtggtcttttgaacgtgtcccgtt

SEQ ID NO: 380618 - DNA, 2813 bp, Cannabis indica
ttatagcattagataaatgtggcaaagaagtagaatggtttcatcaatttttagaaaaattctaaaacggccaaaacctattcctctaattagtatacattgtgatatttaatcttaaattggtagagcaaagagaaatttatacaatggtaagtctacacatatttgtcgtagacgtaacaccattagacaactactcaaaactgcagttatctctattaactatgtaaggtcaaagttgcagatcctctaatcaaagggttaaatagagagttggttgaaaaataatcgaagagaatggggctaaagcctacagttgatacccaacctagttgacaagagatcacaagatctaggttcaaagggacaaataaaactataaagactatggtggatcactgtgggggttatcctcaagtccatttctgtgatgaaacattggtactcgtaaggaaaggtaaatctatgcttttaatgattcatatgcattgaaacttcgagcagagtaatatgagatactcttaaataagaaatcacttatgtgagagagaatatgggtcacttctatatgaattgattaaggcttaatcctagatatctcttataaaatcatggaaatgttcaaggccaaaacaaacataacagcaagaactaaagtatgtcaagagagattcgtgtgtgtggtatatcatcatttacattaaccgccaaaaaagttcaaagacatcgcgtctattgatcagctaataaaataaatatactcacacaagggaaggttcaacggataaaacatacctatcctatgcaggtttcaaacgttgactctatttcaaggtcaaaacaatttgttagttattctctagtaaattgtagaattattggagaaagttaactttgtcaactattttaattgaatggaaaattaaagtggattttaatccaacatcattcttaagtaaaaatgactaacatcaaaggttataaatatagcttaagtccttgattataatttacaccaaagcttactcatgaacaagtttatatcattaatcaattaaattttcctttgaagataattgttactgttataaaattcataaaatactctttagagtaattagatgtgtactacacagtcctcaaaaaattttaataggattgcatattaaaaaatatatattaattgtattttattatcatgtttatgtcaaatattacattagtcccgttaaattgtgcagcaagttctacaagcagaactgtaatgtggagagaagaaaccggaccttaatagacataatcagatcaataatatgttattcgatacctcaaatagaattatgaaatggaaggtaattatatttatctctttcctaatgtcatgttcaatattcattatgaacttaagaactaattatatgtgtctcttctcaaatctcatgttcaatattcattatgaacctgaaatataactcaattttagtcatgttataagaaaagaacatatatgtgagtaaaagagttgctatacatttgatttttataagagcattgctattggacaccagtggtacccagcatcttctataggtgacatcctacaattagttagcgatattttctaaaatttattttattaagttatatgagatcgtatacttaattacactattagcagtatgacactgaggagggtgctaggcaccagtagtgccttttagtaattctatttttataagtataccctacatattttgattggatgtgatggagctaactcagcggtggcagaatatctaagtctaaaggcaaagaaagtatttggagtatatgtagtgtgaggtcttacctattatccaaactgaagacatggcttccttcttaagttttccagataccatggcaacaacgttgtgtgtggaagatctcccatcaattataatttggtttcttggttcctacttttaccatgatacaacctcttccaaggaatttttttatatatatacacacacattttagagcaacaatataattgtttgtacccaaaattttctaatttttgtttttattactcatgaattaattatttgaattatagattctgagattttgaaaaatccagaactgatcaagttaatggcaatataaaatatcacaaatggtagcactactttccctaataaaatagtagaaatgattagggattgtgatcacatggcttcactatcccttacacacttaagatataggccagcttgggatgtattgcttgaaaagttaaggaaagggacaaccacaatggtcggagacgccatgcacgtgatgggcccatttctcagtcaaggaggctcaactgtattggaagacggcatggttcttgctcggtgcttggctcaaaaggttggttaatgatcttggtcatcataataacaaaatagaaaaggcaatggattgatatgtgaggagaggagaacgaggttggtgagattgtcaattcagtcttttctatctagtctcttctttagctcttttgcttcataattgcttaggaaattctttcttgttctcatcatgcttctcatcttccatgatcacgactctctttaacaacttcaatcaaaacttacactattttgtctttttagggctcatttggttcaccctattgtattgtattgtattaaattgggttgtattttattgaattggattgtataattttaatacaatattatgtttggaattaaattgtataagtatgttgtgttaaattataccatatttggttcacattgtattgtattgtatta

SEQ ID NO: 380619 - DNA, 2623 bp, Cannabis indica
tatgtaggtacttaagagggactcgactcgagtttcataacataaaaccacgtgtttgaccatttgagctattgctcgctcgggtaatgtttttataaatatttgaagatttgagttaattgctatgtaggtacttaagagggacttgacttgagtttcataacataaaatcacatgcttgaccatttgaggtaacggttcgcttgggtacttttgtttatttctattagagaatattagaagatgaagatttgtatcaagtaacataagtagtaccttccaacaaccacagctagatcacctctgatggttccaggctctgatttttgaggatctgtggctccaatgagttttctaccatacttgatcacaccttctccttcccaaacctgaaaacagttaacacaaaaaacagaaaagcttttaactttagtgaaaaaactgagaaaagaatagttaagtgttgaaactaactaactaactaaccatagcaatgacaggaccagagctaaggaagtcacagaggccattgaagaagggtctttcactcagatcatggtaatgcttctgagcaaattcctttgaaggaaccacaacttttatggcaaccagtttaaacccttttcgctcgaacctggctacgatttccgaaatctgaataagaaggaaaaaaaacacatacaggtattggcttagcataagaaccatgtaatgcaaacaattgttctaaatccctcttgttggcatgaataacagaagaaaattgtgaaaaaagatgggatttttgattcaaactctaatagaaatctagcaacatttaatgatatgaatcaaagattatggaagatggtcttaagtgagatctccccatgacaatttgattaacataaacacatttttaagatttgtatagttgttagcttaccagtcctctttgcactccatcaggcttgatagcgataaaagtgcgttcgaactggatagagaagcaaaagattcagattcagaataaagcaagcaagaaaaaacatcattagaaaatagttttgagaaactcagaacagaatacctctgcagcatgaacctcctggtctagtaccatgtaggctacaaaagaaggaaaaagaaaattgatagaataataagtattaggcaaagagtttgaaggtgttaaaaaaatgcatgctaaaatagatcattgctagcccattgagtcaattggtcattttagtagagagtactctcttcccttcactattccattcataattcattttagagtatattcatttcattgagtcaatttagtatgaaaagtagcaattataggaaaatagtgaatggtatattgatatagatgatgaagataacagtgttatgctcacttaaccatacaattctcttctctcaccatcccctcattactcatatactcctcttgtttagtatcctaaggcctatcatatttcatcatctactgtgatcccaacttggatttttgtgtactaagatagtagaaaatatgacattttgaaagatcagcactttttccttagtagtactgaattttgatgatctcagcaaattgttgagaaaaaccattataaagtatgacacagttccccaagcatcaaaatcaagcaattatacttgacccttgtgaaaatcacaaacttaagcaggagacattatagcccttttcattttaactaatattaacatatgtaaacagggaaagactcaattttgaaagcagggtactaaagaaataaagaaaagaagattctatatagagtcaaaaccagagaacaatcaacctcacctttattgtctcaattttcataaagtattgcacttggttatagatatgtttatgttttttacaatctaaaatatattgtatgaaacttcaaaactatgggcgcatttggttggaaataatagaatgaaatagaaaataatcaaatttcatttcattagtattggaaatgggtggaaaaaagaatattctaatgcaagaagatgaaaaaaaattaataatttttctttttttgtaaatacatattaaatttaatttaattttatttctatttttatttttgtatttttatttcttctaactaacacaggacaggttgtttaaaagactatattcttaagcgatcggaaaataaagaaataattaatatattcaagataatttcgtatatacaaagtatattatataccagcagcatggatggcaagagctccagaaatccatcttgcgtatgcattttcagaaccagctcttccaaattttgcagcagctaagaaagacccatttcctcttgcagctaatgttgctgctgcagctacagttcgtccctctaaaaatgggacaattacagaacgtactagttagtttcatacatataaatatataatacaaacatggatgtgatcacaaatatatatacacaaccaacttcaacagtagttatatataagaaaaatgctaaaatggctagaaaagtgtaatattactattcatacatgggttagtattattttaaacatattttgcaaaagttaccgaatagactttctgttttgttaaatgataaattagatcttatatttt

SEQ ID NO: 380620 - DNA, 2944 bp, Cannabis indica
aaaaaaataaaaataaataaaaggtaccacattaagtgtgtcgagccaaaataaactctgtggttggcactactttggatcgtgccattcgtgaacatgcctatatgctattattgttgtagtgtccctttattattgatggaatgtcttgtatgatttggacatgctttacccacaaatgtacaataaatacataaagactactgctatttattagacacaatcaatctccacaagtaaaaatttgatacttgatatcagtattgaattctagtttaacattgacacactatgaagtgttgtcaaatatctggttctctgcatagttctgaataaaggcttgcctcattggatcttgtgagggtaacccaacgggtgtggatcgctctgactcagatgattggatgaggatttgcatagtgaaggtaacaagaaccaagaaagctccaaaatatgtaatgccttgccatgatgacagtagagaagaccattgaatgagcttcacaatgccgtatactactagacatgaccaacaagtgacaacctgactcaaacaccttagattagactccaattgaaaaggtctagtttatagcataatgaagcttttatcttactattagagattttttgggtcgattaatcttttgatgctcaagatcagtgaattttcctttagtgaaatacttctccagcaaagcatcctgaggaggagaaaacatcacagtcaagagactcacatatactggccaattaaaatttagtgcatagaaataacaaaacatatatgaagggattcaactaggaatagctataaaaggtcaaaaaatagcctagttggaaaaagagagatttcccgtgaagaaaagtttttacctttgtaacaaatacatctctacaccattgtgccataccatcttctgtttctgggatttcatgcattaaatgtctcctaatttgtacttttacctgtgtgaatggaaaacttataataaacatgattaatttcgtagtctaaccaaatagataagaaatactctgtgaggtagatatagaaaactagagaaggaaccttgctgcatttcgaccagttaaatgcaatactgtagttactatctagttttattggcttaccactgaaggtttccccccaaacattctcaacaatgtaggaggagactgattggttggaatggctactgtgcaatcataaattgctggaacaaatgaacgcatatgactaactgctgaaacaaaaccctgtgaaaatgcacaaaaatattaaaatagtaagcaaaacaaaagatggtagacacttggaatcaatacttgttgtgttattaagaatttcaatacaattcacctttgtacgcggaattagtacattcttaggaacaggaaagcctcttgcagtagcataatgttgagccactgctaacttttgctgggtaaaccgagttccctcaacaaagagagccaaccaaaagggcatgggaaaatcctctagcctctgaaaacctgactgtagcatagaaactgtgagatgaagcaagacaaaagaccaaataaaaacaaataaaaaaaatagaaactaatgtaaggagataccttcaagatgctttcatcttttgcccaatttctctccaagaagacataatcacaaaaccacattgaccaacctatgatctgcagagttacttccatttatgaattcactggcttagtgacttatcaagaacaagcccaaaagagtacataagaattttacagaatggtgtttaattgatgacgtactggcaagaatttagcttcattttttatgatagctaatgagctaccaaggcaaccagaacgctgttaaaagtaagtcaatacaacaattaattgaagataagagataagatttagatctaacccaatttctttttttatttttatttaattaatgagttataatgtatcatatactataaacggtatgcacctgagctaagacccatccaaccagccaatcgatgtcacttctgtggttgctaatgacaagtgcatgttccttacctgggaagtgggaatgtgccatcttttgtgagaaacctaaactataaaacatagcaatttacaactgttttgaagagattaaactctaactattaattgactgaaaaagtcaatgaatgataatctatctactcacccaataatcgaaatgtttctgcatctgtatgcacctcaaccttagatcataacaaaaaaagtagatacatatttatataccaagttggaaatctaaccataatcaattggctatttttttttcttgacatgataatcaattggctaattggttagtgtacatattttcaaaccatagaatatgaagagagagagggataagcgttaaattgaacattttattcaaaaagagttgtctacgtacctcaatagccgcccaccaatcaatgagccaaatgagttccaaccataataattcagcaattactttattaattctcctatacatgttctttgataggggacgaacaagaacgaaaaaaaatgcctaaaaacaataaagaaataaatattattatatatatatatatatatatatttttgaagaaatatgcagatttcgttaattagcattattatatttctaatactaaccaaggtataataacttttattcattgcccaatgtggagaaagaaagtaaacacatttatagtgagagaggaaaacccaccaagtttttgggaatatacctgaaagatattaacaattaagcctgagaataggaaaaggattccaatgggaaggataactagtgaagctgggaccgccatctctaagcgagcctctgatccagagcgagaacgacagaaagtgtggccgagagatatggaaagagagagagagagagagagagagagagagtagttag

SEQ ID NO: 380621 - DNA, 3118 bp, Cannabis indica
ttatagtaaacgacatgcacatgttggacagagacaattttattcatattgttccttgtcatatataatctctattatgtacaacacttttacttagatgtcatactacatcagtaattcaaaccttgcactgaaaaaaggcatcagtaaactgtactagcaaccattaattaaagatttcataactttaatatgttggtgactattttattcatagctaattggtcttagttctctgtacaattacaagtcacaacctcatatataaataagaaatatttcgatatttatatataaattattcaataataaatattaataatttaatattcatgcatatatcaaaatgttcaacgctttattaataattagaaatatttttataggcttttcaaggcataaaacctaacaaggtcaaccttggcgttaggctcagttttgaagcccttgtaattattgttttctccttgagtttacttgtatctttctaatttccgatgatggaagaaaaggggctggaacactttctcgaaatactgattggaaacagcacatgttaacctaggcgttgggctcagtgccaagtgtcaacctgggcgctggatctagtttcaggccctaggacaattccatttactccttgaaatgtttgactctaaatctttgatcaattcgtagaatatgcccagaagaattttcagaaaaactcatcaaaattgtgccaggttgacaaaatatcaacctgggcattggtcccttgttttggccccagattggtttatttcttccccattttcgatgaagacgaagaagataaacaagcaaaatttttggtttgaggcttggaagtgacctaggttgataaattgtcaacctgggcgcttcaggtgctcaaaaataaaatttctcttaatatgataatgatgccccaaatatattcatggtatgtctagttcatgttccagtgcaaagtttgacttatttgcactaaaacgatctcggaagctgaaaccctagttgggttgtcagcctgggcgctaggtgaaacacttggcacctgggttgattttcgaggtatagtttcatgtattttcagttcctgggccctggacttggatgcttcatgtctacatggtccagaatactgaaagatggtgagttggaaacagcccgccgagatccaagcacccattttagagttttcgaagtcaacttgcactacatgaaatgcgacttttgccagtgcatttggctaaaagcgccgaaaaaagctgcatgcataaagaggcccaaggaagggctaaagcattcaaattaaacttttatcggcacactattgcgcctgcaaaagtagcctataccaacacactttgtgaattgcggtaacaaaattaagaattttaaccgccatttggcgtgagctcgtttcaactttggtcacttttttttatgtatatttgcgccagtaaaatattttatatttagtcgagataattgtcacgtgttatttctgacaaattttaacttttgtgagctctgaccttaattctacaccattttattatttaaatatgaaagaatataaaaataatatgacatggtggtgtaataaaatgattggcctttgaggataatactaagccggccgcaccaccatggacgatcattatcatatatcctcaccatcacgttaccactaccgctaaagtgttgtcatgtatgcatcattgtgattagcattcttttttgtctcctttaattttactttgattcattaagtataattgtggatttaattatctttgtgataatcttaattatgagtgccatcaaatgtcaccaatgtgtaatgccataataaagccatcaagttatgatcattagcctaagcttgttgcattatattttttaataattaataattatcacacaacaaataatttattaggaatttaggatgcttatttttcaagtaaatatcagcaaaaattaatcactatgtagtatataatttttagggtattattactatttaccctaaatttcaaagatcaaatgttttaactttttatagattgtaccccctctttcttaaaagacataaatgaacttaaatgtatagtattataacgttagacatgttaaattttttgactgtgtcatccttataaattcacatgcaaaaagcacctacaacctgcaaattattaaaaatataataattgtagggaccgactataaataggccgggcatgcaaaaaaataatacaaatttattgtgagaaatggtctaagttgagaattttaaaataattttagctaatttttattatcacggtttattattattattatcattttatgaaatattaattttattgaaatattagtattttgaatacaaaacatcctttaaattagtctaaacattttggtaaaatatactacgatcagagaaaatcgaaagtatttaacaacaacgagagctactcgatttgttgatcatctaataaaatataaattcacataatgtagagaagataataaagattgacaatcctgaataatcaaaccaaaagtaaaagacattgtttgattactttgaatggcttggacagaaagcaaactatcagttttaagctctatattatgccagttcttactcttaatctaactaagagcttcttcgatccccaaaacttccacaacctcagcatagtaaacaccaacatgataactagtcttagcttcaataagcgtacttgatttgtctcttgctattaaaccaagccatacaaactctcctaataaaaatacatcatcaacattaatcttgatgtgattcatatctggttaatctaagactcagacttgtcaccactattttcaaacgacagtgataaaagggtagttttatcctgagcctttctccaatgatcaaaagtaaaagaagctgaagcaataacatcattaacagtggagcttcgtttattccaaacgacttgattaattggataatgagaccatcctattcttcttatactatttcacttaaggttataattaaattatataaaataaaaaatgataaaataatggtaaattatacactaagtgg

SEQ ID NO: 380622 - DNA, 1989 bp, Cannabis indica
tcaaccaagatgagtattgttctttcaatcccttacaaacccattaaaaactcctaccgcatctagcttatggaacctttatttcacacacctgtacaagtatagaaaagtacaggagagaatgagaaatggaaagccacactcaaaaatcaaacaaactctattacaccagcaaagatatagaatcttttccccataaatcaagttgcttccctgccacattcatatggataaggcttgtattaatatggcctttgaatcattgaaaatgtgaaactatgagaaagcatcccaaatagttccagacagctcttctaaatgtctgattttttttcttctgacaattgaatgtgtgaatcttagggataaacaaagatgaatcggataactacttgattggcatgcaaaagggatcttttagtaaaatccattgccagagaagatcactggtaagtacacttgactaagatgatttaagagcccaaaaacacctgtcctcacatgccatttttcaaaagaaattttcaaatcttgctggccgccacaactagaagactcataatctagagtatatgcatttgcctcaattcatggccatgttttacaaagactacctcaatgcttggctactaagccaattgctaagaatttcatatgggttcttactaaaacacccaaatgccacatcacagatactcagtttgacccaccacttattctattaagaaaaagttcaccaaagtcagaactctctaaaacaataaacaataaaacttgaaaaccccactgataaacaagcaaaatcattacattaaaataatcacattttagttatatttgatctagatcatgatatgctattttaatgtataacatataatatcatattctttataaacatatacacactgcatatcatacactatgttattttaacattcaaaccaacaagtacttgttcaatagcaaaaaagtcttaacagttatgagcaagctaaaaatacaaaattaatggcactaccagacatgtcatagaaagagaatatataaataaactaatatgaccacctatagatatagtggtagtgtttaactaaattcacaacaatcttgagtatattttacagaaagaatggaaagtattacaaaagtatcaacattatatcattaacaaattacatctaagaatttcaagctctcaataaaagtttcaaaactagtactaacttaatctatcaaatgcattttatcaaacactttgcatacaattcaaaaatcatcccaaaacaaaaacatttaaataactaggaaaaaaaattgagaaggtgtgtgaatggtgttccgtgttgataaatgtggaaaataaaagttgacctacccgaaatgaaattgaaaagcaaacaaggcaaaattcatagaaagggaaggtggccataggtgaaaaagaaaaggttggttattttgaagttggaaattgaagacatttttggtatcttacagtgagaggagcgatacttttacttcgttactcgatcggagatccttccgttgaatggactgttgctgaaaatggcggcaaaataatatatgagtttgggtttataaaaataacaatttgcggcaaaacccttttatattttgattttttatacacttaatttctctcttctttttttttttttttttggcaaaactctttatgttttaatttttatacatttaacctccttatctttttgtagtggcaaaatccttttatgttttaatttttatacacttaacttccttttttttaggggggggcaaaacccccttatatttatttttctttgcatatttaacagttaaatattaccgttaaatattaattggatgaccactgtgtacacatgtgtatatgtaacagtaaaacctcgaaatcaatacagtagtaatccagttagtatttaacggtaatatctaactaaaactttaaatttataaagaaaa

SEQ ID NO: 380623 - DNA, 5357 bp, Cannabis indica
gctaattattatgcctcttctcttgatatgatataatgatcataatatatattgtcaccactaaaagattaatcctttagattttatttttgccaaagataaaaaaagagagagcacaccgtccgatgcaattcatcaatcattgatgatcacacacttgtgtatttttgacatacttacttggtgcagtagagtagtactacaaatttatatgaatatatatatataaaaatatatatatatatatatattataaatacatatgcaaaaagagatgcgaagtttaatgtagtagagatgaaatatttttggaagattattgggtaagggggtcgatcaatctttgaggcgtaattagagccaaagattgattggtggtgaggctgctgaaagctacgtgccttgaatttgatcatttggattgggctgtttacaaatttcttatttaattgtactattgtgtactcgcaaaattaatgacataatatactataatttgacaatattacacgttcaaccaaatctcttttaattttggtacaaatattaattaattatcaatccaatccccagtattattgattgtgtatcttttatattaagtatcaataacttgcttaaaaacaggctctacaccaacagaaagttattttactttcttatataatagtaaaaaaaataatagtgtattactcttaattagtagcaattttgaagggtgcacctaatcttgactctataatatatataagtttatgcagaaagagcataataattaatgttcttgcataaataaacttatttatttatttgtttaaataaaattgcataaataaacttattaatttgtcatgatctataggcattagaagaatataatgcacccttataaaagggttccttgtttggtaatttagatgaatttttagtccaatttttttcgtcgttgtgtacactacagttatttaaaatattttgtaaaattttgagaaaactcagaaaaatttaatacgctgaaaacatggtttaaatatttcgttgcacgcgtgactcttttattttatatgcacgtgaaatagactctttgaatactatttcttatattgtaaattgttctaaattttttaaattttacagaatattttaactacaacgtacacaactataaaattaattaaactaaaaaattttcccgccaaaataaataaagagtacatccatgtacatcttttaagtggtgattatagaataactccatataataaactctgactctatcttttattttgatttttaattatatattttattatttctaaaagcttgtgatctaattaaagaaacattcatagtgcataattaataagaaaagctaatccacattcgaagaataccttatagtttatagataatatatataaaattgaataagaaacgtggatggttattaaattgtaaaggttgctctaattgaaaatttagattaaactattagttgcttggcataatggctttactttattatttaataatgctgggttgctatcctttttatatttttatttgtttatatatgtttattttttttttcttcgcaagttatttgtatatgtttgttgggatatatatttatgtatattttgtaaggatttgttggggtatattaaatatagatcaaggacaaattatatatatgataaataattagggattaggacatatttattaattattttttttgatagatcgtatttaatagttatgactatatatagtgggctacctaattacataattgttcataattagatatatataataaatctaataaaaaattatttatacatatttattttatcttatattaaactaaataatataatcgcgcgactcaataaaaaatatgagcagtgtgcccttaaaaagttctgtggcagttagtatttgttttttcttaattaactgtttcaaccaccaaattactctaccttctcttatctgtttataccataactccctttttttcaaatattaatcgttccctccatcatgccatatccttttcgtattttctgcacattctcaatttgcaaccttcatactgatgctattcttcgtccatggattatttgcttaatgatttgaaccaaaccttaatcttaattactgactcggaaagagaggtgcaaactctccctacagtctctcaccatggaggtcctcaacaatcgaactatgtactctatgccagagtaatttcatctcgagacataaatcgaaaaacctttcgtattaaaatgaatgccttttggaaagggcaattccttgtcaccattgctgatcaccattcgagactttttttaatcaccttcggctctcttggtgatctaaaaatgtcttgttaatggagctttgccatttccaaaataatttcattgttctaaccacacctactgccctatatattgctgcaccagaggccatgtttttgactccattttggatacaattacatcgactgccatttctaagtaaatagaaggccatggctgaatgggctggcaatttggttggtacctatgttgatgtctgaagactctaaatgaaggttgggggccctttctacattttcgtgctactcttaatatctccaagcctttgctcaggggaaacatggtcaaattaaaggactctcgagatgaattttggttggaatttcgctatgagagattacctgaattcctctttgaatgtggaatcattggacatccctttgaatcttgtcataagttcttggaacaaatttacaatggcatatatggcccttctatgatcggttctccattgcctgaatctggctatgaccgatacataactgatttctttaaaggtggagtatggccattaatgaccagacttgcaaagaaatcattcactactgctatacctaatccctccacaagactatttcccttaccaacaaatttgactgagggagaaaactctacagttgcaatgtcacaaaattaccatcattctacttatactagcatcccagctccaattccaccaacaaatccaaccccatttgttattactattgctgatgaggcagttattatcccatttccctcctatctacctacttcaccaatgatagccacttacccacttactacttcttctaataaagcattccacaattttccacccctggctacaccactaccatcgacccccttcatataccaatgttatcaccactcaaccttcatttgaagcaactgtcccttagaatgtttctaaaggaaaagctgtcattgcgtttgatgttgacacagagaacattaatcctaataaacagttcatacgccaaatcaactctgaatcacttaggaatgtcctaaaacgatgtcgatctaatgccattcatggtcaatcgggcactttaacacctactgatcatacatcggtccagcatgtttccaacaacttcttagattcaggagagcagtagtttaaatttccagcggttgttactatgcaacaccgcgcccaaccatgaattttagttggaatgcgcggggcttggggaacccgagtgcattcaggcatttacacttgcttgtaaaagagcaagcaccctgtgttcttttattatggaaaataaactaaagtatggtagtatagataagtttcgcaataaattgcacttctctcatggtttggaggtaccaagacaagggcaaggtggtggtcttatgctcttgtggaagtcccatgtcaacctttcactaaacaatttttcttccaaccacattgactattttgtggaaagtcaggatgggccgtcttttcattttagtgggttctgggaacatccttgtgtcactcttatagcttatacctggacgcttttaagaagatgttttgacatagctccactgtctccttggcttgtattaggagatttcaatgaagtcatttcaactgaagataaaattgggggtcctaggcgaattatagcacaaattgatgccttctgtccagttgtggatggctgccatctttgccaaataccatatgaaggagaaaggataacatggactaacaaaagtcaggggaatgacaatgttaaggaacgacttgactatggttttgtagatgttcactgggaatcaacctttcatgctccatcattgaagcatttagactttgataaagctgatcatcgagctatcaaagcaactattactgcactagttgatcagattgaaacaccagtgtacaaatctcgtttttgttttgagaaaatatggctctaggaaaaaaattgtgctgatattattcttgcaaattggaaccataacatcacaaacacactttctcaagtgactaccaacatctataattgtgtggctgatctgcagaaatggcatcatgctacttttggaaaactgaagaaagaaataaaagattctcatgaaaatgttgctgctctccaaaattctcctagaactgatcctgatcattttgcagcacttcaaaattttgaattaattttggatgagttgttaggtaaagagaaggattattggcatcaaagatttagaattacatggatgcagtcaagtgattctaatacacaattctttcatcaacttgccaatgcaaggtctgccactaatcgtattaaaaagctcaaagattcaaatgacaacactcaaaccagtacacatggcctgattgatattatttctagccattttcaaaccctttttagcagtcaaggtgtagatgaccaagctgttaatacaatcttggcaacaataccaactacaattgatgagaattctaagcatatcatttaagctccatacatgactttagatgttctaaatgctgcgaattctatgagtaatgataaaagctctggttatgatggcatgtatgcgatgttcttcaccaattattgacacattgctggttctcttgtcactgcatcaatgcttgaagttctcaataatggggtagatcatgcaatactaaacaagaccctaataactctcatccccaaggttaagaagcctaacttcatcactcaattttgtcccatcagtttgtgtactgttctttataagttagtctccaaatcgattgtccaaaggctccaaccatttttccattggttatattcgaatatcagagtgcctttttgtcacaaagattgatcacttacaatgttcttgtggcattcaagttgttacattctctcaagaatagaaaacgtggttcaaaaggttatgcagcaatcaaattggatatgagtaagtgttgggttttatgcgctaaataaa

SEQ ID NO: 380624 - DNA, 2295 bp, Cannabis indica
tacacaaagaccaagtaagacatcaagttagggagaaataagaataaaaaagtaaaagtagagagagagaggaaagagagaataaaaaagcgtaagcattgaaagttttcattttatgaaattttaataataattatttaaaaataaaaacataccttttttatattttaccaagagaatatgaccaaacaaaactcagaaaataactagtcacatatagtaactactataataccatagatatcgaaagtggaatgatgaaaaccaatgcttattatgtaagtaccttcaattcacgtattagctttccttgtgatgtttcccagaccttgatagtgcaatcttgtgagctgtgatggttgaggtgaaaaatatgagtaataactatgagcaaattaaagttttttttatttaatatatatatatatttatattgaaaaagggaaagagatcacttgtatccccacccaaattaaatgaatatcctcacttaaggtggaggaaaaccatggatacatagaaaaatagaaaataaatatgtactcctaagacttaatatgataatccgttgaaatagtaatgcttgtgagagcatgacatgtataaggggtttgcacaaaaatagaaatgaaaatgttagcatatgccactacaaccgagagatgaaatttaatcctctttatatcttccctatcttttttaatacattagtgatttgatcccctccccttcccacacactcacacacccaacctcttgagctagcctaagtagaacatttcttccctcccttagtctgagccctttgggctttaacgtgagattattgattttttgtttttattttttttttttttttttttgaagaataggttgtgaatattttaagtctcacatattaaaaatcaaggattgttgttataataataataactaatattttcatcatattctaagaacttgtataaaaacttaccccgtataaatcatcccatctccaccccatttgacacaggtcacggctagagtgtgaccacttagacacatgacacatttctttaaagcaacgtcccatatacgtgcatccccatctttgctagcacttacaaatcgtcgacatggagcacttaggtgaactggttcccaagagatcccagtaatccattttttgtgtccctaaaaaataggagaaaccataccatcaattgtcatgagagtaaattaatcacagcaggtccgtaactataagatagtaaactgtcagaaccataagcaatagatatgagcttcattatgttcgtgacgacgaaaagaatggaatgtggtagcacattgacccaattcatttaataagttaagtaaataatcaagtgaaaacacagtgcaattcgatagacctctcacctatttatatacgcagagggccaagaatgctactgctgagtgctgactcagcagcagggaatagcagtgctgggaattagttgtgggggttgggttagagtgcggttgagtattgggtatagagtgaacagcatagatagaggggagaaatattttgaaggtgtggagaatttgtgtgggttgtaacccagggagagaaccaatctcaaactcttggatatttaaatacatgtccatttcttctctattttccatctatttctactgttctaaccagatttgcagggataaatcctatcaccaattctaaaaataaaagagaactatattaatccaaaccaaagatacgagactttacattgagcggagagccattaggctttcctgtttgtggatcccaacattgaagttctccagccttgctcccactcactagatacttaccatcaggtgaccaggcaatacaaagcacccaattcctatgtcctgaaaaatcagagacataatggatataaatgattaagaaacaatgttgattataactgggttgtttgcaaacccttgatactgcatgaagcgtgcttttccaaaatcaattctttataatttcagaaaaagagaaggatcaaacatctataaaagataattagattaaaactgaaataagttccctatcccatacctgtacatgtatgcaatggagtctgggtattcagatcccacaagcgaacagtagtatcacctgaaccgcttgccaagtgcagaccatcaggactaaatgcgactgaaagtacaggttctgtatgacctgcagtatttgataagaagaaaacaagacagcaaactaaattatcaatgttgtaaatttagaaagaaaaaaaaagggaaaaa

SEQ ID NO: 380625 - DNA, 983 bp, Cannabis indica
tttgtcataatatttctagatcgaattattataaagtattattttgataaaaaaaattagttcagggtcctatttgtacaattttagaaaatacaaggttcattttgtcatttaacaaaatagatgatccaattgttaacttttaaaaaatacagggtctaaaatagtatttatcctataatcaattagacttaatgtaatcaataaatttaatattataataatattcttatatttaaatttttactttaacaaaaaaggtctaggccagctactagtagtcaagacaaagtaaattaaatttaaatatgatttaatttttttttaaaaaaaagttaaatatgattgacctaagtaacattagtaataatgagttattaattagcaacttcttatattgcttattacattatttggactcttaaagcaatttattttagcatttcacttttaaataaggatggaaatttgaaaattggaaagaaaatccatggcggcagtccatttgagaataaaaatattaataattaggattaagctggtaacctttttttcttttctctttcacaaaaaagagcatggtgtctattattattttgatttatatttataacagaatgctttatcttgaaatcgcgtgacccaaattagaccttgttgttggtgaatctaatcagtggttatttagtttgagaaaataaaaatgaaaatgaattaatatatagatgtttaattagattttagaacagagacggcaattaattaaggaactgtttggcctggaccacaatttacaacagtattattgataaccagctgtaaccttttcctatcctaattaatttggtttcttttatttctttccatcgttatacattttatttattttggttcttctaatctaaacaataatatccctatctttttctttttggtctttggaacattttttttgtcgtctttctaacaaatattataataaa

SEQ ID NO: 380626 - DNA, 3701 bp, Cannabis indica
aacccgaaagagctttccataaatctattagttaataaaaaaaaggaaaaaaaagaaaaaaatctaatatattgagttagaagaaacttttaaaaattttcattaaagaagaaataataataaaaaaaaatgaactatttaataagtattaactttctatcaaaaaaaaaaattaataagttctaattgtagtcaactaatttttttttctattactattactattttaattaatatttaaagggtaaaagggtcatgagaaatttaattaatcaactatgtattaggtgtggtgctacatagctttttgacatcaaaaataaaagatggaccataataaatattatatttcatgaggtatttattgatagtatgataagtttaggggtaagaatactaattattttaattttttttccctatttgtctctcttttctatttcttttaaatttttattttttgaataaagtagtgaacttttattaatgatagcaatcattcataacaattgaacgcacttcagcagaacagtcctcaagctgaagtacacgacctgaagagaaacaagagctactgggaagacagtgagctgctttgtttacagatcgtttaacaaaacaaatttcaatattatttttaatttttattaaattaaatttttattaattattaagttaagaggaattaccttcatatattattttttaattttttcttttaaatttacaatttcgattgcttgagttgtttctatgtgagttattatgtggattttaattgggatttagattattctgttagttgttatatgagtttctatatagaattttgtaaaaatgtaaaaaatatatatatatgtattttaaaatgtaaaaataaaacaatgcctaaattaaaatagttttcttttatcttttctattttaatatgcattattttgctatttttcttttatagaaaaaacacagattatgtaaaaatttgacacaaacaaagtaagtcattacaataaattaaaacatgagtcgatgaatcacatctttggctttcggtatcaacattatttccaaggtaagaaatggagataaaaaaattaattgtttaaaattatgaacattagaattactaatgatttttaggacatttgttttttcttttttaaactgttggactcattgaaaagaaaaagggatcaaattctatttaaatgcataaaagttatttattattggatgtatctatctatttatatatctagacattttcaacttgtgcaatatcatttgaagtctttaaggtaacttaaagcttgaaagttgtaaacactaaataattataaacaaaaagatatataagaagaatatccaatatattttgcataaatacttaacagtttgtatgtttccttaaaagaaaaaaagaaaaaaaaaaaaggtagtaaagcaataattcttgaaacatttgcggccttcacacgttttaaaacccatattcccttctttcattttcacttccttccagttccaccactcataaaaatggagactaacctaattcctcaagacaataagtacaagtatcttggaaccagttttttagtttatgtgtccatatatggaaaaattatggtaatttttttttgaaagagtttactttaatgcaaataagttaccaatttcgaaaaataatagcaataatcattaagctcgacattcttgtatatctgttgattttctttttaacaaaactgttaatttctctttaaaatatcgcgtattgatattaaattgtagtataagtccttaaaaagttcattttgttgcagataagtcttcaatctcaaattaagttgaacattctcgttagtccataggtagctaatttaactgctcaatttgttgttctaaatttttattggtcaaaattatgatttattaataaaattaatttaaaataaacaaataaataaataaataatttgaaaaactaactaattaacccttattcttatctattttttttttttaactttcttctccttgttcactcacagcccaacatacccaagtctagtatgctctactaaaacactccaatttatattagcaagaggagttgctctaaaaaaacctaaataaagtttgaacaaaagaagctaagatcaaaaaatggtcaccaaaacccaccatccaccagagatgaggactggcaaaatagattcaaggagagggtcggagcaaggtgtagctatttaggatttttttcaatctttttttttttatcttaattgtttttctagcttttttgcatggaatcgtgggatgggacaaggaaaaaagtagagataaaaggatgacacttgtcggcaacaagcctccaccaccaagaagagtaggtggcaaatcgtagaagtttttttttatatatgtattttaatctttaataaaagagaataaaaaaatattaaattttttataatatttttattatttaaattattttaaaataatttttatgttgtgaaccaataaatttttgacactcttttaagaactacaaacaaagctgttaaattgagtacctacgaattaataaaaatgtcgagcttagggaatataacaacaatttttcaagattaggacttatctgaaataaagtaaactttttgggaacttatttgaatcaaaataaaatattttgggacttatgccacaatttaatataatcacgtgacatttttgggaggaattaacataactattaataagagtgtatgtgccatgtttttgtatgacaaattatgttacttaatattaggttcgttatgttctgtttcgatttctttcttggctttttgaatcgttcatctaagtttgtcttagttgcatctgcttattttggctttattatatttttccaggtcaacttttagtttgcttcattaatttgttcagctcgttgccaactagcttgagctgtttcttagattagttgattcagttttaccaaagctttagttatattaagctggtgtagctttttctaactatttttttttttttgtaaaatcttctagtgattcttgctctactaggacgaaataattttttgtattttttcctttcgattgtgtgttgttgatcgtaactcattggatcttcaagggttggagaaagagtgtgaatctacaatgtctgaagggtgttcagactgatatgctggagagagttcaacttggtggaaacaagtggatcttgatttctcaaatctaagtggacttagatctttgatcttgattgtactcaagtgtatcagtaactcttgtgtaagatcattgcagtttatgttgctgatttgtaaatcaggactggtggatgtattctgaatgattttatagtggaggttacttttcctgattcttagagactcatgtactactcggttggaatgtgtttctaatgcagaggaagcttgtaaattttgtgttcattgatttatctttctagctttaattcatctagattcacaattaaaatcaattactttgcttttagaataactaaaactttcaaagtggactaacggacattgaacaatgtcgagcttggagactattgttgttattttttgaaattgggaatttatctgtatctttttgaagacttttgccgtgcactcttaatgggtagtattaaaaaaa

SEQ ID NO: 380627 - DNA, 2957 bp, Cannabis indica
actacataaataatgtgagaaagttaaccgtgcctaaactaatatttctccacatgcagcctcattagcatcatgacaagaatatcacatagaataaacaagttgtgtggtggattgtgtgccatatgatataacaaattaaaatcatttcttcgtcttacactatatttgaaaaaacgtgaaaaactaaaatgttactaataaattctcaccaagactgcaatcttttttatcatggcagccggatttgagtttaatcctttcactagggccatgattagttgcttcagcatagagagtttcttatctttagaagcatctacaagaatgatatcagctttataaccttctcctctcaatgcatgaagctcatcaagagtaggaatatcatcaaaagtatccttaagccttttctcctgtatatcattgcataacaataaaatcaacaaaattatattacatatctgctttcatgatttatagcttttaagcactagttcatctaacaaatttagaagatctaaactaaagaaaatctacatttagtgaattatttatgccaacataactaccagcaatcctcaccggaacaacagaatagaaaccatttggaattggttcagaaagcattccactgtgccatagaatttgagatgctttctgagatgataatacatcttgatcaaaatgtctaggtgattcagtattgctcaaggtctcttcctgggatcccaaagtagcagatccaaatttatcgatgaaatctgatggccaccatgaagcatttgaaggcctatgctcaactggccctgcgtcatctcgtgtctcctccatgtctttaaatatttggaatgcaaaaccatttcgcccccacttctcaccccataaaagatttctcaagcgaagattaattcttaggcaacgcaacaagacttgacaactttaatcctactgatttcttcaagctggaggccataggacctatacaagacaagttcacatcaaaacaaataaataaataaaaacagttaaaaatgaagccatcaaacatttctagactgaaagatactgtttaggatgaacaatataccagactattgcaagatcaataaagatatgctacaagcgcattacagcaataaaatgatattgaatatttaatataagaagaaaataaaatacaaaaataaaagtaaataaaaaagagcaattagctcttcgtatcaacaaatctaatggatcaatcttgatataatacatctcagtgaaatttgatagcctaacatgactacaataacactaaaacaaacctttaacccttttttttatcttacttatgtttagtaccctccctttcatggatctaattgaggacaattgtccttcattatagtcactcgttaaatttttatgacataatcaacttcacccatttatcatcaatcaattccacaaaaaataagcaacttatatcataaatctcaacaataatgttaagcataagaaaaaagtgggaattgatggtgtgcccattgttagtgaaagtacaaacttctttcctggtacaaaagcgatgtacacaaaaatacataactgttaaatactattgacacgttggtactattccgaaaatgttgaacatcattcattcaacatcacataaatgaccgatagatagacaagttggtactattccaaaaatgctcaacatcattcatttcaacatcacataaatggccgctagatagacaagttgtaataaaaatggctaactttcacttttcttcatgagagagaataaggtgacatttacttgtatattcatgagacagaacaaggatattatgtttcctaaaaattacaaacaaacagtctcgtacttagcttggcacaagttgtgcataactaatcttcattgctatttaatcatgcagtcattttaaagtttataagttctattttattatttgttatcaaacaattatccacatgttctatacttaagctatgtatgtaacccacatacttttttttttcttttaaccacacatttcatagttttccattggcacataatgcctaaaacacagtttaactgcttcttaatggcttaaagcttctacatttcattcaaccctatcaattctagtacttcgtgtcatcaactaactgcatcttttgaaacataacaactctctgacaaaatatataagcaacagacaaactaacagtgatcactttccagccccagaagtatctcgtttaactaaccaagtcccaaaaaagcacttgagataagcttaaatcctccaattcatgctgatgccaatgcagccaatgaaaaccagtacaatcacaattggaacgacttcccacaactaggtccaacaaatgtcccggattatcaatcacgcaagctcaaataacccaacataagaaatgaaacctaaattagagtgaattcccagatctctaaccataaccaattattcctaatttaaaataatttaacgccgatgcctccataccgcaacacattacgattttgacaccgaatttctatgcaaatctacatcttagcttaattaatcaaaatgagaatcatatcaattaaaagtaaataaacaaaatcaaccatcatcacaatcacaacaataagtaatttcaccacggaagcaatcgctaatacagaaattgaaacaactaaattgaacaacacgattaccgccagcagatccaggcattagaaatccaatctggttttgcacacaatagcatttgaatctcatttggtccgcatccgaagcatcatccaaacaccaaaacccctaacattacgagcaaatcctaatacatataacacaatacgatatatacgtctgtgtgaaatgtatcgaagaatgaggaaaggaaagacttgatgaaacaatataagaagaaaacctacataaattata

SEQ ID NO: 380628 - DNA, 1254 bp, Cannabis indica
aaggcttatattgtagtagtgtgacatcacaaattaaaaatcatatgattaagtgattaactttgagcatcatcctcgaaaggctcattattaatttcaacatttacttctggtgcttctctgtcttctgattttgaatccctacgagcataccaaattgccatcaaaatgaagaaaacaagattgactacacacaaaatagccaaaagccaatagtacttatctaaacgactcttattcaaagtgtattggaaccaactaggcttaattcctttagaactagctttaccaacaacataaactgataaaacacttgctaaaattccaaccccagatattccagaagcaaatatagtcacatatggagccatggtttgaggtaattgattggctaacattctagttatgttattctctaaaattccatctaaccctccaaggagaagatattgtggtaacaaccaaaacatggtcatgggaactgtttcttctggcttgtcaactaagccatgacttacaacaactcctaatcttcgttcctccaccttagctgctgtgatggagcataatatagcaaatatcatcgacactgcgatcccaatttgagcaacaaagccgcggtttaaatttgaaatacgagacaaagatcttgcgaattgtgagtaggaggatgcgtaataagatttcgattgatcgtaaaaccaaaggaagattggaattggaacagttaactttccaactttttgattcatgtggtttgcttgttcaatgaagaaagtgtttccaagggaagatactaatcctaccactaggaaagataagcatatgggaatcatacatatcatgctcttggtttcttccacctcggaaaccctacaaagtctccacttattcttctcttgttgttccaaactttcactttgaactataattgcagccttgtctagacacctatatatatgtgtaaaacaattatagttatactttcatataaatatatagaatgatgataagtgcacactacctaatacatgcataaaacaataacacaatgatcattgaaataaatataattagtgtaagatttttatttgggcttgattaatagttaatgggcttagtataaagtctaagtaaagcagaagtgtggacttttctaattaacaaaaacctttgatgagtagctcagtccaaatagggttatgtagctaagtccccttcctaactttataaatacatattgtctcatcacaa

SEQ ID NO: 380629 - DNA, 1262 bp, Cannabis indica
tatatatatctatactatatattagataagaattgattatcactttgatttttttaagaaagatttcaactagcaaacatgaagagcaataggtactctaaaatagtggggtgaggatttgttcaaaataacatccgctatcaacaaattctgaatacaataagaactccctatgaccaaattaataatgctactattttctatttgctattaacttgtttatgtttttccaatttctgtcttttctattttttaaagattcttttaggttattattaatatatgtattatatatatttaattatagattcgtacaacattaatataagtgtatgtatgtttacatttctgtttcattgacttattttatacaaagatttaacataataattaaataactaaataaaagaaatgtcactttcttaattactattacaaaagaaaaagtattgatacatgggattttttttttcttatttcaacctaattatatgatatgataaacaatgttgattggtaattttgaaataaatatgaaattcttgtataaagttagtattcctagcaaatacaaattcatgatatatttataatatattttttttcttaaatactcattagttaatcaataaaacctacatgcaatgttataattaatgtgatgtactataaagttaaagttgttaccaaatatttttttttttcactaaaatatttataatatttgttaaaaagtacttatcaattactcaacaaaagtatttgtaattttgtaaaattcttaactggcatatttggtaaagatcccaaaattaattatgtatggtattttagttgaggttttttttaatgaatagttcagatcttattatgtgggaaagacttcagacaaaagataaatttgggatcttattttagtgtgaaaaagttttctaaaatcatattgtattatatttattaaataaatatagagtttcttctttttaaattatcataaaatttttatgtttaaagaaagtatttacagttattttgttttaaaaaagatagttttctagtcgtatcagttaatggattggattggatttgagctattgtgcggatttcctttttttggatccaatccaatccgcacaatagctcaaatccaatccaatctaatccgcaaaagtgcaaattggatcggttactttggattgattactttttaatattaaattatttaatatttatgaaaaaaaatattttttttttcacataac

SEQ ID NO: 380630 - DNA, 1911 bp, Cannabis indica
tacaatggaggatgtgctatgtgctggttgcaaacagctgctttttcgccccatggttcttaattgtggtcatggtaatgattctatacaatgagctgcctatctcatacattatcttttccataaaatttatgtaactaacctccaactttgtattggcacagtatattgtgaaagttgtcttgtagtagaaacttctgacaagatgaatagatgtcaagtgtgtcaaagtttgcatccgaaggggttgctgaatgtttgtttggagcttaatcagtttctggaacaatgctttcccaaagaatatgcatttaggagagattctgcacagctaaaaaaaattaacttcaaggatccaagcatgattccaagtatgtctgagttgctttagtctcttccttgccttttgactgtcatttagtattgatgtttagattcatacaacatccatattttaatttaactatcaatctttaatttaagcctaggtcagctttgctttttcagaaaatcatgatcacaagtacatttttgacttacttctaacttgatgattgatttgcttgtggtgcattcttttagattcgaaagaaggtagtaaaaaatctagaaatggacaatggtggcgtgaccctcatgtaaatgctcatattggtgttggctgtgattattgtggggtaatcttccccctcccttcattaaggcatatttattttactcatttgttgtaaaaaatatatatttatgtttagttggaattgtgagacatacactacgaaaagctctaatagatttgaatattctgcctagaagtaatatttgagcttacatttacagatgtatccaataattggggagagatatagatgcaaagattgtgtggagaaaataggatttgacctttgtagtggttgctacaatactacttccaagcttcccggacggttcaatcagcagcacaccccagatcacaagtttgagattatgccggtctcttttcagaatctaatacctatggctgtatatggatctacccatctagtcataggcaatttttctgcagaaaattcagaagatgactcaagtcctcactctctctctggtgatgctcatgagaatgcagaattcagtttagctgctcctgctcctactccagcccctgctcctgccccgacttcctctggtagcggtgaggacaatgatcgagccaactcgggatccactgcttgatttcaaaatcagaacagagccaatgataattttcttatcaaggtgagagcacccgaggttgcttgctgtacatgctcgttatagtgctctatacaattaagatccgaagacagtgtacatattaatttctcatattttgtaattgttttgcgttgtttccaaaggcttttatgaaattcatgcccaaacccggcttcttcgtttcgatctgccttgtgtttgagaagaatgtagctgacttggattccaagtctccataatatggacactgcctagtgcttagagcttcgataattccacactccaaatggtatagagctgtgtttgtcatgccattggtgtatataaaaataaaaacaaaattttatattttcttgttttgtttttgtaataaatcatttctttgtagttaccgtcgttttagggccttaggcaaataattattaagtgcattgtcttcgtcacttaacaaggtgttgaaccagggttttattaagaacatatggtcgttaatagagtaatttgcggcataaatacttaagtttaattttcagttgtaaatatatacctaagtttaatttttagcggtaatattacctatgttataattttggatcttatgtatttacccggttaagtaaattgtcacgtgacaatttttgattggtcaaagtcattaaa

SEQ ID NO: 380631 - DNA, 4816 bp, Cannabis indica
ctacaaattatcctacttttaagtaattttctgaacatgctttcggatggcagcttggatcattgttatatattttcaataccgtgcatattttatttatttttatcaactctgactttggcattatcataacaagagcctaatatgtatggatgctcattagcacactaagttattcatcagtgctctcactgcgaaagagagattttttgtgtttcaaactcgaattctacctctattttctccattacactatcacatttgactgaagacgtcttcttggggctaataagaacccccaagtatctaaaaaggcaccttactttgtacataaccagtcatatcaaaagcatgttgagtatcactagcttccataccaggagtcttagcgttattagcctctagaccttatgtttcagagaaagttttgaaagctctaagtaatagttgaataaattgcacctctcctttgtaaataaataataagtcatcagcaaaacaaagtgagttaacttcagatcccaacaccgaatatagaacttgaattctggtttgtcagctacttcatgaatattcttgataggtactgcatttctaaaatatagagcaatgacaatattagatcactttgcctcaaacctctttgagattcagaaaaatctatgcaatgatccattcatcataacagagaatttaggcattgtaacaaacctcattattagtttcacaaagattcagggaactccaaggtaagaagcatctcctctataaaagaccattctattgtatcatacgccttcctcattattttggcaaatcattacattgtgagcaatatctgtcatgcacaaaaccaccttgaattggggcaatatggtttcgtaggtgttgacccctaaaaatgacttagtgtaatattttggagtctttagtgttatgccaaaagttcgccaaggggagctccacgcgcccgcgcccttgcccgggcctgcacccgtactcgcgccctcgcccgcacccgcgctcgcacttgcgcccttcgtgtgcccgtgcccttccacgcgccctgcgttccccgcgccctgcgttcccgcgccctgcgttccccgcgcttggcctccatcaccccattaatcttccttatactcctgacaccaaagcaagcagtatcaaatgagataatgacaacacaatgagtaacgataatagggacaaacttcattccattcatggtacaaaatgacaggggtatttctagtgtaacttaggatgtgaggtatatcagaccacctaggatacaacatttatcaattgtgaaagtgacttcatataatatggactgagatttggaaaaagtgtaaagtgtcaagggttccttataaatagagcccttgggtttattttaagggggtttttttctttgaatgaatggaacatcaacttcttgaaataaaatagcttatgagatttctattctgaatattattctattaagagtttttttttatacgtagccccttttagtatgatcgcaaagcattaacaccttgccttacatgatacttttttcatcttcattagctcattaaaggtgctgagatggtactttaggttagtggtaccaatatatcatgtcatatgtggctccttgaagttcaatggtagtggctctatttgaacctccctcaagagaggggattcttcatcaaactcctcgtcatcatccatgtctttctatttggtgatggccatcctccaatataggtcttgcatttctgcctcaaactccttcatcctttcactcatcctcttttgagggttagagagaggaactcaggccttgtgtgtggtttgcattggaccttgctctcagtggggagccatatgcgaggtgccctctactatgagacctcttgggtgaagtctctttctttggccatagggtgtttccctcagtgtactccccttatagtgggaaggctcaagttgtctcaaccggcccgttgggatcttttctcgcgacatgttccttttgtgctcatctcttgggatgctattggtggatgacatggaatcacacttgttagcacaagcatttgggatatcgtactccacttcgtggcttttgtgacagaaatttgaggcttggcttttgcctttgagtattccattcaagactttttgtataccaaccacaatatttctagtcttttgttcttctggcagaggttgcttacttctgcttcgtattaatgagcttgagagcttgaacccactgagtacacttgcttttcctttctatgtccacgcctgaagctgtcagcgtttggcgatgtagatgatggaaggctctaccccagggatgtctttcttagtaattgaatgcttctattgatgcggttagtcatcggtgtcgttatgacgcacgtagtgctaggggcactcttcgaacatttgcttggcagcccacactttggatgttcttccttcagtcttatctagcgacgggaggttggtgtcctctaaatgtgacaactggctagttttcttctgactgacacctattttctcaaagacaacgaaaatgtcttgacatttcgaatgtgatggtgaatgattaagaaccaatgtagctagagcttgtcgttcccaaagacggtgccaaattattctccatgctgctgcatgatgcctaggtctccataggcaattcaaaagcattcccagccacttgatccaaaagttcaatggcaaaaggggcagcttctctccctaccttgaaattcacgcgcgcgcacttccaaggcttctacctccacggttggaccaacagagggaaggttgtgcaggccgtctgagatttcagcctttcacaccgttgagagtacggtggtccatctacgaactaggccccccttctctacctccaaacgtttcttcagggccttgttcacttccctctcgttttgcatgccaagaggattaaaaagagtggtcctccttgggaaagtgaaccccataaagggtatttttagaatggcagaagggtagtatgaccaaggttggcctagcctgaatggtggatcatgacgctgggggtgggcccctatttcagaagtggctgccttaggcatttgccttttcctgccaagggcactgtcgcatgctgctttagaagaaatggtcctttttatcgcaaacctaatgtacttactagaaattagttcaaagcaaaatgggtcaacatgacatcggaccccaagactttcactccccatgatagagaccgtaggcacagtgacaatattctgagagtatgcaacttgcaccctcaaaactccctaagaactctacaacaagtaaatgatgaagaaaacttactgttgttaagaggaaatgaggtggatgatccgggtgttgcgtcttggccgacggaatgagtgcctgagaatggagttgctagagagtactcgtaagacaaaggaagagctggaaccaaatgctagaactctggtacgacaagcagtaaaaaatgtaaaacgtgaaatggttgttgaaaatatttatttggtactaggaaggggtgccttccacgagaagcgaacagttctaattgttcgcccaaggtacgcctgatggttggatgagtgggaaactaagaaggcatatcgactcccaacgtttggcctccatcattgcatgctttgtgaaaagtgttaagtaaatggagagtctactcaaatccaatcgctgccgtttttgggcatcccatagaacacgcacccagcacgcgtgcagaactcaaaagtcagcatttaaagccctaacgagaaaacaaaggagataataccttctgacagtgacacttcagttggcggctgatgacgtgatgtaataaatagtttgcacgtgccaagagtcactcaagaagagatactgtaagctcttagaccatggtacgtcccggaagcttggggagttaatgttattcacgtttttataatcatgacacgtggattttaatcaagaaagggtaacaagtcattagctgaccgactttctcaactgatgctctaggaggataaaggcctcaaactcgcgggaagagttttcgtgatagggagttccctgactactagtaacatggaaggtatccttgagccgaagtcttccttaattctaggaaacaaagccatctgctcctgagaagagtattggttttctcagaaggatcaaggcatttcaaaatgcaccaaaccgggctacactcctcgcccgtagaaactctgcttgcacatttcaagctagggacatagtgactaggattttttaggtacgatgtcagaagttgtctcccacgacgcaatattgtatagagcattcgtgtccttatgtacctgacctaattatccaatggctagggataagggaaatttaaaaaggaaaagccctaggatagcacgtgtatgaggctcagcctgtacgatctgacacctttaaatgccgaatgggaaaaatgccacctaccaatccaacggttgggttttgccctaacgatgattaatccaaggcagcacatgaagagaagttggcctataaatacccttgtaaagcacaagagaaagaagagacttttctggggcaagattcattcttcaccattctgggcaaacacacttgtattaagccagatagtattaccccaaaaaactctagagtattcctactaagcttcctcttcttcaaggggaacacgggagaaaaggtttttcagtttattgtatatttacttgtgtaaacagttattagccgatca

SEQ ID NO: 380632 - DNA, 4888 bp, Cannabis indica
aataatatggccttctattcttttacttgtttgttcctcaaaatctgtattttttaatcaatttgcttttaataccaaacaattattttaataaagattttccattaatagcaaaaaaaactattaattcctccatgtgctaagccggttattattgatgccattgccataaacctttgctttctcttttgcatgcttgtatttatttccttccatttttctttgtttctgtcagataataaatatagttaagataataagatgaccacatcaataaaagcactcgtattaggtgatgtataataaatatggggacactactttgtgtatacttagtgaacttataactcaaaatttataaaaatttgaataatttatctgctgaaaataaaattcaaacactcagcttttatatatatatttttatatacacgtgtaattgaccattttgaaataatgtttttagcatttaaaattgttgaaaattggttacaataatacaatgtaatgtggactattatatgaaaatattaggccataatttttctaaatactgaaaacaaaaatacttttatccttgaaaacaaaagttacacttctattattattgctcatatatatgtgtgttaaattataaagaaatagactccataagatgaagtattttactctttttgtttagttacatatggagaaaactatttagagcttcaaaaagttattttattaatgtctcacccataatttcctcttctaagaagtatagaaacgaggctatttaatatttttgtccatgaactatgacttatgtattattgtgcttttggatttttaggtgcgttaaaaatagttcttgaattatttacagtgttgtaaattgatcattttcttaagttttttcacacgtggcaaataaaatgatagcatggctgcttagtcaattgttacgtgagtaccatatcaatgctacgtgtgtaaataatttgaaaaaaataatttaattttttttttaatttggttttacgtaattttcttaattattaattgatttttagtttaatgattttaaaaaatgtataatttttatatttttaatgttaaattatacacatggcgttgatgtggcaattgtctaaacaactgtgtcatcattttgtttgacacatgtgataaaatctgatagaatgaccaatttaaaatattgtaggggctatttgtaacgggctgaaaagttcacgagacataataatacttatgtcattgtttgagagaaaaaagtctttattttgacactgggagatgggggattcgaacttggaatatcctctttgtgagaatgagaagaagtatgaaactactaggttatgtctccgaccatggaaacaaaaattttaaataacttaaatactattgaacaagcaaagtcatgtctttgattataataaattaaaaattaacaattcatcaatcccattttttaaaattcttttttctcgtgggaccaatataatttataactaagctaatttcattacaaactaatcgttttacaactaaacaaaacataaatctctatatatttgttctcttcagtcctatttcgactgccctttttctaatatgaaacttcagtggccacatttcaattattgctttagttttattgtggtaaaataattatggttctctgcctcaaacatatatatatatatatatttatatttatattactagatgggaggaatgtgaactgtgaagaatgaaataatactaatattactagattaacactgaatccatagatacattccacatatcataacttgaactaacaaaaataaaaagagttgaaaagtgatagatagacaaagaaaaaaccattaggtaaagacaggtttgtactttgaacacatatcattaacaagcatcattaggtaattgagtttgggtaggcttagcacgactcgtgttatctctacgtgtggcaacaacatagtagacactcatagctagtaacacagcaaatgctaagccaaacacaatcccaacaatcccaccagctcctaaactgctctgtctgtcgtgtcgagtcaacattttgttttcttgagcaccattggcttcaatttgagctgccataggtagcggggagcaacttgactcggcgcagggttgtgtttctcttttgttgggattggtttgttgtttggtggggtggaagaaatcatatgctgatggtgagaaggccattggggattcattggctagtccatgtggggctctgccttgagcattggctatggatagtagcattaaggttagagaagtggaaaagagtaggagagaaattgttgttgttgaagtcatgtttagctttgatgggttgtttagatttatcacttttgtgtgtgtaaagagtctaagtggttcttttgtgggatattgagttgaagtttttgatgttttggtatggcttttatagggtcatgtagggagtttcttgcttggtctttaattttggttatgaaaaagaggtcacaaagtgaggagacagaatgatgaaatgtgtgtgtactctctctctcttctctccatgtgattttcccaaattaccctttactatgtgaaattagaagagtatgcaattgctcgtggcatgaactaatgaaatttatatgaaataaacattgatgttaggcaatttaaagtgtgtaatactataccgatgtgatacgttgtacatggtaaataattttttatacctgataataaattacactaaacaatatttacttgttgtgatacttgacactttaaggtaccttttagcatttttcgaaaaaaaaaagtaagagggcattgaatcaaacaaaattgggaaattgttgtagtaagacttaaaaaactctaaactcatttaagagtgatgtcttattactcttttatcaaataaaaacattaattaataataataatcaagtgtatacaaatatcattgcttagtaattgagtaccttaataaaaaaattagacactgagtacagaagattataatgatttgttcattaattcatctttaatagtttcttcactacaagtgtctataagtaaactcacaatgtccatgcttgttgtatagaaataaattatttacaattattaacaatttcttttatgattaaatataccaatttttcatcatactatatattaacaaataatttaaatgtgtcataataattcagagtacacaaagctttaccaacacgcgagcatgtgtgttcattaagcatcatatcatataatataaatatatatatatatatatatttatatatataatataatggccatgaccctattctcaagaatgactttatcagaagaaataacactattttttaacaataatgaatttttttatgtgtggtgtctgaatttcattttgaaaatgtttcatagcataggtcaaggtcaatctttaagcttaatacaaattgacattttagtagggcaaagtgcaagtgtaagagtgcttgtgtttctttcattgtttttagtggtagaaaaaagtaatgggatgttggggatgatggtgtttcttagcttggagggccagcaaaggctataaataacataatgtaagtgtatatacatttacatgatgtgtgtaattatagtttaggtatatttatatgataaatataaaagtggttcagcagtgtctaatactactacaagatgtcatactgctattattgtactgtgtaattaagtattaggttttacttattttacttcaataattattatataaaacggttagacattgtcagagttggctttaaaatttagtaggtcataggaaaaaaaattttttaaaccttaattttttttaaaaaaaataagagttttcaaaataagtaaagaaaatatatatttttaaaatgaaaatttttttttagaccctagttaggtaggctttaaacataggtctagcctgcttatggttagggccgagtttgaacataatagtagtgttgaacaccaatgctcatatctatattgataactatagagggatgtgtttgcctttttataattggagagctagggtgaagactcaagggcatgtttttggctaaaatacaatgcaattgtaattgcaattatcttactttcccactttatcattctttacaacttattagttattacatcatatcatatgccttgccgtgtacactttcccaaattaattatagggtcatcaagattgagattattaattaattaaggtaagaataacaaattatgatgatgaatttgtgtaattcaatagtttatttgcattgtaactatgaatgaatccttttatgttgaagtcctactactaatcctttttttttctttttcccctcaaatcattgcattttacatagtaatacacaattttgatagtacatagcatatcaaagatcattcctagtacataaatttcgaacacttccatcaaaagtgacacattttcaatataattttaaagaaaaaaaaatcaaatctcgtcacaataaataaaatatacatacaacatcattcatatatagtttaccaaattagtctcaccaaaaatactatacacataaatatggtgggttttaaattctactcgaaaccccgacccccgactacggccctgggcttgagacaccaaagcctaaagctctaaccacctactactaatcttttgatgagctaagtaactaagactagcttagttcgaactcaatacccttaaattattacagtcgaacctctatccaagaatacacttgggactaagaaaattatattctaattgagaaattataactatatagaggtacac

SEQ ID NO: 380633 - DNA, 757 bp, Cannabis indica
taaaataattccaacagtaacagcatcagaaaccatgattgggctagggttaatgtgagaagagaaaatgtataacatgctctatagacatggggaaactacagcccaaagaggtctgagtagggccaacactcatctcttcacaggaactaggagaggagacattaagcagggtagtataggcaatacttagaactaagaatctatcaacaacgtcttgaggactttggctagaggtaatgacatggttggggtactcctcaagagaaatagagttatagagctcaaatatacttttcttataaacagattcgactggggctttgagagcatccttgtagcttaaggaaagagggtaagcatgatcatcaaaatgcttaagaaatttgtcacacttattaaaagtgtggtctaacttgccacagtggtagaaatagtttttgatgccttcatagagaagttggagccatttgatgatagacaacttcctaaaatgaacattcatgcctctgtgcaaaggcttagagatatcaaacaaaactctgatcctcatgaacagagtgataaggtcatagaaaggcgatatgagtctcaacaagatccccaacaacatcaacaacaaattgggcaagcttgagagacttagtgccaaaagggatgaaatgcatccacaaaggaacaaacctaagctagtttgggtaaatagtatcaaaatcatcaggaatggcaaagatcataatgttggaaatattttacc

SEQ ID NO: 380634 - DNA, 4066 bp, Cannabis indica
caaaaatataattcaaacaatcttttgtacacgtaaatcttttatacgcttgcataataaattatttgaatagtatttttaataaggacttttatttttacattttaaaaccgtttttttttatttttcattcacatagaaacttctattgcaattaacagaacaactaaaatcgcaatcaaaatacttatagcaacctacatagaaactacaggagaaactattttagaaacccaaacagtaaatttgaaaaaaaaaattaaaaaaatagtatatgaagtaatttttcttagaagtattaaatttttttaaattttctattaaaatgattttctaataatttaaaatacaactaaataaagaaatgaaataaaaattattatttttttcattctattttattttattacctccaactaaaatccacataaatttaacaatagtgtgaccacatgaatacgttggaaatgatcttcgaattcttctttcaccagcactactggtttttcttggtcataaaatctatgcaaattttaatgttctatgacagcactggtttaacactactgcaaagttttttttttataataaatcactacggcaaagttagtgttgagaattttttttgataacacattacgtttagcaagattttatttgggatataatcctgaaatcaaatcgatgaccccattatacaaaattttacataatcatttttttcacatattgaaagaatcttagttgagaaaaaggaatacactgacatgggacaaattgataaataaaaaggttatttatgtaaatataaatttgaaacagaaccttctaaaagaaaagctaaaacaaaaagaatggagtgaaatttgttatcacaattctcaaaacctttcctctttctctacttttccttaacaactaagtcttcttttcatgctttttcttcgtcttcttctttgctctgtgctctgctacttataaatttaaccccatatcatcaaccaaagctttctctctttctttctttctttctttcttagtctctctctatgtgttcatcaatggcaggtgaagcagaagacacatatgccaaaccccaaaaggtagtttcagacccaaagcaacaaaaccaaagtaacaataagtttcaatctaattttctctataaagcagccatagttacaattttcatgatcgttttaccacttttcccatcacaagctcctgattttataaaccagaatttactcaccagaagttgggagctcatccatcttctcttcgtcggcatagccatctcgtacggtctatttagtcgcaaaaacgacgacgtagagaaggaaaacggcaacaacgcaaaattagacaatgcccaatcttacgtctcccgatttctccaagtttcgtcggttttcgatgacgaatctgagaacccatctgtgtctgatgacaacaaggtccaaacttggagtagtcagtactacaggaacgaaccaccgatggtcgtcgtagctaaagaaagctctgttacaacgaaaatggcggaaacagcaacgggtcatcgagaactggagaaagaccgctgcttttaccggttcggagcttgaggtctcggattcctgagtcggacattgaaaacggtgccgtttcgagctctggtggtgatgtttctcgttcgaactcgatgaccggttctagaaggttttcgagcaattcgaaccgggaattcggagggttggattatgacaaagtggaggagaagtttaaggaaagtgttgttcttccttctccgattccatggcgatcgagatcgggaaggttagagatgaaggaagagattgatgaattcagtcgggtcgaatctcggaattcggagcctcaacccgcccgtttgacccgacccaattcgtttccctcttcgccgaatactccatcggaatcccaagccaagatttcggaggacagagttagaaagaagacgatatacgacaggtcgtatcctcctccaccaccaccgccaccaccgtcgtttccttacaaatcatcgtcgtttaaaccaaacactacttactcaaacgacatgacaagaagtcgtttcgatagcaatataagtgagagtttgggttgtaataataatcagaataatccaagtgtcaacaaacttcgtgatgaggatgaaaaaagagaagaagaagaagaagaaaatttggttgagaaaatgatgatggaatttgatcaagaagagacagagagtgaagatgatgaaattggaagtcgtttgggacaaaacgatgtcgttgaaaacccaaaagagagtcctgaaacgacatcgtataacagtagtgttggagatggaggcccagatgtggataagaaagctgacgaattcatagccaaatttagagagcaaattaggcttcagagaattgcatccattaaaagatcgagtgcccagatgagtaaaaaattatcaaggtaaacaaaaaaacagattgaaggacatttcttccaactatttttagtatctagtctctcttttatctctttctttgataggttttatataaagatattcatatatgtataatgttttaatttaaatttcaggttatgatgatagtttttgttttaaacaaagtgatcatatggtatacaaaggatttttattgttttgttgtttagccacaaaatttactaaagtggtattgttcttatgaaaaaaactttggtgatatcttattggttatgggattaagcttgttgttgtaggggttgtcttttgtttaattgtttggcatgtatatataatcgctagctacatgcacacataaaaatgcctgaaaatttgtttgttttagaagaaaggagaacttctttataaaccatttctatatataaccaaaacttctttttagtatgccagaaacctgggagaaaagaaaagattagtaaacttgcgaaagtgtaatattaataacttatgtatgttaaacactaaacagacataacaacaaccattacttaaccgtaagaggtagaaatatggccatttatatacctctctttgtgaccagtggccacatatatacctgcacgactaagaaatatatcagcatacatgatatatgcattttttatgtgtatatatttagctttgaccctgtaaaggaagggaagtgaggttttatttataaccagatctacatacaaagcttactcgaaaaagaattcaaatgtgtttcacttgttagaccacctccaatagttattctaattaatgtagaatttacgctaatttaatgtagaatgtgttagattatttagatatgaaatgcgaagcatatatgattggtatgtaaagcggaataaattataaacatatcgaaactgtatatgcgataaaaggaccgaaatatctcttgtcattaatcttcggcttcaatctccagcgatagcttcaatatggaaaattgggcttccaaactctctcagctctctttagatggattttgctattttcacaaaatgagtgaagaggtcgaggaccgagatcctatatttataggtgggatactacatcagtatctacgccacattaattatcagaatattttgagttttgacaattaattcaaaaaatctcataatcaggtaatgaatatcgtaatttgagcatatataaaatattaaccaattaattgtgtcaagatttaatgaatataaaatattcatttatctcaaaattaatttattggtcttattctataaataaaaaatattataatattctctcttttgggcagtatttagatttaacactcaagctcatcgttcctcattacataataaatgtatgaattatagcgacatgtcctaattatatgtcaagtattatcttccatgtattacaatatgtttactatataacaatgtacttaagcgaataaatcataaatcttatgtttattctgatcctctaaaaatttttcaaatatagaattaagatgctcataaatatgagaaaatatcaaaataaaagttatagtaataataactttatttgtac

SEQ ID NO: 380635 - DNA, 2140 bp, Cannabis indica
caatttacagagattaatcccttggatttatcagatgaggaagttctgaaggaagacgatcctgctcttagggatgtctttcaacctcctttatcccctaaatcctcactagaagcaattcagaaataagatgatgctcggaatgattttgttcaattcctcaaagtgaatgaccaatataacagtgaacttaaacaaggtaaggcttcgattcctccaattttgcgatcgacctctgttgttcgtaatttggataattcattaagaaactctgagcaaggtagcaggaaggtgaagatcaccttaaataatattgaggaggagattcgttttggaaactgtcgattgtatgatatgttttaggagtgaaacctccattacacatactcgaaggatttgttaataggatttggaaagaaaaagttgatcgagtgaagatgctgtcttatggtatttttatcatccgtttcaattcaatggaatacagggatcagattttgataggggctatattttcttcaataggaggcctgtcataatgaagccttgggacccaaatgtaagtttcaagaaggatgatgtgaagtgtgtgcctatttgggttcaactagaggatttagaactaaaatattggggccaaatgtctctctataaaattattgggcaattagggaaaccattaatggtggattctgtcagcaaggagagggagagattgggttaccctagggtattggtagaggtcctaatgtgtcaaagattgcctgacttgcttgaatttgagaatgaatttggctcgaatacaacagttgggattaactatgagtggaaaccagtcacttttacccattgttctggagttggacatactactacagactgtaagaaaactgctagtgtaaaacaacaatgggttgtcaaacaagacaataggaagccaatacagatcgatgaggatggatttacaaaggtctctaatgccaagaagatagatgggaaaggaaaaattgttgttgtcacagctactacagtggtgaagaactctttccaagccttgaatttggaggatctaactaatgttataggtgagacttcaatggagaatgagtttaatacaggagaggggggggagccctctctttctaatgaataaattgctatgttcgaatgttcgaggagccaatagccagcccaaacaacaattaataaagcaatttattaatattcaaaaggttgactttgttgggcttctcgagactagggtaaaggctccaaaacttggaaccttgtactctaatttatttgaaggttggtgtttctcttccaatatagcttggcatgcaggagggaagattgttattgcctagaacccttatatattcactgttgatatcatcaaatgcacaagtcaattaatgcatttgaggatttctacagttgaaggctttaacagtttacttactctggtgtatgcttcaaataatcgaggggaaagaaggcttttatggaaggatttatgtgacttgaatactgttgagaattggcgtcttatgggggactttaatcacatcttagccaaagacgagaggattgggcatagggtaaaacctatcctgattttgacatcttaaattgtgttaacttttgccagctagaagacttcaaagcaagtgaaaattttttcacttggacaaacaaggaacccggtgaagatagaatttctcctaaattgaaaaaattttagccaacaaacttggattaataagtttgagtttgctgaagttgtatttctgaattagggttgatttgaccattctcctggtatcttaaccctacatcctggcttggtaagtggtaaaaagcctttcaaatattttaagatgtggaaatctcacccaaagtatgattgtgttttgaaggaagtatggaatgtagaaattgaaggcagcaaaatgtttcaggttatgactaaagtgaagcagtttaaggtcaggttgaaggagacaaacaaagatggttattctgatctacaaaatgttgttgctaagactaaacttgatttggatgctattcaaagtcagctgcaactctagccacttgactctactttgcacctgcactcaatctcaagagtgttatt

SEQ ID NO: 380636 - DNA, 4772 bp, Cannabis indica
acggctggttgaaagggcaaaggaacaggtatggcggataaatataaataaacggtgaattaatcccaccattagaatctgatcgagtctcagctatggcggaaggaacaggtagctttgtactttcaatctctctaatttctgattctgaattgttttaaggtttcccacatacctatttatttttcatctcaatcacctcccgctaatttatgttttctgtttatattatataatatataaactaattttagttgaaatctaatttaccaatacaaattgagttctgatttttgcagcgatacacctgtatattcaattctcaggtatctcttaaacgacatctattttctccttatttaattacataccacatcgttttctgctttcatgcagttttcatttgtcttaccacaactattgtatgtggcactttaatttcttcagctttcctttttggggcaaagaattaaacgtcttttttctctgtagatcactgatacgacttcaatttcagaaaacgacataaaatctcatttttatatatatacaatggaagtgtacgaccccttctttttaatacgacattttcttccctctgtaacacgagttacggcatttagtggaatttataagtatatatacatgtgaaaattggaactttatatgattttgttgttatagaaatatggttacatttacagagaatctgaaattcagaagagtcaaagctaaagaatattataaatgtgtatgttatgtaatcttgttatcatttctttttccaacatgattaatttgctgttattttctgttccttctttctttttcagctctgcttgtttagacaatgaaaagtagtggttctcttggtgttctgaatcaaagaatggcttcagtaactgtgccatcattttcaaccaccatcaggtccatcactcttcctagggtcaactccagaagcttcaacttcttgagaccctcaaatggctttcgtctactcacatcctcaaactctcacataaagcattctgccattagctgcaccaaactgagtctttgggagacctcttcagctacacacgccccaactgaagaaactggagaaaataatttgttgaagaaaactgccaacatttttgagacattgagttctgaaaacacaactgaaacatctgaagccagcagtgaaaaaatttacagctcaagtaatcagtttcagttactcaaatggccaatgtggcttttaggcccttctgttctcctcattacaggcatggctccaacattgtggttacctatatcttccatatttgttggccccaacatagccagcttgctttccctgattgggcttgattgcatattcaacattggtgcaacccttttccttctcatggctgactctctagctcggccaaagcttgcaatgcaaccttgcaaaagcaagcctccatttagttacaagttctggaacatggttgctattgcaaccggcttcatcatccctctaatcatgatttatggctcacataagggattcctccaacctcagctaacattcattacatttgcagttttattgggtccctaccttttactgctctttgtacagatgctgacagagatgctgacatggcattggcagtcaccagtttggctggtgacccctgttgtgtatgaagcttaccgtttgttgcagctaatgaggggtttaaggttgggagctgaacttagtgcacctggttggatgatgcatacaattagaggcctggtgtcctggtgggttctaatccttggtatgcagttgatgagggtcgcttggtttgctggcttcactgctcgtactcgtcagaaagtggcttcttctgttgatgattagtcatatttggcatcctccaactctacttgaaacagttatggatttggatgtcttcaattattcttgttatctgtacttttgtaatgttttaagctgtaagtctgtagaagaaaagtgtggtttgatcaccccaaatcttacttatttttatgtaatatacatctcacactagagtagatacagagacaaggatttcgacaaattaaagaaaaaacatgttatatataatgctgtggattttgggtatcattcagtgacagattcataaaaatactaggtgaaatgatttcttatctataataatttgctcaggcagtgaggccaaagaagccaacttctttatcgttggcatctcatgggtgaagttttgactcggatgtgattgtttcattttggtctaactcatcactcacaaaaactgaagtagtgtcatttttgtggtggtgaccctttttgttttttctttctttcttgtgtcatttatttatttattttagaagatttaaacctttgttttctcaaaaaaattgttgtttagaaattttaagctttgctggaaaaaatagaaaagcttcaagtttattatacatacagatattttttgtaaataatatattttcataaaactgcttttcaactaccaaaaaattaaagcaccaatctattattttaaaatcatgctcactatgaatgtctcctccttactttacaaaaacacaatctataatctgtataactctatataaatgtgttggtttactattcaactttcgttcacttattttgtcagtgtattcttatttttttttaagaatattagcggcaaaatttattaaattttatattttttaacgcttaactacaaaaattaaaattttaacgataaatgttgagttcagtaggtttgtcaaattttttatttttgtggttaagtgttaaaaaatataaaattcaagtgcttttaacggtaaaacctaagtttaaggcaacgacaagagacttgtgatagctatctaaatttgtattcaatattgggggcattgatgttggttacccctcttcaatctagtttcatactcggaggtggatagcagaatcctctattctcactcaagagatagtgttaggctatttttagcctaagtttcaaatcagtttttgagttatttttcttctttaatataaccatttagaatatttttacgcttgattttcttaattttaggttcccgagatgttaaagtacaaattctgtcaagtgacattaggacaagacgagctaaaagtgaagaaaaattcgatgcctaagttccttagctagttctgaccagcaagaaccatagttgtgacgaaataactggtcacgactaggccattatgtagtcacgattagccaactgggcaggggcaaggaaattcgactttacacatggtcgcgactaggcatttcgtggtcgcgaccataggcacgaacgtgatttttggacaattttgtaatttgaccattttgagttgtaaaaattgatgtctataaaaagatttcgagttttcaagcaaattattaggaaatagaaccctataaacaaagaaagaggttaaagaagcaagtgtggcgacctatatcaacttccccatctagttctttcttttcctttttattttcttgtgttgatttctgtttgtagtttgattatgggtttgaatttagaaattatgaactaatttctcaatttagggatatgatgaatgttgactgatgttattctagtttagctaatgtgatttgttagttttcttctctgaattgttgtgatttgttcttatttattttaatacatgtttcagacttgtcatcttattaagatcctaatataaaatctaagaagtgaatactaagaatgctctaatagaataaacataagttttaatgtaaaacgagagtatttacatagcatgtgtgacatctagattattacttgatgcaaatcatatgttaatttatttagagaagaaaatagataacatatggtttaggatcttaatgatttgagaagagttaagattatttctataatttgtcatcacttaaaagacataaaattgataaattacattaccagttggataactaaaataacaagattcatattcttaatatcttatccatatttaaacatcattaaaagctattttttaaaatttcttgtcaagtttaattatttttcttgtcacaattatttcgattagccaaataaaaatataaatctagtttggtagtattcaattttaattttatgtggttcgacctctcacctgtgtgagtactagtcaatacatacacttgcgtagtttacaattttgagtaacggatagttcacaagattaaaaggagaaaaggaaaaggtggccttatggccatcaaacttgatatgcacaaggctcatgatagggtggaatggtctttgcttcatcaagttcgtattacaaatggatttgatgagacgagttacatgcacattatgtcatgtgtgaccactgtttcatatttggtccttctcaatgggagtcctcttaaaaaaacttgttccaagaagggggttgaggtaaggagatcctatctctccttttttctttctcctttgtaaagaagttctttccaaactttaatctagagcagaaggtaagggtttaattcacgaaatttaaattgcaagattggcttctcctaattcccacataatgttcgcggatgatacaattttatttacaagagcaagcgaagctaaagctgttggaaatattttaccaggatctagatttactaccaagtatgtttaattaacatcctaatatgaattctaaaacaatgaaataaacacataagagttta

SEQ ID NO: 380637 - DNA, 3425 bp, Cannabis indica
attatatacattaaaaatttgttttttataaatctatatatttatatttcttactaacttttttagctaaaaagctttattttagaaaacatttaactaaacctttttctttcaataaaactacagaaactgttattgattggtttccatcttttaaagcataattttgaaaacaatatcaaaccgatcgaccttagtatatagtcttctacatctggcggctcctttagaatttgaggaagtaacaagcttgagacattgagcaaatgatatccactattatactagttttaattatctctacattttctaatgcacaccctctttacaccttttgttcacccgaccaaggaaactacactcccaacagccaattcgaaaccaaccttaagactcttcttgatcacttatcttcaaacacaacccttaatggatctctcccaggctacttctatacatctattggaaataatagctctgataaagtttacggacaatccctttgtagaggagatgttaactccaccgtctgtggaaaatgcgtggaggatgcaagccaagacattttcagaaactgcaagagtatagatgcaattatatggtatgaactttgtcaagttcgctactctttccagatgttcttttctactatgcaagtctatacagggaagttccccaagagcaatgagcaggacaagaacgtttcggtggaccggactcgttttagtaaagttatgatgcatatgatgaagaatctttcagatgaggttgcgtttactccttctaagaacatgtttgctactgggaaaattgaattttcaagagaggaaactgtttatggtatgctacagtgtactttggacatgcctccaagatcatgtagtagctgtttggctgctgccttgggagaccttaacgcttgctgttcatttcgccgaggtggaattgttttgagtaggaactgttatgtaaggtttgggatggaccatttctacaatgacaccttgagccctttgttagtctatccatcttcaacaggtaaacatttcaacagcaattctaaagtggtatcatttagaacttgtctatttaattaagacttttttaattaaataattattacgaaaattgatgtttcatacataacaaatgtaacgattactttaattgaaaataattcgagttagtttattatgtatatatttatttcatttttatcacatatttttaattgattatatatgttaatttgtgtctagtgtattgattttttattatttatttttttggggtgaattatcaagtatatattgactaaattcgtgtcatgttaaggtgtttggatccaaattagtactattttcttgtgttgtgtatcttagataagaaggtctagctacacgtgtgtattaaatcaaactaaatatggatatttgttactttttaaataattatagaacttgagtattgtaacttggggtttaaggaagttattccactgagaaacagggaatagatggaagatttggaagattgtgctggttacctgctcattgagtttgctacttgccgttgtcagtggatactgggctgtttattttcggctaagaaaaggaagagaaagaggtgaaaggatctaatttgtttaccattctaatatagccaagatgactgattagtattttttgtctaagtagatgacagaagcgaacgtgctctgttacaagacctaacaatgcccagaacggtcactattactcaagaaggtaaccttgtcacttctgaagaactgcctttctttgatttagctactataagggtagctacggacgacttttctgattcaaataagcttggacaaggtggttttggcactgtttacaaggtcatctccgtgtgtttattttggctctaactctgatttgctcaaattctggcttctgattttgtaactttttcagggaggattgccaaatgggaaagaagtagcagtgaaaagactgtcaaggaaatcgtggcagggcttagaagagtttaaaaatgaggttatgcttatagccaaacttcaacaccggaacctagtgagactagtaggatggggaatagaggaagatgagaagttgcttttatacgagtttatgcctaacagaagccttgactttttcatctttggttggtttattcagcaaaaaatgtaaaaataatgacaacattcaatttgaattctatgataatttgtttgcatacctgattttcagatttggaaagacgatccctgctcaattgggagacttactacaatatcataagtggaattgccaagggacttctttatcttcatgaagattccaggcataaagttattcacagggatctcaagcccagcaatgtacttttggaccaagacatggttgccaaaatatcagactttggaatggcaaggatattttacgaaaatcaaaacacagctaacacaaaaagagttgctggaacatagtatgtgtgccttttttcatgtcatgacttcctctcttttgagtcataagcccaaattttggtaccaaaaactgcaagatcaacataatagtaactttaattcttgtgacagtgggtacatggctccagagtatgcaatggggggaatgttctctgtaaaaactgatgtttttagctttggtgtaatcctgcttgagataatcagcgggaaaaagaatagcggatacctcacagaacatgctcaaacactcctttcatatgtatattttcttaatcatgattatttgttttctctctttcttggtgtacttttatgttttctacaattttataaaagtgacaattgtcttgtttgttcaattcatgacaggcatggagattatgggaggaaggaaaagaactggagtttgtggatcctttggtgatagaatcaagcacaaaacaagagattttaaaatgcatacgtattgggcttttatgtgtccaggaagatccagaagataggcccaccatgtcaagtgtggtcgcatcattgcagcaggagagtgaaccagtgccactttcagaaccaaaacaaccatttgcctttgccgtaagcaatgctgttctcaacaatccctcaactatagatcctacccttaatggcctcaccttttctgccattttaccacgttgataataattcatgtataaaaaataaaaatcaaatttactgattcataaaattacaagacaattaacagattcaaagcaaaggaatacaaaaagttagcagataaaggtaataatataatcataaaattgtaaaataatatctctatatattgatacgaaaaacagacaagtaatctacgcatcaaactatttgaactaaatttttacacaatgatgtaatttatacattatgtctaaaaaaatgtaatgttcct

SEQ ID NO: 380638 - DNA, 2793 bp, Cannabis indica
gatgattataaccacagtaaaaccttttcaaaaagcgtgttggcccgaatgggatccccaaaacctccaagattttacaaccgtaggatgatcctcctcaacacacaaaacatgatcaacggtcacacgaagtgggccataaacaatgtctctttagtactaccagccaccccatatttgggctcagtcaaatttttactgaaccatacatttgatcagaggagcccaccagaaagctaccctgccaattatgacatcatgaagccacctgtcaacaccaacacaacaactagcagtggggtctacaggctcaaattcaaatcaacagtggatgttatactccaaaacacgaatgctataaaagccaatgttagcgaaattcacccgtggcacttgcacggccatgacttttgggttttgggttacggagaaggtaagttttcgaagaatgatgagaaaaagcttaacctaaagaacccgcctttaagaaacacggctgtgattttcccttacggatggactgcccttcgatttgtggcggacaatcgtggagtttgggctttccattgccatattgagcctcatttgcatatgggtatgggagtgatttttgatattgaaggtcgttttgttaggggcatacctagtgaggctcttgcttgtggtgccactgggagaatgatgaccaaagatggcaagtatcattaaaagtgattaattattaattccctttattgtgaaaaaagggaagtgatgtgttatatgtgtgtaatgagttatagtatagttaattattactatactctagagtctaggtgagaaattaagtttgtaatatgcttttgaagagttttaggtagagtagagtagagctttatttatcttgttgtgacctttttcattagaatgtaatgagtgagagtgtatgagtgagagtcgggaggatggtttgtctttgtagccttttgtgaaatgaaatgctaatttatctagctatcttatgttacaattggattggatttgggggttggacttagtacttagttcttactttgagtttattaatttttaggatttttttttaataaatatctgaaaagataaaaatacgtacaccaagattaatagaattaaatacaatattgctaggactatttacccaattgactaccactgttgattgtgtctaattttcttgacaattatattgtaacaaattttacttttgaaaacattttatgtttatgtgaacatgtgtccatgaaaatagttaattatcttggttaagctaactaaattagatgggtagctaattattatctctctgttgttcaacggtggaaattgacatatattaaaatatttgataataattaaagaaatctctacaacgtaaaacaaaaaaaataaccaaacccaaaaacccaaaaggcccaaacccaaaaggctgtactgaacaaatgggttttcttttctttgggtggtgcccttaatttttgcttagcccaaaaaccaaaaggggcataataaccaaagaagttaataagaaaaaaggctttttacaaactaaatgcaaaatgacttaattgcttgctcatctccaattattcctaataaacagtcttctcatgttattttagtaaactgcactttcaatattaacagcaaaatataactagatcagtggcaattacatttagcacatggctttttatgctgttatttccacatttaagctgtattatcttttaatagtattttgtaaaaaccatattagttatggattttttatagttaatcttcttaaagttaaacctatagtatagtgccatatttttacatattatggtataaaataccatattttattaagaaaataatacttcacatttattcaagtatagtgtttttatatcttatatcatttgaacaataaatgtagagtctaaataaacaataactataacaataataatttaattacctttctttgaagagagtgacatatatcacatatgtaaaagcattcaggtacactatataatgagtgatttgcatagaagattgaatctcaagcagtcgagcagaaattataaattaactcagcaataaataaatattaggagctgagactgagactgaaaccaactacagagataagagatatatatttgatatttctactcggctggtcgagattcaatattcttagctttccactactttatacactcactccaatattgcattatttctctcattttcatctcaacttcgatgagtgaagtcaactaactaattatgtttgtaggtcttcagttatctacttattatatagaaagaaagatatgatcaagtgttaaatgtctacattaccctcttcagatcagaagtaccattataacttttagtacatcacttcaaacaaaactcagtacactgagtactacaaatgcagtacaatatgttacgtgctacatttctccaagtaattatttatgccacgtatgatgattattttcctttcataatcaattgagtaatttgcgataaatacttaaattttatgttgtgtagcagataaatacttaagtttttgcggtaaaaataccttccgttatactcttagaacttccttaggtacctctccgttttcttctaggtaagtgtccacgtatcattattttattagtccacatcattaatttttattttacatttaaaaattcattaaacttttttttttttttttgaaatatcaacttcattaaattaatagcattctgaatacaa

SEQ ID NO: 380639 - DNA, 3778 bp, Cannabis indica
ggggtgagggtaaatctgaatggtgttcttagatggagcaatgtttgtgagggtggattttcggttcatagatcagtgtgtggttggactcgggagttatggttcattcgtgatgcagtcgctctttcaaatcaaggtgctttcgctttgaattttttttttttttttaattggtaatattgtcccctccaagggagggtgtttaccaccttatttatagacagagagtttgattgcaaaatagaatcaagaaaaggaaaaacaactaactaactactgagaaacaaaaaaaggttaggtattaatatctcccctcaaacgaaataaggagacaaccatgtgaagtttggacttaaggtagtcccatctctctgtagacaagagattttgtaagtatgtatgacacttgatcaactgatggaacaaagcgaactgctaacttttgtgccacaatttaatcacgaacaaagtgtaaatcaatctcaatgtgcttcaaatgggcatgaaaaaaagattagccgcaagagcactagcactttgattattaacccatatcacaggacaacaattcatgtggattttaagttcagataacaaagacgttatccatttgagttcaacagcagtgttagctaatgctctgaaattgctttcagtactagaacttgttgctttttagtagaccacgatattagatttcctctatccccatgtagatcgtcgatcatcaatacaactcgctcaatctgcatctgagtaactttctagaactattttaatagcaggatgaaatactaagccttctaaaatggtacctttgagatacctcagtaatcgtttgcaagcctcctaatgaaaagtaatagaggccttgattaattaacttggtttattcacaataaatgccacatcttgtcttgttagtgacaagtactgtaatgctccaattgtacttctgtacaatgtcatgcatggaaatggtttaccttcagctaatgaaagtttagtggcaggcagcactgattggattaggggagctttttgcaccttccatatgaagcttcacaagaagattagtgatgttctttgtttgagagagatacatacccgttgaatctcaaaaaattcccaccccaataagtactgtacctcacttagatctttaagtgcaaaatatatgttgagattagaagtgagcttgtttataagagtcaaatcaggtcatgttaatagtatgtcatccaaatacactagtaaaatgattagagagtttcctgaggtgtaaacaaacaatgagttatcagcttttgatgttgtgaaaccccactgaatgagacaacttttgagcttatcattccatgtctgaggttcttgtttgacgccataaatagctttaggcaaaagacacatgtgatctagtctttctgggtcaacacatgtaaatagttcagttagtgatccattgaggaatgcattgcttatatcgagttgtttgacagactacttgtgagacacaaccaaaaataaagaaatgttctgactgttactggttttagaacaggagaaaatgtctcttcataatctatccctggtgtttgtagatatcctttggccacaagtcttgacttgaatggatctagtgtaccatcaacattcaattttactttgagcacatacttgttatctatgacatgcatcccagatgtgtatggaacaaggatccaagtgccagctgatttgagagccccaaattcattcttcatggaggcaagccactaaggattctataaggcatctttgagatttttcagttcagttgggagaagagactctagcaaaggatgctttgtggccatatatgattttggcttgaatataccaccctgtgatctagttttcatctggtgtgttaaatttgtagtaacctcaagtgagctccctgtattggattgtaaagggacctatggtatggtatctgagacaattgttgtatggggtaaagttgcaacattggtaactgtatttttagcaggtaatgggatgggagatgtgtttatgggtgttgtgacattttttgttcggggtaaagttgtaacattgataattttattttgggtagggaatgggatgggagatgtgtttattagtgttgtgtttactggtattgcagggataggagcagatatatgttgttgaggtgtgctataggagtttggataggaacagattgagctgctgatggagtagcattgacttgggttgtcttagtaccattggaaatcatggcattagaagaaccaagattagtatgtggtttaaagcatgaggttgtaaagctagcagtaggaacattagtaggttgagaatgtacttgatctgtagcttttgaagagagaacaccagggtagtggccttcattattgcaataaaaatctttccttgagcattctcacacatataacccttgtgatatgatgaataccctaggaaaaggcatttttaaacttgaaattcatctcgtgagagtgataaagtctgagatgtggaaaagaagcacattaaatggtttcataatagcataatctggtaaagaaccaaacaaatactcaaagggactaatgttgtggtctgtgcaaaatgacaaggtgtgggatggtaagaataagactgttaaggaggtactttcgttggctaatggtagttttgatcaaaggagatgtgctcaagataaaacttttaattcatctttgttctctttacaagaaggtgaaaggcacgagcactgaattgcacaggttggtaatacgatcaaaattaatatcaatgcagctatctttagcaatctgaataagtatgggtacggttggatggcacgagactcttcaggcaaacttattatggctcgaacagcaagccggatgggggtggttgatcatgttctcgctgaagctattgaggttaaggaggtgttgagttggttgaaagaaacatggaagcatgatgtggtggtgaagtcgaaagttttgtcatgatccaatctatccaaagtcgttagatatgacttctattttttagttctgtattgctgagtgtcagcaaattctttctagtttgattattgtctttttaatttttatcaagcgattcactaattgtgttgttcactatttgactaaaactttacaattatatattgattgtacatatttaaattctatgattctgagtagtttacgtgatgtacttttaaatgatttgtgactttgggttaataaaattacattttttattaataataataaaaattaaaatataattatctctgaattaatacacctaacaaaaataccataattatagctacattattattattattattattattattattattattattattattattattattattttaagttgaggtattaaatcaagataatatatgtaaatagtgtggtgtgtctaataaacaaaaaaagaaatttcattttacatgcttaaaaaaatatttccttacaaaatttagactcttaattaattgatacaattgaatgctattgttttcaatttctactcaaaataccctccctttcattttccttctctctttgtctctttctctttctcttcctcactctctcttcctctttctcgcaccactgagacactcaaactcaggcaccgacaccaccaaccaccaccaatgaacctcttctcctccaccatcgaacctcctcatctacccaaaacttaatccaacaacccccaa

SEQ ID NO: 380640 - DNA, 1775 bp, Cannabis indica
accttagttttttttttttttttatgtttttgacactaaaaaaatatggaaaatttgagaggggtatttttggattttagataagtggtcatatattttcaatgatgatatgtattagtttaaaaataaaatattagggatatgtaagtatagaaaatcaaatttcccttctaaaataactaagtcattggttatgctatgaaaaatcaaatttcccttctaaaataactaagtcattggttatgctatcatatattagcgctcatttacccttttaaacgaggatataagagcattcatatataaatataggaggccagtacggaccccaatataggaatagtgcatatatatataaataggattttttggcatggttgggcaccagctgatgccagcaatttcattctggcagctttaagcgtattgttgtagtaagactatttaaaaagcttaaccaatcacaatcatgttagacagaccagactgtaaagacaaagaaagtctccactctacattaaatacagatacatatacatattcattgaccaaaattcattacttaaaggaaaaaaaagaatcaaaattgaaagcatattcagacgtagagtttgggaagatagtggacaagcaaaaaaagaaaacatagtcaagacatgtcgagctgcttttacaccagaccatgtatggcttaaaaggcaagtcaaatgagaaagttttgacttcttactaggttttttttccctttttcacttgcccaaactcatatggggttgtgtaactttgatcctcccaaagaaaatattggtatttatctgattccacagcaaattaagcattactgcaaattctattttgatcataacccaaaaatggctaaaccgctagctctttttggtgggtggattcatcttcattgaagcaacaatggctcttaataataggattagtaggagtgtctagaggagactgaataagtaacatttctttttgtaggtaagaacagtaggtttgaaaagttgtaggtgtcacgtttaactgaaatcttaaaccaaacaagaagtccacctcaagtaggttcatctctgctgtgcttattcctccaactttagcgaagtaggcattattgtaatacctattaaaaaaataaataacccgaatcaaagatatgaaaattaataatctcattctatttactagctaggttgtaataaccaaagtaacatgattaaatgtgtacataataaaacattcaatataaattaaagaaagagagattaagcaaaacagataaattgtacagctaaaatgacagctgccactcttgtaaagtaaggccagtcaaaccataagaaagagtgttcatagaagataagtgttttaatgccaatcactgagttggaaatgcaagttggcaaagaagtttattttgggcagagaacaaatggcttgattggactgcatctcattttcttttcactgccatatgcttgtatttttccactcattttagtttaaaattaattggcataccataccaggcagagacagcaagactgcatcacagaaaagttgtctaaaattaaaaaggacatttctcactctcacatgtagtaatttacgtggttgatttccaccattgatgtcattacaattatgactaatattgttgcttgaaaaaccactcgaggctagctcaagtggccatagagagtgcgtgtgtattggaggtcctgggttcgagtcccaggttatactgatgtaatatataaacg

SEQ ID NO: 380641 - DNA, 6868 bp, Cannabis indica
tttctcaaaaatagacaatattcaatgaagtctatttacaaaattttataaaaatcttttcttcaatccgtcccttgcccatttctcttataaattttttcttgtggaatccaatttccaaacaatgctcaagtgaaattaattaacttcagtgtgtggatttcttgaggtatatatatcctaatccagattggactcacaaaccccataatagggtgttaatggaagctgttatcaattgtttataagtctaacaacactagttcacactagtatatcaattagttgataagtctccacgtggcatttaaaggcctctgtggttcaccattgcttcctataatgagtatcatatgatccctttcaggtttctctgcactggtagtgtgcagtgagaagtatgatggatcgtacatcttttttcaatgttttcttaatctctcattctctctaaatattaatacatataaattgtaatccactatgtttggttgtttgtgtcagtgttttaaagaaaatggattgagtatctgatcttagctgaaatgacatgttttttgcagggatcgagattatgacagagactatgatagggagcgtggacgtgggagagaccgggacagagatagggaccgagacagagacagagacagggatcgagacagagaccgttatcatctcagagatgagaaggattacggtcgcgatagagatcgagatagggattgggaaggtagagagcgggaaagacgagacagggaccgtggtggtcgtcgtcgcagccattcaaggagccgaagcaggagtagggatcgcaaggatcgtactcgcaagagacatgctcgcaatagcattagtcctagaagacgggatggaaccgaggctactaacggcaccggggaagagccaaagaagaagaaagagaagaaggagaagaagcctaaagatgatggaacagatcatccagatcctgagattgcagaagccaatagactcagagcttcactgggtttgaagcctttgaaatagttagtaaaaacgctatagagtgctactacttgaaaacttgtttttcttttcaactctgtatatctcaatttggaaatttcaaagcctaattcacatgcttatatataattgtttctataatattttgaattgataataataagcctaaaaaacaacaacaacaacaacaacatgaacaattgttactaattatatatattcattaaactatataattgaagaattagagaaaattaataacaattttattaactaatataatgctatcaataatatctgtttttcattcatggaaggggctcaggtagtaaaacgccattgttatcgtactgaagagtacctgaaacattcaatggtttgcattttcctcccattagaatcctcttcttacacaactcaacaccaccactatctcttctacctttctctgaatcttcatacttgttgttgtttagtctcaccttccgacgactctgaaccactcccgacgataccctaaccagtttccccgatctatctctcttcgccatcaccactacaccattagcaccgcctctgttacatcgaccgctaacagtctcagtggccgaaggtagaagaagaactttcttagtcagtttaaccgacctcattttcttcgtaagcaatccggaattttcccgagaaacgaaggtgttggaatctcgatcattcttcgtagtcgtgttcttcttcttggagcggaagacatgagtgaagatggaaccaactttggtggagagaaggtttccggatttggaaaacgacgtcgtttggtggtggttggtagcagtaatgttattattattaatattattggtgtgagagtgagtggtaccaccgccatgaaaacgttttggaatgagtagtttagggatgttgactcttatactggttttactgctaggaattttgatattcatcaagtatgatgatgatgatgatgatgatgaatcctttttcttccctaagctaaaccctaagggaatcgcaccaccaccaacgctcctatgattggtagtggaggagatgttcttcactttcattttgtgtaagaggttgttgtttggcttccaagaaaaatggagagaaaatgaaaatgaaaatgaaatggaaaatggttttgggtttttagttaagtgagagagagagaagatggagtgggtgggtgagactgtgaaaactgagaagtagttttctttttatttatttattattttattatttatttttaatatatgagtaatatatatataaatatagatatataggtggattttattcacttggtgtagacaaaatagtggagaatttttagggggagagtaaaccgattcagctcttcttttttttttccctccaaattataaccttattattattatttttattattattaactctaatcttaattgttgatttgaacaattgtttagtctatgaaatgaggtggacttaaaatacggcctcgagatgttacaaatttgaaattagacattattttattagttttgaaaaaaataataatagtattttataaaaactaaccctaactcttagggcttaattgtcactttattgttgttattctacttgtaagtagtgctataattttgtgcgtgttcgactggtttagcctatattatttgtaattttcgtaattagtgctataattatgtacgtgtcatgtttaggtttgtgtcgttttttacttaaattgatttgttatttttttatacacgctcaaatttgtatttttatttttttttactattttgtttttacaattaatgagataattataaattatagttttttgtagcttaaattatttttatataattttttaatactattttacaaaacatagttaaaaataattaaaattatttaaacaagacaaacattattaaaatttaaatttttactaataaatattcatattatcattaatttagaagattttttaacatgttatactttggagctagattattcatgcttatttgtcaagttgtgtgttcatattgttttgtatcataacctgtccaagtccatatattgtgctaatgtcaaaaagttcaaataatacgaaaattacaaaataaatttaagaaagattactaaaaattactaaatctctcttaacatagatatcatattaactttatttgatttgataatttagttggaatccacatatagaaaagactctaatcatgataaaacaattcatttttattggcaaatgatgtcaattattcaagaagatgtttggttttggtttttttctatttttgtttaattagtattacatcttatttttcaaaaatattcccttttaggctttaaccgcacaaatttcctatctgtatgctaatgcatatatatgtaacttataaatcttttttttgataatattcataagtatataaatcttttaagcaaaagccgaaagctttatttggaaattacacattttatgattttttttatataatatgtgcaaaaatattttttttttaattatcattattattatgtattttctcataaataacttcaataaagttaatacttttttggaggaatttatttacgttcaaatttcagatcccttcataatgtgttctaatacaattatagtttttttggtcaaattttccaggcttttcaaataaactttttggataaaatgatctctccatattgttttatttcttcatatccatcacttttcaaccaaaaaaagaaaagaaaagagaaaaaaaaaacacacaacttgagaattcgaatttaaaatgattcatactaaaatacacaaaatttacaatgaaacccaagaaaacacattagttagaggaaatttttatttgtatgagttttaaagtatagtttgtaaaaatatgatttattatcaaaaaaaatattttatgggtatttttttataaaaaaaaataaaaatatggaaaacgatataagataattggttacccatttagttaccccaagagtacctggttactattctttggtttttcaatatttttcaactttttattgaattgttctcatgatttttttttaaaaatatatatatttctatactataaaatcctatagaaaactaccgatggtttatcaatagaaaactactgatatttatttttgcttagttttttaattgattatcaatgatttatcaatagaatatcagtgaattttcgatgattctctcttgtgtgattaattttgatattttttgctatattttgtcctgaaataaaatagtatcaatatactattaaaaatttaccaaaaattttcagtcttaaatttggtacaataatcatcaaaatagtatcaataaactattgaaaatatataaaaaattgtcatccttattgagaagatatcggtgtataatcaaaaaaatatcgataatttgttaagaaactcagtttggtgagaaaaccaaatctcattatttcaaagaaaaaactagcaaaataacatcaatagtaatacaaacaataaccacacagatctatagaaaataaacaacatactaatttaaatgtttaagaaattttgaacaatacttacccattattaaggtgaatgtgtgtgattctttttgtatgatgagtaggtgctgccatccaccgagataggtcgagaaatagggaagagagagagagagagagttgtgtgtgattaattgtgtttttgttttggctaattggtaatttatcaccctgaactttgacatgtactaaatcgtctttttttgccattaaaaattcctcctgaactattgagattattaaatttaaaattttttaatttacctaaatatctcaaagttctagacttaaaacccaactatggctctcacctttactttatgacattttcgtgtccaagattaagcttttggcaaccttttttttttttaggtaatatgcatttctttaagagccttttatgggaatattgggttaaagatatacaccttacaaatttacaaatgatatttccaataggcaattagaaaaaaacgcttggcaaaattttgaagagaatagaaggcactagtagttgttaatatagtatcactataatatattatatgtttattgatgtaattaagtatttaacctaacatattttaacttaataattattataaaatatcgttaaccattcacaaaatactacttcgtggtagtaccaagcactactattatcttataacaaaactcggcttagaaagattagaatttatcacctcattaactttccctaacttttatcttcccaccatatgactttcaagggagttgagttgtctaaatatgtgcctatatatactcatattttgttagcctaataggccaaaattttgggaccattatcctttatcataagagtggggatcttgattatgaatgtcatgaaacaaagataatgcttataacttgattgaatataaaatttgcccccttaaagaagaacaccatagtgttacaagttagctcttggtttctcaaataagtttatcttcttcttcttcttcttcttcttctttttcttttccttttttcatgcttgattttgtatgacattaaaggagttttggacataataatttgacaactcatttgggatataaattaaaaatctgaatagagctttaagtgtttgcttggaattctaagacatctaatggggtcttttattgtccctagacacaattaagacttttcctatacttaattatgcctaatgtaaaggaccaaaatttatactagtgttttttgggtccacaaaaaacattggtcttgaaaacaagccacttggaagaaatttagacacccatatgtactaatggggtttaatccacaaaaccctacccataagggatttttagctttaactttttcgatgcaacccaaaaaagcattgtaaaatctaaagcaaactaattaattaattaattaattgctatgaataataatcacaataggggtaggacaatgtcatataaaatattatattattttaatagatggtggttcttaataacataacataaaagataagagtatattctatattgacattattttaaaataataatttaaatatatttatttaataatactaattaatttttatattaatattcaattcacatgcaactactcaaaaatgttcttgtgataacaaattattaattatattatcaaacaattgtagggattgttataaatattataaaccattattttgtggatacatattaaaaatgttttgtgtccctttcaaaattttaattagcaaattaatataattgtaaattaccaaagagctaattagaagttacttgatatgggatctcatctaatctcatccaaaagcatgaaattctcttttctaaacatgtgatttgtcatcttggaaaggaacatgtccagagatgtgattcatatgtctctataacttgacatataacctaaactttcatttcatttagcttttaatttttcatgtttgagttctttattgaattcattatccttaaaactaaactacattatatatatataaatattatattagcatattgatgatgaatttgaatattcattaatgataatacttgagttctcattactagtgtacatacaagttgacaacttataagtgtgattttattctgtacttattttggatttggattctacatttttgtgttctttaattaatgtgatttttcttgattattattagattaggcttttgatataattttatt

SEQ ID NO: 380642 - DNA, 1800 bp, Cannabis indica
ataagtaataagtttcaactatacaatctaaatttttggttttttttcctcttaacatgatttttgtaacaaaaatacagtttgaagatgtgaagtacaaggtgagaaacaaacatgcatcatcatcatcaacaacatctaatccagtaaaatcagttgtatcaaaagtgtcatcacaactcaacatggatcaagataattataagcacattttgaaaggcataacaggaagtattgggcctggtgagattcttgccttaatgggcccatcaggaagtggaaaaacaaccttattgaaagtcattggaggaagattacttgaaaatgttaaaggcaaaataacttacaatgacataccctataatccagctcttaagagaaggtataacaaaaacaagttaccatctttgaaaatatatggtatttttgcaaagtttcattcttttcatttcggttacttttttgagtaggattggttttgtgacacaagacgatgtgctgtttccgcaactgacggtggaggaaactctggttttctcggcgtttttgcggttaccaagcaatatgagccagcaagagaagtatggaagagttgagatgattataaaggaactaaacctagaaaggtaggtggaagttgtatttttctaaatgatcaaatttttttggtatttttgaaaagatttttgttttggcttatttgattagatgtcgtcacacaagaataggtggagggtttgtgaaaggagtgtctggtggagaaaggaagagaactagtatagggtatgaaattcttgtggatccttcattgttgttgctcgatgagccgacttctggcctcgattccacctccgcgaatagactcctcgccatacttcgaggccttgctaaggtacttgtgttccactcaactgtttgtaacacaaatataagaactttatttattaaggaaaatcttgttgatataggtagtaccaattaatccatttaaaccctcttcaattatgtagtctcatacctacacagtctaggaatcattacacatgacattccctaggcgatatagaattgtacaactctcgatctttcctcttcggatcacagggctctgactatcacatttacaacataaattcctaatataaaaaattgtggcataagtactcaagctcctaatttctagaaatgctctactaattcatcccaacatgccataattcttattataaacaactttgcattaatcttaatattacaattttttatgggagtaaatttttcttttttattttaaaaataattatttataaattgcaggcaggaagaacaataatcacaacaattcaccaaccatcaagtagaatgtttcaaatgtttgataaacttttgcttatatcagaaggctaccctgtttactatggaaaagctacagaatcaatggattatttttcatccttaagatttgtccccgaaattccaatgaaccctgcagagttcttgcttgatttagccaccggtcaagtcaacgacatcagtgtcccatccgatttctcaactccccgaggcgcaccagagtttgagaaagccgtcatcaaagtaagagcaaaagaagaaatctttttttgggggaattttcataaataatctttcttttatgttttatttataattttacggcctaaaatttttaattacaaaatactcttgtaaagttttaaaattacaagaatatactttgttcagcaaaaagtaaaaaaaaaacaattaaaaaacaatatgaaatcaaccccacgataacta

SEQ ID NO: 380643 - DNA, 1283 bp, Cannabis indica
cataataaacacacacacacacacacatatatatatatatatatctaacaatagtacaccactttacagtacactttacttatattctagggaggaaaagaaaagaaaaagagaataaaatgaaaaaaaaaacgatgggtagtgtgtacttatttcttctctacaaaatgggtttgttattccatggtggtgttcttttttgtggtgagagttcttagactccagccttgcttgtttcttaccttgaccccttcaaccttggtgttgacgtggcaaactgttcccttgtttgacctcttccatcggctaagctgaaacaagtgtccaatccgcttccgccacctcagcgatgaggcacgtggcttcccatgctctaccacagtcttggtctccttattgcttccaaagctgtggttccaggaagacacgttacaattctctagagacacttttgacacaacagcattaccattaccattgttgctgttgttaatattggccttgttcttctcccatgacgccactccattttcttcaaacttaattgatatgaatgaatcatctgaaataccaaatcaaatcttaattacactacaattaattaatcatatattagtactgttcactatgattatgcattgaaatgacacaattttaataataataataataataataataataatatggcccgaaaaaatgggtcccttattccgagtattttatttgacaactgtggtgaacaaagtaaaaggtagctattagctaagaagcttttgttatttgttgtgtcttaaagaaaaagaaaagaaaaagagagaaaaactatgcagctttttcaacaagtttgacaaactagccccatcttttaaaggtcttggttgatctaattcactagtagttttttaatattcttttcacttttctgctgtgaaagcagttcgaaagtaaatcatgcattcaatctgaaaaaataattaaaattaaaaaccttactcttttttctctttgcatattatgtgataaataaatgttaactaattggtttcaatcactctgtttccctaattaattattataaattcttcaatgccattattttcccatgagtagtccctcaacatatcaaatcaaagtacacaattttcttagtttttcatatttgcatcataaatgccttgatgaaaattagcaaaaaaggatacatataattaaattaattgatctactgcacctataaccaagacacttgagaatctatatatatatatatatatatatat

SEQ ID NO: 380644 - DNA, 2422 bp, Cannabis indica
attttttatcatttaaatttttagtgatatacttacgtacgtagcttattattataagtattagcttttttaaatgaatttctcgatcgatagttaatcatttagtggattattaataatgggaacaaaactcgaggtgttgtcttcatgtgacgattgctatataccattttcagtcctatatatattgcattgcacaaaagagagacagtatgattgaggatatgtttctagcagcaattagtagaatatatatatagatatgatatatatttactctctctcaagaacaatattaaatttaataattctctctctctctctctgtgcaagttttttattagtctataaataaaggaaacaactttgaggctatcatggcatgattaattcttagtcctgcatagttgagatattatttataaataatatgaaaccataccatgatgattattattcattacatggtttgttgtcatacattttgaactagaaatgattttccccctcaataaaatatatataaaatatgagcaagactttgactaggtaagttaggtaaagcttcttggcattctattcaaaacctttttagatcaaatcttcattgtgattaattaggagatatattaaacagagatattgattttgtaaggctcaatagatatcacctacttaataacgtgtgcctaataaaactatattatattgctattaatttgcagttgaatatcctttcttgctaacatttattttcaatatgtttgggaaaaataacatatatttgtactggaatgatttggggagcataacttttaaatattaagctaagttattttgtaaaaatttctatggctcaatagagagcagaactaaatgctaatataaatgattataagcatttcataatataattataataaataagtgcgcatatatatatatacacacatattataagataggctttgaggctctttttaattcgttaaagtagtaaagtgttaggagaaaggctttggctggtttaggtagagccgtacatctaagaactcatcagtgctctatccacccattagacattattgatgattacaatattacatgtatatatacatatatattagaacttaaactgctagcatatgccttattattgattacatgccactctacatgtaacatatctatatatatactatatacctatatatctatttaacaatacataattatacctgctctcaccactattatatattaagagaaaagtgtatgtgagtatagtactttagcagcaaattaaatactattgtaaattataaaattagattagtatcgttcataaagctttgtgtgtaactttttattattatatatacgatgagaaactgtagcgattatttagaactgacaattaatatccgattttcattatttgattgggattaattggttataatttcttcctatatttcaaaatataatataggaaaagaaaaattaattattaggactaaattataatatgtactcaattcaatatatcatgggaactagttcttataaatatgatatattccaaacaatattatatattattataagacttaaccatggtgatgatgatgtaacacttgtgaaaattaagttaaatataaatgaaaatttgaatttatatgcatacattatatttagtgtgtattaaatttttaaacacaagcttattaaattaaaaaaaaaataggcacattttatattcatacccattataactttctttcttttcttctatagtgatggtggtctaatggagttcgatgatggtccgatgctatccattttttattttcatattttatgtttttgtacataaaaaaaatagatcaggtgaatcggactactattagactatcatcggaccatatctacatttatagatgttaaactccatattaagctcgtcaggaaggcattgggccaccatcggactccatcgaaccatatcatcgggctaccatcggaccttcgtcttcaaccattactcattttaacaacaggatgacatcggaccactatcagactaccatcgggcctgacagatctggttattttcgaccctaaatccaatatttactcacatataacaaacatttatcatacaatttattcctttgacaacatttttgatggtgaagccgtagttgatggagaactagttgggtccgcgataatcattgggtccatgggtctgtggtcatggtggttgtagagagaagggaccaaggttgtaggtggtgggttgtgtgcgtgtttacaaagcagagagagagggttgttcaaatgagaggggtagaatgagattttaggaaaaaatgatatattctaccaatattaaataatttaggtttagatttttttt

SEQ ID NO: 380645 - DNA, 2736 bp, Cannabis indica
tattttattacctccaactaaactcggctaaatgatttcattgagttagtcttatactattagatctctatttatttttaatatggaaattaattaaattacattataattagataacatatatgaggagaaattaaaatatgtatgtatactttattcaaagaaattggtaagggcaattgtataattagtcattacactctattttggatataaactacatattagttttaaatactttttttactaaaataattagtaattacatagaaaaataaatttttaataatgaataattaaaataaaatatttttaataattacacttatcaaatagtgtaattatttctatttacactcaaatccagttccgaatgggctttccaaccacatttttttttcatgtttagtgagttaaaacttaaatgttaattaaattgggggaggagatgggtaaatttgaactagattatataattatagttaataaatatttattaaagctaaaaaaaaatatggttgcatatgatctggacaaaataggatacattaaagaaattaagttcttaatatatgcttgtcacatagcaaaaaattgtcggcaaaatcagtttaaaactcgttgaaaaacgtgataacagttgaaatattattaataataattattattattaggtaaactcttcaatatgattatttttttattacatgacaccatacatatataaatttatataaattgtactttaatattatgatgcaatggtggcaagcatcaattaaattgcgtgtctcccactgataccaatttaattggattctagctaagatacttttgtattatgtattatcatttttttcagttattatacaataattctcatactttatttttcatttttcaaacatttcaaaattatttgatttggttataagtcttgtcttttaaaaataaacagtagaaaggggttttgttttttatatttctagattgaatggttcttagagatttgaatgtctttttattgggtggatcaattcactgtcaaaggacaaatgatgttattatttgtgattatttgaagtgtcacattatatgtactatctttccttttctttgttactttgtattttttttgatttaattccttttgaatgatatgtatattgtcatttcattttctccataattgaatcactatcaatttgattaactttagtaatgtctttataattttgttctttcttaattgtaattatagatactaagtagagcattgggaggaaaatcaggccgttcaatgacaggttgggatataggaatcagaaccgttcatttctcatcttcatcatcatcatcaaagctttttcaatctctcaaaacaccacccttactctccatctacgaaatccatcgcgatgaggtacaaaaacaatgtctctttgtgttattatctgttttttatttctttttattatcccgaaaacttaggtatgaaaaaaaaaatcttaggtatgggaacttcctccgaaggctgaactcattgcgtggtctgataagactggagtggagatgtttcgatatggtgatcacatgatgggcatccaaggccaccccgaatacaccaaagacatacttcttcacctaatcgatcgccttgttaagctcgatttcattgaggtatgtccaaatgctcagtttaatcctaaccctaattgtcgattatgtgtatttttgctaatatttttcgatttttgtaggattctgaatctgaggaattgaaggccaagttggatgaacacgagccggatagggaggcgttgaggagattgtgtactagctttctcaagggtggattatgatctataaagttattagtttggagatgaaaccccctaaaagaaaaaaaaaagggcaatgtggggggctaaaataataaaagaaaatgtaaatattgagtggactgaatagaaagtttagaagaaaagtgtggtgttaggcaggcactagctaggcaagcaccaatttagttatggtttattgtcaaagcaaactacatttactaatgaaattttaagctttgccaaagtactatttgtttttatgcactataactagaccaattaaggaaccaactttttattaattgatcttgatatccctcattgaaaggaaacattttaatgaagttttatgtgtaattactattattctaacattattgactcttcatgccaaactacgtgcaaatgtaagtataaagtataataccaaccaccaaataatatataagagataattacattaggtattatttttaaaaaaaaatcaattttatgttttaattttttttttttatatttttacaatttttttataaaaacaatacgtaaataacaaaaaaattatataaaagtaacataaaaatatcatcaaaataacaacaaaaaataacatacaaatgacaaaaaatcaataacaaattaataagagtacaacataaaaagaacctattttctgtaaataaaatcaaaaaaatcgtaaaaatatttaaaattttatgaaaccgtatttttttaattttattgttgttattgtatatttgtaaaataatccctatttataaagggaaatttacatggtatactaacttttgctatttttttacaaaaatactgtcaggcggtattttttacttttttactgtgttttttaataagtttcatactgcagtat

SEQ ID NO: 380646 - DNA, 4625 bp, Cannabis indica
aaaaaaaaaaaaaatcaatagtaagatagaaagatcaaattaacctaaaagttatatttggaaaatgttattaacaagtagtatatcttaataactacaatttaattgtgtaaaaagctcaaagcaaaattactaattatttaaaaaaaaaaataggtttcttatattattttagtttcaaacacagcagtgtgattaggctattaggaggagcaggagaggaggatgatgcaatgacgaggctgctcagctcctaatcctaaaacctctctttactcaatcctcattcacactcacatgctcttcctttactcatacctatagcaatgctctcacttcgatccattcattccaaccattactactccatccccgccaccactcacccacccacccttttcaaccatcccaaaaccctaaaacccacattcccaaaatccaatcccaaccctaaaccctcctccatacgctccgttcttcaatggaataggaagccccagttggccggcgacacaccccgagtcgtcgtcatcacctctggaaaaggcggcgttggcaagaccaccaccaccgccaatgtgggtctctccctcgcccgacttggcttctccgtagttgccatagacgccgatgttggcctccgcaacctcgatctcctcctcggactcgagaatcgcgtcaattacaccgtcgttgaggttctcaatggcgattgtaggttggaccaggctctggtgagggataagcggtggtccaacttcgagttgctttgcatttcgaagccgaggtcgaaattgccaatggggtttagtgggaaagctttggtttggcttgttgacgcattgaaatcacgccaagaaggttgcccagatttcattatcatcgattgcccggcaggcatcgacgctggctttattacggccattacaccggcgaacgaggcgattctagtgacaacgccggatattacgagcttgagggatgctgatagggtgacggggctgttagagtgtgatggaataagggatatcaagatgatggtgaatcgggttcggactgatatgatcaaaggtgaggatatgatgtcagtgttggatgtacaagaaatgttgggcttggctttactgggagtgattccggaggattcagaagtaatcaggagcaccaatagagggtaccctttggttttgaataagccacccacattggctggcttggctttcgagcaagcagcttggagactggttgagcaagatagtatgaaggctgtcatggttgaagaagagcccaagaagcgtggctttttctccttttttgggggttagttaatagtaattcaacacttgtggagtttagtagttaaaaaaagaaaaagttgcaagatttttctttgtgtgtgtgtacaattttgttttccttttttagtttcagaatggaggaatttaatgtattcttattaagctttgtggttttatagttagctgtgtacagtcaggtgataagagtttgccttaattctatgattttgtttctaatttgttttttagttgtagtttcaagatcgatgtttgtggctcatatattggaaacaatcaaggctatcttggttgctgtatttatcttttgaggaaaaaaagaatgaaaggatttgctatgtctctttatttgtttgaccaagaaaaagatcgtcacgatactatactatctatgcagcatatatcatcaaattttttatgtatgagaaacaaataatacatgatgttgccaagcatggatcagtgtaatttaatgatgaagtaccggatactagctagttcagccaaggtgaagtttttcattcctccaactatttccttagccactttctttactttattcttcttccctaatttcatagctattgtttcaatccacgaaatgggagtaacttgatcacaaaaggagtttgccacttgccagccacaggcatgggaaacttccagtttggtaatgtaatggtaattttcaaactgaaaatatcacaagcccctaatgttaagagtcttcttgtagtctcttttgcagtttcttgagcagttttggtcccacggtggtagtatcacctgttaaaataaacaagttaatgaatatttccttttgttaactaagatatacattgaatgagaatcccatttcatatattaatacccgatccaagtgttaaaataacaatctctcgatggggatcctcgcatatttgaagcactagcttattcaccacatcctcctgcagaggccaccaaaccatattgtattattacaccaattactaacacattgctttttcagacgttgctatcatgttcccatactagttccaaatttattttctctcttcttaaaattctcaggattaaagggaaagcccaataacaaattacagagtttattgttattacaagcgaaggaatgtattccgatggtggaccaattatcaaagcagataaatcctttccattaacattccaattttgtgtttctcgagcagcataaacctaaatttataagccaacagtcaattatctctagcaagaaagttacgctaaacttatgttacaagtacaagataaatgtaccttagttataataacttgatctgcatcactaagggcaacggcaaagtcatttttcagtgctgctagacgactgcagaggttatgatgaccaatgtgaaaatagagagctaagcaactatgcacctcaataaagtataatagttattacctaaaagaatgaggctgaaacactaccaacagagccttcgaatggaacctctgccgtgcagcttgaagaactgcacgaatctctgtgggatgatgagcataatcatcaaacacatggcatccatggatacttccaatcatctcaaaacgtcttgaaaggcctctaaattttttcaagtgcaacctcaaatgatctactgtatcataaatctggctttggtttgtaacttttgcagctactgtagcaataacctgttatgtaaggttgtatcgaagagaaatgacagatcagagagttagcaaacagatgatcattacatcttaagctctccattccgaagaataaaatcttgagtatttaatcaaacatagattttacaaactcaatattataaaatgccaaagtattcctgaggttatttaccaacaaaagggttacaaatcactcaccgctaaggaattgaggatgttatgaatccctgaaatctgtaggctgatgtctgccactggacatccccaatgacactgcaagaattcaacctttttcttacactaaagcttgaaaacaaaatgcaagtatgcatctagtattttcaagaaaaaaatagaagcacacaatggagatttccaattgacttttttttttccatcagtgactagctgtgcataacaaattattaaataggcacgagtccatcagctcaaagctttaaaattttcatttttatgattactgaaaacaaaacaaagaaaagccaaagaaccttgaaatgggaacaaggaaactaatatacagtgctcgctctgaatggtaaacccatcataacttgatctgccacatttacatgaaagagagtatctttctgtgttcattttgagaaaatcaatttcatattttaaaagaaaaatgatagccttcaagtattgttatggttgttttccaatgttgtttagcatgcatctttgaccttcggaacttgataaattcttcaaacaagaatagtaaaacatagtttattaaaaaagtcttcaaacaagaatcgtgaaataccactgtataatcaacaccacccttagagttttgagtaattgatgatgcctgccagtcattagaacttgatattccatatgtggttatcttatagttatcagcacattgttctgagcttgaaattggcattacactccttgtaccatctccaattgtctgttcacagtggcacagcaaggattttgcaccttcactgtagtttccttcaaaagaaaattggtgattttaacagcaaaatgaattgaacttaactaagacatgcaacccaaatacatagcatgtatcaatatcttctggtgctggtgctagctgagaccatgtccaaagtatatagtgacatacctatccccacataaaatgagatgtccacccttccttattcgatttatgaatttcctaaaggtggttttaactgcttcctgattgatagtaaagaatgattttagatgttgatagtgggaaatatataggtgacgtttggtaacacttttttaattagttttttgtttttaaaagtagagaagtgaaaatatttttcaaaaacatgttctataaaactgtttttacttctcaattttataattagaaatcaaaattttaaaaacaaaaaaaaaatcacttttaatatttttttaacagtttttttttttaatcaatcttttggattacaaccagacccggacctaaatcccctcctcacggccttagcgctgaacccggcttctgccccgaacccgaatccaatcccggatcttgacccgagttaaacaaaatcaaaaaataaaaataaaaatgaactttacagaacacac

SEQ ID NO: 380647 - DNA, 3250 bp, Cannabis indica
tatatatatataaaataaataaagagtgaaaatccttaatttttttattcttctttttcaggtcattgagctctcgaaaatattcaaagtagagatacacttaacaagttcagagaaataacgaagtcatttgggaatcaagaaatggattctgaaaaattagaacagttgaaaatgactaaagcaggtttgagtttatttcatatttcataagcataaaattaatctcatgcataaattaataaattaaatactatatattattttgctattttgtttgaacaacataatttatgattttgtctacaatgaaattcttcattaattttacaatatttcataattaataatatgtgcacaaaaaatatgcataaaaaattacaattttgctaccgtagtttatttaactacgatattcatcttaattagttgtgattgactgaaaaatattatcacgtcattgaatgtaatattttgatgcatgtttcaagaaattattaattttttttattaatctgattgaatttgttgtgtataattttagagattgaaaagaaagtgacaacaatcttgaggctactcaagaatgaagggcaaggaaagagaaagaaagccaaaaaagagacagaactacttggattggttgagaatttttacaaggattaccaatcactctatgaattgtatgataatcttattatatcacaaccaagaacaagagtaattcatggaagaaaaaaacacaaggaatgttcttctaattctagctcagattccgagtactattcgtctgaggaaatccacacaaacaaaggcgaaaaatttgtatttgaagctgtgaatcttgaagttcttgagatgaagaacaaattggcttcattgagtgaagaaaatgacaatttgagatcggaatgtgaagctaatttgactaagttacaaaaaatcgaggtcgagttggatgagaaagacagagaaattttagagcaaattaagtctaatgaagagttgagattggaattggataataaagaaggcgaaaactctcttctcatgaggaaaatcaaggagaatgaggagagtttcgagttgaaaatcgaagagatgagggcgcagattaattgtttgagttctcaaaaaggtgaattggaagaaattttagtatgtgaaagagaaaaaggtgtagctcaagttaaggacttagtgaaacagatcaattttatgaagaatgaagttgagtcaattagaggtgaagttttggataaaatggttaagattgagtctttgaatgaagagttattggctagaaaggtgttagttgagaagaaaatggttgaagatcaaaagggtcaagatgatcaagtcaatgagagtgagcaagagaaaaaacagttggattacttgaagagcaagaaagaagaattggagtttcaacaagaggtaaaagaacactccaaaagtaataataagtcaatgaagggtttagctttgaataacaaggaaaataagcaaaaccctcaaattgtagcgaaaaagatggaagatttggcagagaaatttagggatggtttcgaaaacaagtttcgattacttagtaggagaatcttgataacagaacaattgaacactgagaacaaagaaagctacatgaagatgaaagagaagtatgagaaagaaaataaagcattggaagaaagattgcagcttatgaaaatgggcaaagaaatagtaatattaatatcaaagagaaagagattataacaacattagtagagtgtgcaatgagtaatttggagtcaattgttaggaattttgaggataaaaatgagaactttttggtccatatttcaaaagtgtcaagtgaggttaaatttgcaagtggtgaaatgagaaggctaaagcataatgtggattcattggtgaaaaagttagatggtaaagaagaagaggaggttttgttgagagacaaggtgtggaatttagaagctaaagtgagcaaagaaggaggtgaaaagttgaacttgatgcaagaaattgaccaacttgagaaaaaagttgggaaatatgagaagaaaattagagagaaagaagagaggcttttgtgtcttggtgatgagaagagagaagctataagacaactatgtatattggttgaatatcatcaaactcgtttcaacaatctcaaacaactcctctcaatatcgagtttaaattgtatgaagactactgctagtgatggactcagaaaatctttcaaagtagctcattgtgcataagaagaaattagagtgttttattactatttttctaaaaaaaaattacattaacaactactatttattagagctagttaccattcataaccaagttttgtggttaatgtatttagttactaaaaaaaatgttaaatatttttattgccggatgttatttgaattgattatataacttgttgtaatttcacagttttgagttgattggctgccaatcaaaaaagaatataatacatttttatacaataatcagattttcatcgagacataatcacaattagttctattgcttagagtgttattattgctttatcttctatagtagttatttagttatataattgttagagagtcccacattgctaatgtatggaaagataatagaatatataagagtaatgggctactcctcccattgccaattggttttgggatggaatctcatttaccttatgtcctcaaattctaacatttagaaatgtatattagccctttcattgctagttttatatattgaatttgtatgtatatggtgaatcgaactgtattaatatgtaaattttacaatttgttaatgaaatacttttgcatatcctattcctattagtattgtaaattcgtgcgtatcgtgccggtctgattcataattttttgtgcttctcaaaatatggattgtgtcgtgtcgtgttactgtttttacgaggtaggccaaacacggcccgcaagcttgatattttttgtaccatattcgaatttatgtcgtgttttgctcatgcgtgtcgacctatttttcttagacagaccaacacattttcatatttgggctcgaattcatattttacttactaaactttatgcatattttatagttttaattatatttatataatttttaaataatattttacaaacactcatataaaaaaataattaaaattattatagtttgaatattaacttataaaatctcaaatttttta

SEQ ID NO: 380648 - DNA, 1624 bp, Cannabis indica
tctctttctccctttctctctctttcttatgtggttagatgtcatacaaaaccaaaccaaccccaagtacggagaaaagggataccttttaatttgacagtaaggaagagtaaaggctaaaagaagggtctgtttctgccacagccaagaaagttatggactttctgatcccctctctctctctcttcccccgtttttatttttttaatttcttttgcctctgggatctgagcaaagacatggaaaacaattattaaattatttcattggagttaataaataccattaataaaaagcagaagaaaactataataatattgaaataagtattcaaagtttggagctgaccttgctaaggacccactgagaaaaaatccataagagtcaaatatgttgtttttatattatacttttctctctttttatattaatgatcgaatttcttctactaagcctagatttaatcgaacccagatgagattctctctctttccatgcacaaaaattctcaaatttttataaattataatggtaatggtaagagcctcattgacaaaataccagagagtgtaatatttgagaaagaaaatcacagtcagaatggggacccacaaccgtcagtaactcggttcgggtactccgcccagctgggacttcactcgccacgcgcgcggttgggcttagctctttgctgtcaattctgccgtttcttattcaaattacgaagataataattggtgtattactgtatttgactgaggcattagccaataagatggagaacgggattatattgcaagggtatttatgtaatttcaaaagaatcagaacgaagtagataactacgaactattccagctagttaaggaaatttcatcgtcattcccagttttgactttccaaaaactttcatttaccttttatatattttcaggacaaaattgctttttttttctttttttttacgataaattgtttctcattattacatttgctaagttcattttttttttcatttttattttagattttatacttattttagtctcgtattttgtcttattattattttttgcttcatatttaacaaatttaatttttgaaatctgtattttatcaaaagattcgaatggatacctatgaacttaatttaaattaaaattaaaataaatttctatataaataacatactttttcttttattaacaaacaaaaatgtgtgttaaaaaaaacaaataaaaatgttaaaatgattggattttggtggggaaaagaaaaaatatatattggaaaaaacaatcaatttctcgagtttggtatagaaagaattgtatgaaaaaaaaaatcaaacaaaaattttattacatgaattttttttacttttctcacactttattttcttacatttttcttatatttttctataacaatcaaaattcaatttttaaacataatcttaagataataatccaaaaaattactctttacatcaccaccttgtcaagataagttttaaagagaaagtaatttcaaaatttaaaaactctgtttatacatatatttaagttgaggaaattacattttatactttttttatattgtctttttttatttttactttttt

SEQ ID NO: 380649 - DNA, 3297 bp, Cannabis indica
  modified_base (552)..(552): a, c, t, g, unknown or other
gcagacgaaggagaactggtgctcccatagacatggtcaaaagtaaacgaatgcgtaccaatctgtacctgcatcgtttggaacatgaaaacctggataaaagcccacttgtattgtcggggtcgaaggattggttttttactcatatgcatgcacatattgacattactgtgctgtataagctcactccttttacgttttttacgaaagaaaaaaaatatatatttttgattatagaatgtttaacaatacgagttttgtaaaatcagtgctcatgaatttaaagaacttattgataatttgatacgacaaaaatagcggacaaacattccgtatttcttaacagcaaaacaggaagaagaaaacagaaattcttgtttccattggaagcacataactttcacacatattactactatacccccagtagaatttacattgcgaacaaatccactatactatatgactctgaacattagaacaaaattaggctaatttactccctttaaatcggaaatatggaaagtaaaaaaaaaaaaaacgaaaaagaanaaagaaaaagaaaatctgaattttcggtggctaactgtacccttaggtaaagacatgatatttcttttcctaagtcatgaaaagaacaaaaatctggttgactgtcaaaatcttaacttaactggattcttcgtgacctcccaaattagaagttttcttcctacaagattatgatcaacctaagcactactcaatccattatcccgtatgactcgtttgactccgatattaatgccactcaattacataattatgcccaattacgaaaatttctggtgaaagctgagttccagcgaaaatcagattgtgacaccgtattagtctcaaaaagttaatccagaaccagtaatcaaattcggatctagatctttccaaatcattttgaacaaaactataaaacaaaagaagaaatgagaatgaattacagagattgctccgttgaaaagctaaacaactttaaggagtagccaatgtgtatgtagctttcgacattggaaatgaaaggattgatgagtattgcaagtaaggtgagggagagttcacctgaggcttcccagagacgacagtgacgcagtctttacaaccttgaagcttctcgtcaccgataagcggtctgatgtgaacagcaaccttcacacaacaatcttctcctgcttccatagcaagtagagaaaagaatgacgagaacaattttccagatttgaaagaaattaaaacgagagaaagtgaaaaaaaaatgatcagagtgaatgaatatgaatgtgtgaagtattgttatttgaaggaaaggatcaactttctcggagaaccgttctcatttggatgattctccgagacaactgacaaggaatgtgatacagcaacgagatatagacaaaagaaacaaaagaggagataagtcgtatgaaacttttgatgaccaatgtttagagagagaaagtaaatagtaagaggaaccgaagagagagaaagggtagtttgggcaagtagtattagtagtagtagacgggaaggaacaacagctactacatcatcactactagttactactatattagtatacactactactccaaggcaggtcggttgtcgtttgcgtctactttctttttttttttggaccaatttgcccctctattttctcaacggtcttctaccgtcattagtttttctctctcttccccgctgtactactcttgtaattaccttcttaccctcaccttgtttatttaataaaatacaataatactacactacaattcggttatgacgtatcggcaacgcagcatcgctgctaaatgctaatgatgtttactaccactactactagtaccgtatttgtggtaatccaaaagtggtgttcaaacacctacaccacgtgattctccaatagctgcaaattattataaaactaatattcacaaatcaattttccttggttgatctttttttcctcttcttttgttaatatcaaaatactgtgtgtgttgccctgttatcgcatgtaacagtaattaactttgaaattttagtgtagtttgaagcacgatggggggtggtcagtgtgcttaagttatgtacagcaccattaattcatgatcattttaagttggtagtagttcgctattgcttgcatataatgcacttataaaaaggcatgtgcctataataatgtgaaacaatcctgtaatttaaaaattcaacccccacaaattatataatggattgggttttatttttttcttcttttccaaaaatagttgtaagacttttttttctttttgattaacgatatttgtaagacttaaaaacgaggatattaaatgctacttattctgattctttaattgatagtaaaggtttgagagagagaagtgtaaagggatgagaaggtaaagactaaagagagtcccacacacgcacaattagtcgacatagccagctggtggtatcccacatcacatggcctttatataactaagtggaccccactttcaaagcaggggaggagggtgagtcagtctctcacacttacagtgagatgagattaatggtcccagaattatgtaatgtgccaaaaggagacaaaagagttgagatttgagattttaagctgctttagaaggccgtcatatgctgccttgtgtgagagagtaggactttcttaaacatacacaaacagctcaccaattcatatatttccctataaaaaaaaaaaatcaacacctacctttacgttttagtccccacaccatccctacaatttttttttttgtgaggacaccatccctacaattaattaggagagaagagatgtgaaagtattatgattatccatttcattttattatatttatgtttccaaaaggaatttttctataattaactgaaaagacaaaaatattacaaaatacgtgtgcagtttttttttattaaatatttttacggacgagtaaggttttttttttttttttttacaacaatagaaacttttgtttttatacgttgtttttaagaataattacataaagtaccattttttgtaaaatatttatatttttacgttcaaagaatgtttttttacatttttacggtttttcaaaaaataacacgaaaacaacataaaatcaataagaaaacaacataaaagtaacatcaaaataacatcaaaataacaacaaaaaaacaacaaaaaataacatacatataacaaaaaattaacaataaatgaataaatgaataaaa

SEQ ID NO: 380650 - DNA, 3967 bp, Cannabis indica
ctcacctctttacagcctttggtcatagcattagaagcctaagacttggcattcttctcagcaaaggcaacgaggtcaaggaccaccacctttggggcgtccaagggggcaacaacaagattcctctcagtggtaacttggggagctttggtgctcagaacaatgctctttggcaaagtatcatccatcttcaaacatttggttagagacttttggctggaggcataacccgacctcttcttaagagtacgtaataccctctacgacatatctgcataaaaagaaagaatgtttgttaggaaacataatcaagcaaggaaaacatggccaagtaaaaaaaataaaatagtctatcctggacgtgaacgagagcaccctcgcgaacaagcaatgaaggagcattatcatcagaagagtcctttcctcttcctcaaccacaacatcctttccctttccttccacctggatggaaggacgagcaacttctttaggatcatctcatatcttaataggtcgctcaatagatacttggtcaccttgggcagccttccttttcttcttgttcttgggagcttcctgctcgggcgtgaccctatcgatcacttgctctgcctcatagactttgatagagggataaagcccgcacttaataaaattggcctcagtggccaagagtgaaatgtttcgagcctctttagaaagttgaagtattttttgagctctcatcctaagtttcaagatgaaaggaggtcggcagtaagaaggaatgtgatgaaagctagtacagttggtccctatgtcctttaaaaagtaatagtcctctatatatccaccagtttttggaaacatccatgtccataatgccagacaaccacttttcttcaatctcagagaagtaaaaaaatacccaagtcgattttgcttagggctgcacttcaagtcgaacaaccaattggtgtcatgggtagacggctgaccccatccttgcaaaacgtataacacgactacggcaaacatgtactttatacccttaagagtgagctgggttggacagatgtagtaatagtttactatttctttaaagtaaggatgtaaaggtagcataacaccctgcttgccatgaggtcccaacaactcaaaaatccacctctaggatttgtcgccagctgtcagggactaggaagaaaggcctgaactttcttaagaagaccttccttgtaaagattagacaatctcttgaaagtaaggacagatggtggtgagatccattaagcacccttcggacctcggttgtttataggtcgagccttgatatattcctctttgacatagtcccaacaagctaccaggacttcaacgtcctcaaagacaggttctctattctcattgaaattgccaaagggaagtacccaaacttcctttttttcctcttctccttctccctcagtcttgggaggagtagcaagacggacctggccctggtcctccacttattggacctcaatgtccccatcaataatttctccttcctcggttagaagtctagctcgttccacactagctatagtaaatatctaagaaaagtgtgggtcagtttcagaagctttcctcatgatctacattgtctttgtcatcattatatgcttggacagaggctttaattcagtagtgtgtcttgcaatagtcacgacaaatttagcaacatcaactcccttagcagatagagctggatgagctttgagcaatgtttcagcaaccccgtgttggaccttatacattcaagatgcaggaagatagcccctctaatccttctttaactccctaatgaaacgtccatacccttctccatgtatttggtcggggtactagtgatgttgcaggtcgggctgtagagactctatgtgttcactactcacttccccatccttacagatagagtttgaaagatggtcattggacgaagatgaacctggacggtgttgagggtgatcttcataacaaagctggagtagatcttggtcgatatggtgcttgcctcctcagaaatcactggggttcatctactaaaagatgggagacaagaagagtcttggacggatggaaagttgacaaacagatttaatatgctaaccaagccaattaaagacaaaaagaagggatttcattcaagaatagaattcccaaactagaagttcaaaatctcaaaggatatctagaaatctttagaatcccacgaatgggtgagtatgaatgattttaggtcaaaaatgatatgcaattagagaatcaaaaggcctaaacaaatgctagttaaagttacaagccttgatgtcatctattctatgttcagttcaaaaacagataattttgcatcaagaaaatcaagaaataatgcatacattcaataaatattgcataaagtaaagggagaaataacttacccactattcgaagccttctagattttctcggagggtattggggatggactttccaatagcttttctttgaagatttgagagtaaattagaggaaatttttactctggttctctaaaaatgaaaatggctaacactactacaaaaatgaccttttacttcagtttttaagtgacatataaagaatttgcgtcggtttgtgtaactgacgctataaccgtagacacaaatagtcttattttttgctatacttagtaacagatgctaaatgatttttgcttcaactcataaccgaaacaaatagtaaagtaatgacgtggtggtagtttttactatccaaagattaaggaaaaatttgaggaattcaaattattggataaggtgaaggaatcccctttcaaacaattcttttagagacaaccattacaattttctggggcattgatccatcagttattgctgcacaagataaaatccgagaaggaagataaggtccacttttatgttgtgaagaagagatgaggattcacccaaattgaatatgctttggtgacggggttgaacttgttacccaaacctactaaaaaagaaattgaagagaaaggaaattcaaaccaattgattatggagtacttcaatggtaatctatccatcagctttggccaactgtgtagagattttgagagtttcacaaaacctgatgatgtttacaagttagggatggccttatttgttatgggcacactcactagtaaggaggagaagactatcgttccctcttttgtgataagaatgtttgacaaccttgaatttttctatgactatttatggagaaagatttcgttcaacaagttaattgaaacttgcaacaaagactttatataggtgaagaattgaatgcataagagggttgagaaagaagcttattagaaggaggcgaagtactcatcatatggctatactgcagctttacaatgttgggcatatgaggcaatcttggagctgggtaatgaatatccagtgaggatgtcacatcactttctatgaatgatcaactgggagggtaaggacagggcaacgctcgaaaaggatgaatttagattatttgctagaaatgtatgttttttacacttttcatttagtcatatttatttcattttaatttccatctaatatgatatttgtttctttatttagttgacaatgtactccatgttatgttcccaacctaatgaggaagagtttgtgagcactgtcaccggcagtaagcggcctttatttgttgacatggaggaactagtgttgagtgacgatgggcaatgaactgaggatgctctacgtagacaggcccagaagtgtaacaccctaactagcataggcgtattacgtgatttttaaacgtactgtgtagctcgttgctaatcaacgaggtttatggaaatcgtgattaattaaaatttttctttttaattaaacttataaaatatttatacaaaattactcgggatcccgattacaaaacattttac

SEQ ID NO: 380651 - DNA, 2821 bp, Cannabis indica
acacacacacacacacaaacactcacacacatcctcgtattgatatttggtatataatttctccatatgttaacaaaaaaattcattgatcacgccagcttcatcttcaagaaggtggcctacatgctgatattaatggtgacggagtcctagatcatgtacaggtgcaaactcttctttctctgctcttttttttggactgcaatatgtcttacgaccattgacacattgaatcactgcttcgattggttttctgaatccaaccaattcatgtgtgtgggtggatattattttgctaggaaaggttacactctaatcgcaaaagttaaaaagttattgatgtctcattattgcacgactgatttggcataaagaacaattatttagcatatcataaagttgtgtagatgagaaaacataaaacgtggataagattagataattcaattttagatttctttctggtcctcaactctttattcccctctctttgcccttatcttgctatgtattggtggtgtcttaattcttcttaagattctcaaattgtgaaattattctttatatttagagtccaagtttatttatgattttgtcccgtctgctgaatatatttctagtttgagttgggttattagttctaactcacgggttaacatttactgtgatataaataggaaggtaatcttttatgaaagtagtcttttggtgagtagcaataaatttttgagttacgactcacaagggagagtgacaaaacttttatgccccatgagagtaaaagatattttctgagccatgttattattaatatttatttttatttgacttcacaggctgtgggaggaaatggggcagagcagacagttgttagtggatctatggaagtgcttcggccttgttgggctgttgcaacctctggtgtaccagtgcgagaacagctttttaatgcctctatatgtcatcattctccttttaacttattccagcatgcggaatttagtaggcacattggtcgaaatcaagatttagcctctttggaggtagcaacacccattctcataccaagagatgatggccataggcatcgcaagggaagtcatggtgatgttgtatttttgacaaatcgaggagaggtatgtgcttgtctttcgttaccttacatatgagcttcctagttagttatggttcgccgtttgtgtatagaggtcacttttttgtttggatggcttgtttagtaattgttgtgccttttctcaggtaacatcatacgccccaggtttgcacggacatggtgctgattggcagtggcacctttcaacagctgctacttggtcaaatcttccatctccctccgggatgatggaagctggtacagtcatcccaacgcttaaagcattttccttgcgtgttcatgataatagacaagttatccttgcaggaggagaacaagaggctgtagtcatttctcctggaggaagtattttagcatcgatagacctcccggcaccccctacacatgcaattgtctgcgacgacttctcaaatgatgggctgaccgaccttattctagtgacctccaccggagtttatggttttgtccagaccaggcaaccaggcgctctcttcttcagcacactggttggttgtcttatacttgtaatgggtgtcatatttgttacccagcacctcaactccgggaaggggaaacctcgggcttcatcaggctctcggtgaataccaaacactctaaactaggatataaactaatgaaactgcctgttcgaaggaagcaatcgtgatgatggcacagaaagtcggaaagattaaaagaaagtttatggaaaatgatatatttaaaagaagaaaaaaacttgagaaggactaactttccttgttttgagcttgtccatcctgattctgatacagttctccactacaactacaagagcttctctgcttgtaaaaattaactaatgtaaaccttgaaagcaaaggcttcttccaaactcacatctgcctgcatcttctgaagaaattttgggttacaatttatactgtttttttgtttcttctttttaatacaatggactgcctttaagctaacttttgttgttgttgatatgttgtggtttagtttgaactagttaaggtcattgatagagccattgctgtagagttgtccttctaactaccaccaactgtttcttacccttccaatcacatgggtggttaactttaatgaacgtacaacatactgttgtccacttcatgttaaacacaacatttctaatctttagaggcttcattcaacactcaatagtcaatatgattccctttctctcttatgtggccctcgacttttgtcattttgcagaattgtttggtagtggttcctcctcactcaccctacagttagttgagctagacagttttgagttttatggactcttctgttcgtaatagaatcactgttacagttctattatttgatttgattttgaatattttgtaatgtctctttaatgtaatcacttttgtaccccttatataatttagaacagtagagaataatggaaataagtggtcgaaaatgagtagaaaattgtgcaagaaaataaaattgaaattttaaatctaaattcaactatgttttgatcagattttagaaaagtcaaaatataaaagttctagatctctcttttaacttttcgaaacatcttgaatcgtctaattccgagtaatatcgagagagttatggctatcagtcgtcgcagtaggaaatttctaaaaaaaaaagataaaaagatagcgagaaaaa

SEQ ID NO: 380652 - DNA, 1215 bp, Cannabis indica
atatatatatctaaggaccattgtatggtatgtattgatgaaattgggctaatttacatttattttgaaggcattaataataataataataataataataataatgagatccgacatgaatgtaagtgtgtcacctcattaataatgatttaaaaaaacaaattacagatatatattataatttattagtattttttttaacaatagtatagtttctataacccaaaattaaattctagtgtcccaaaacatcataaaattgtgttgttatcaaattctaccactttacttgtatcttaagcaaccaaaagtattctctcatgcctgaaaaaaatgtcacatatattaattaatgcaacgcattgaaagttgttacctttcgatttcttaatttttttggtttggttgttttgtatttgtcaattttttattaaatgataaattcatttaccttttttactctaatgtatcattagaaaattagttagttaactaattatattgtttgattaacatttggaatataagtacttaattattaaataattagtatttttacttctttaaatatattttacactatcaaattgtgtctatatccgatataacagaactagaccataatattaggaggagctaagtgcctattttttatgttcattagagggtgaaagaatttagtacatcaatatatatcaatattaatttttataattatatagtattaaaaaaatttaaatgcctattgggctacttcttaagttctcataatggtaaatttctaagagaaaacaaagatgtagccaatttttgtacagaaaaaaagagaaatcccaacattttagtccatgaattttttttatctcaattttattatttgctatccctcaaaaaaaattgatttaaatgttcatagatttttgttcaagatattgaagagtcaccaaaaagatgtagacaccaagttctctcaaatggccatacgatgcacctagtgcatctaaggtactaggtgcatcgtataaagaaggggactctctagctcccttcctcccgataacatttttagggcaaaggaaagaagggaatgatattgtttataaagaagtaccacattttaggggttcaaatttttttctcttttaaaaatacatattttttttttattaattttgaaaaataccatattatttttttaaataaagacctttaaat

SEQ ID NO: 380653 - DNA, 4034 bp, Cannabis indica
ttcaaaacatgagtgatgacatgtgggcttattctaatcatatatccatggcaccatacaaagacatctactgattctttgatggtggttatgatttcactcctttcgtcaaggcccaatccttttcctaagcggataactttggttggatcttgatcacaaatccccacctcctaaatctcctccataggctctaatgcaatttcagagccaatgcgaggacccaattcatcttgactttcgggcaagagtactttgccggtttcctgaaccataaaaatggcttgctgcacagccacactataacactttcttgcttctccttgattcccacagatagttcctattcccgtcacttgtgtggggaacttgaggcataggttcctgatggaagtaatagctctgaaaactaccgaagtcgaacgtcccaaattgcattgtaagttgtggggcagtctacaccacaaaggtgcagtacttgaacgtgcttagggggggtgtccgaacacaaagttatagggagtcttacctttcccatgggaacaagggtggtcccattaaatcccgtgagttgtgaatcacttggggaaaaatcttggttagtgagtctgatggcaatgaaaacatccttgaacagaagattcgtcgaacttctattatctacaaaaaattcgggtgacaaccttgttggcaataggagtcaaaggatcataatgcgaaaaacgtaccggcttcgcatcttccaccgtaaaggtaatgggttggtccataagtcatggtctttgcgttgggagctggttaacttcccatatttctccattgtggtccaaggcttttggcataacgcttcaactcattccatgtggttcctccgatgtgtggtcctcctaagatcatggccacccttccatttggccttatgggatgtccaggtgtcgggtgatggagaagaactcccggaggtacttttacatctgggacctaagttggtgatcctagaggcgttggtgttccgacttgtccaccattcatgtgtggcaatctatctttgatccatagatacatgtgatctagcctaattaggctctcaattttgcctttcaaattcatacactcattggtagtatggccaatgtcatagtgatattcacactttttgttaggatctctccgggagctatctccgtatagaggagaaggtctccggtaatatgtgttttgccacgtggccaagtatactcgttcctgagtgtccactaaattggtatactatgtaactgagaggtgtaacctttcttttgtctctcgcgtgatcccttttgaagatctcttgctttgagagatttgaagagcatctgccgcacttgctgtaggaggcacaaactgagtaggatattgcgaacttactctacaggtcaggttacccctagtgctcagaaactagactgagctggagcgagagcaagattgtgagtatatcccagtgttgctaaaaattgtacactaggtactttgcttgtttgaggcgcaactggaagagtaactctcaaaaattatgttcttggggcataccctagcccaccggtcgggtaatatcctctaaaagttgttatctgtgtttcttctaagttgatgtacttttgaaccctcttctgagagtcctgaaggcttggggccccttcatgctggagctcattttagaaaggggttcccgtccgaattctcgcttgaagtaacgccaactcttgtccatcatccactttaattttggaagcttcttccttaaatatttttataagtttttcagggtctcaaccggtaattgcttgatgttggtcaaagcgccaactttaaggtttattttcctggctgctacgaattgccttcaaaaactaacttgtagtttgttccaacaatctatagattttgtatctaacttcgtaaactactcctcagcggaccctcctaacgtcagcaagaaacacaaacactttgcatcatgactgactgtcattacacggttaaaccgtgacaagtggtcactagggtttgtgtcttctacatacatcatcattttaggcattttaaaattctttgggagctctgcttcaaagatgtttctagcgcaaggctcccagtcctcacaatcagactccaaatcatcttccttttgtcttcaagaaactttagctatatccttttggaggatagcgagctcagccaggattccctcatttagagcgccttccaagactggtattgcttgtttcttcttctccaataaattcctaagatcaccgtgcttggcgttgagtttttttctcaaatcaataggagagtttttgcggtttttccccctctctcccagttcttggtgcacgatacgctctttcggtctcccggtcctaagggccagcattctcccatgggatcttgcccctctacagaccttttccttttgggaaattagagcgaactttttgaaaatcctgagccttcttgtttctttcggggaaggatgtggggttcatctttggagagccttatgagaaatatcgaatagggcttggctctcaatttttatgcctttgattgtttggcaaaaactcttctctcattttgtttggtccaatgggcttggcgttcggatgcacgtggatgtccgctatttccatagccttttgcatatcgaccattatttcttgtatcttcctgttctgttctttttgttctgccaactcggcttcatggtcgacggctttctgccttaaggccatgagtttggtgtaactgacatcagcataggcgtcgtactcttcttggttttcatcatattctatatcatttgttccgtcttgctcttctacctccgtatctattcgcgaagctacttcatcatctagcccgctaggaccttgaggtggacgagaatgacttgcatgggttctagtctccaccatcgtaatggaaattcccttttaatatgtgtatattattatttatctgtagggccttcaacagctctcaatgaaagcaccaaaatgttgaccgaaattttcggcaactaattaatgaaataaattattagaatagagttaatgcaagtaattttacgtggttgggacattaatgagccttagtccacgagttactgatatttaatatagtggtgtttctttgcagggaatatttttcatcattttttcgatcctcttcttagaatgtgattaggggtatttatagccttatgaagaaagctaaaaggtcactattgtcgtaactgttcacctttggttagcacaagttcctagattcgaacaatagggtatgcatgtctacacagtaggttacatagaatttctctaggtgttaggtgagaaaagcctttatccttcctgattggcgtgacaattcattatgtatcgtcactaaccccctcggttaaggtgtaatcgccgaagattaggcttgatgtgtctgacatgtctttccagattcatcttagatgcttcctccatgccgcaggggccttgggcccagtctacaaagctttacctagctcctggagaagaacaaatgtctctccctccagacctagctgtatctcccggagggacctcttgggtaatccggacaagtttgcttaagacattcttaaacactttctgatcttaagacttatttgccacgtggtcaatcataagactaccacgtatattgagacaaaaacagggcaacaatagagcactgtgtcaatttaatgttgaacacttgaaaaataatgtgtaacattattcttcctagacaataaactatatttctccacatttaagagatcatttagctcattatctcaatttagtagataaagttgttcattggaccacatccaatatttttaggcctatccagattcgatttaattatacattgaatgttagattttaccaaccgatccgatctaattattttcaattatccaatcgatctaacatccattagatgttagattggatcggttatgtccattaaat

SEQ ID NO: 380654 - DNA, 1168 bp, Cannabis indica
ttgtctaaactaaaaaaaaaaaaaaaaaaaagtaattaatacaagtattcctcttccagtctcaaacaaagcaccagatcctgctgaggcaaagttcgctccatttctataatcattgtttccagggtacaagtatggttgaatgaaaggtaacttagcatattcagctgcgtataataaatttagctactattagtaaattaatctatatgaagattttacaacataaaacactactaatatctaacatttgactttattatcttaccaataaaatctgagatgagtctaccattacaaaatctaccacttggatacttgaagaaagtttcaccgtaaggataataattggcctggcctatagttttgatgtagttattatttccagcatcaaaaagcgaatcaccaaaaataaataagcttgctctcgcatcaggctgaggataatggcggtaagctttagtttgaatcacaaggctgcttatacttgaaagtataaagagtgaagtaataacaaagctagagtttgccatgatatattgataatttgatatgacctcttcaactaattaatatcttagctagctacgtttttgtgaacatttatatagagattagagttactactccatgcccaaatgataccaaattatagaacattaatttattaataattatatataattatataggagggggaatattatttttagtaaaataataacttaaactctatattttacaaaaagaaacatatttcagtcaaagtttttttcgggtttaaacagccagcccaagtggtttgagggcgttggacagaaaattaaaactgagcattttattttattttattttgacattggaggagggggatagacttcatctttgtttgtgagaaaaagtgtaaaatcatttaactatgcttatgactacaaaattagatattttattaacaaataaatatttgacttataaaagaaaaaaaaataggcaatcagttctactataggcgtattgggaccacaaatcctttttataagcttttcttgttaagttatgaacatttttctatatactagcaaaaaattacgtgcgaagcacgtatactaaattttatgctaggttttttctatgttatttgaaaatgagattattattgaatactgaa

SEQ ID NO: 380655 - DNA, 3368 bp, Cannabis indica
aaataaaagaacaattttcatttccctcatctagttgcattttaatattacaattccatttaaacataaatggaaaatccattccgtataaaataataataatgagtttctttttatcatttttgtatgcatgttaaattacgtacccattgttacattgaactgggagtctggagttgtttctcgttttcatttccttgtcatccaacgaggagcattgttatgttcttaaacaaaaaaaaaaaaaaaggaaggggggcttgaaggtcatggtatggtatattcaaccaacacacttcaaaatgcataaaactgtttatggctatcagaacaatacagtattataccaacacactttacaatgcataaatctattatgtctcttagaacaatgaacaatgtagagcttcttggtagaacaaggctcataattaaagttctgaaacattgtttcacttgaacattagggcatacatatctaatttccaaattaaaattcctccaaggaactacatatgttataataatcaaatcattgaagattacaaatttatcgtccttaaagaaaattagatacaaaatccagtccctccattggaagactacacaattaacacacaaaagcagtcaaaatagagccatagacaatgtctctaatggacctaatagaagtaggtcttaatctatactcagacagctacactagtcagctccgtagtgggcactcgactattagtaccacagtctcacaagaaatagttacaattcgtaaataaaaagggaagaagaaaacttccaaattttggatcttgactgagctatggtacgaattctctgtgctcatcatcattttttatttaatctgcttcaaatcttctttcttttttttttgaaaaaaaaataataaaatcaccatcagttttcagcccacaaaatcatatatcctattattgctcttcagcacttcactgatattgtcatcgttctacgaacaagtaaaatagccaataagtgcctatatactacatagtgtcataggaggtagcaacataatttgaagtaactgatgcatacctcggtaatgtgaaccaacaatgttatatccttaaaacatataacaaacactttcagcgcatagattcttcagggtgttggaattcgagatctagtttcctcttcagatgtgttctatcagcactgcgcaatagaaaccaaaaaaagaaaaacagaattaatattaaacagttgcttatcaaaaagtcaagccatccaaaacaagcgttaacatgctcttctatctttaacttaatgagtaacaaagcatttacgctaattaaacttaacgtgtagaaaaagcattagcatatcttccatcttaaatttagcgaggacagcgtcactaaaatacacctttttcgcctaatttaggatgaaagaggttcgaacactggtttacaataacaacccaaacaaagcggctgtcaataatctttccttaccaataaacactgaccattgaaaatctgagatctacaacttttttcccaaaatttttatatatatgtattattaacagtcacaacgcatgaatgtattatttttaattatttataattttgctaagtaggaaacttaaatagagacttcaaaactttccatatattcaaaagcagcataccacataagcatcgtcgtttcaaattaaagcatttaaaaagtaattaagacaagctctatttgtcataattgaaatgaaactctggcctacatattactataaatgtagaaatatttatttctccttcgttaactagttgcaacatatttagatacaccttttcataaatgtacagtacattgtagaactttgaacgataaattgtgaatttcatattaaataaacaagaaaatgtaacagcagaatgaacggatgaaagaatgaaaaaagtccataaagaattatttttccgcctcagattgaagaattatatgatcaatatcagcaagaaaccaaacgttttatttaataaaagaggaattgaccatgaaatccaaaaacagtagtcacattcacaaatgtgtggctgtaacataccatagctgtatgtttcggccacacatttgtgattgcgattgattaattattaagaataggcgtttttaagacaaatataaaagacacaattgcaatgctaagttgtcatggaaatctcatttattatttcactcctgcacttaactgcagattcaagatgatgtaattgtttagtcctgaataattgttctacagccaaacaaagcataatctcaaaataaacaaagggcatttcattcaaggaaagcagataatgcagctaaccctaaaaatcagccagcacgaaattagtgatgttgatgaactcttactacgagagaaatggaatctatccatctaaaaatatacccgcaaaataggtttttttatccaagctgattgttacgtgctttagcaattaaggttacagaggttaaaatgtaaaaactattaaaaggaactgagaaacataagtgttacctgttaatggtaggtctatttgggggttttgcagcaaatattgaaaaatctactgacataggcacatgctcattcctacttgtattttcccctgctggttgtctgatttcacctccttcaaaaccctctggctgtgcagtcactctccttgattttcttggaggtgacaatacagttggaccatcatttggatcaaaatctgaattcttagactcccgcttaggagcaggtctagggagcttgttaggaactgtaggcaaaggtgcagaggtaaagtacctacaagaaacaaataataccagtaaggaaatgaaagaaagctttgtgtcaccaaaataaaagaaaacaaagtcaaaatacctgtggtccaacgcttgctgcacagatattctagattttggatcataggtaaacatctttgataataaatcaagagcatcatcactagccataggaaacattgagcgcaaagggggtgcaggaacatattggtattccacgtaatcaggcaggaagatcatgtcaggccactgagaagatgttggagttccaaaagcagcaaagattttccctaactgatcaatatcactagatccctatagcatataaaaagtatcaccaatgggaaaagtttgctacaaaaattgttaaagcaatcagctgtgacatactaagctctggcacgcaaagcaaaatgcaaaccggaaagcgatatgtgtagaggatgaagtaaatagataagtataatttcctaagatatgtttatttgtatattcatgcacgcaaatgaaaaaagaaacagaaacagagtatt

SEQ ID NO: 380656 - DNA, 5577 bp, Cannabis indica
tttaaaaaaaatcagaaaatgtaattctacataaagccctaatctttccactaaactaaattagatttgtatgaagaaaagggattagggtttgattccgtctaaataaagccccatctttctactaaactaaactacatttgaaaatcagaagtagatattgggattttagtttatttttgctaataaattgggtttcagtttcgatttccacgggagatcattttgatttcatagtttaatttgtacttttattttttatttatatttattttaagaaaaaattaaaaacttaacagacgttacgttagcttaggcattcaaaattgttaaatagtaattggaataaagtcacccaaaaaccaagaattctgttatatagctacattttatataaaatagatatatatatatataaattaaatcagaaacaaattacaaatatcagttcaaatattaatgagatttgttttatttttattttattatatataaataatattttattattttattaaatataaataaaaagtcacccatgaatttctcataaaccaagaaatttagttatataggcacactttatatagaatagatatatccatacaacaagttacctatttattttgtatttttaaacaaaaaaataataatttattgtatttaacgattaatcattagattaaaatctaaaggtaagtaattttgatcacactactatacgaggaccttacataaattatacatccgtcatttatatatcaattaattacattgaaagaaaaaataaactagaaatatacatataacaatagattgaatttttttctttcatactataccaaaaaataaaatttaaatatcaatccaaattaaactaaaaaaatgaaacaataacctcaaaaaaaaaatcgtgttttatataaaatttcctaacaataacgttgaaattgtgactagtgaaacaagaaaaaaaaattataataattagattgtacagtagtctaggcataggtatcacatagtaagtagatcctatcatgtaaaactttatgatttgtttacaaaatatacgatcaatttgaaccattttggttaggtgttttctattaattttatctagttggtgaaggaatgcagagaaggaaaaagtgcagatgaaacgatgatgaagaagataccatattttacaagaggagagcatagacatgcgagtagcataccatctttatcttattctacagtacagactatgacatttaactgtcatctaccactacttccattcaacaaaaactacaatgttaactaaaataattgtccttaacttcttactaaaataaaaatatatataaaaagaaaaattaaaaataatgatgaaaattcaaaacttcagtgctggggagtaagagaaggaaatgatggaatggagtgtaatatcaacttccggccaggcctccggccaggtgatccaaagtggcaatgaggagaagagaccctcttactgttgggagaagaagttttgacagcactattaggagagccatcccccacaagaatttctggcatttcttcatctggaatagtctgcacatgtttctccaatttcggttgagaagatcggagaatacttggtttaccatgcatctgactgtacaatccagaagaggaggatgtcccagtaactagggaggatcttggcggtttgcctttcgatgagaatggtagttgaaccaaagatctgcggcattaagaataacgattaagcatctcataacacacaatatcaactgattcagctaataataaaaagaaaacatagatctgacctggatatccttaatggtgtaattggatgagaagagcctggatttggatcttcattgttatgaatttccatcttctgtacaggtgcaaccaaactcttttcacatgcttctgcttcttcttcatcttgttcttctgaacctgtcataagagaacctgtattttggaagaaattacaaccatggaaacatagttaagagctgagacgtgataatgagtatcttatcaaaccatgtatggtgtagaaactcaccatcctttctaccaaatgcattcttacacccttcacaccggcagctaatggagcagccgactccacccttcaaaagaaaaccatttatgaatcagattatatacaagaactaagaactgaaagcatacagaacatcctaaaggtagaaacctgatagcactcgcagtacttcttaaggcaactagatttcttgcagttgcatcctcttttatgtcgggctgaagctggggttttgcttgattcatcctgcaagtgaaagtaaaagtcagaatgtgttgaaacttggcagtgaggtagagtaaggcagactcattttctaaccccatagtcaggtgcaggatcagagcccctaattactttaggagcaaatgcaagtgggttgcgagactcaatctgttttcgagtagcaagaacagtatcttcgtgaataggtttgttgaagcattcttgacaagaacacggttctatgcagtacacaccagctgcaaagcattcacagtaactgcagtatgaataaaaaataattagttcagtctcattcttctatgatagtgatataccccaactacggtccttaaaacaatggcagccattaggcaaaggtagagaataattgaagtataagaccatggaaagaaagaactgagtaaaatctggaacttgttattgaatatctccttccttctttactacataaactactcaccctgctactacttatgtgctaacagctattacgatataggaatctatcacatggagactcatgtatcacacaatgaatgagttctttctacgttaaacctaacaacccaataagttatgctaaacttccctaacggatagggataccgggtacccaaattgtagatttattgtttgctaattcaatactatttatatactcaatttaatattaatgaataccagcatcaaattgaatatttaatgagttgtcaacccaatcctctaggcttgacaatttacaacaatctaaatagaagacacacacaattgaatattgaatcgtcatctgaaaagttaaattacttctgataaataagaaaccagactccttaatcacgcataaatagataaatctattgaaactaaaaatgctgtaggaattggcaatgcaaaacaaccaaagcttgagatgaattgaaaagagagttgtatgcagagacttacagtttcaaacacttcgacttcttacagttacatcgcttacagccctcagtttctccagcattttccgatctacgcctgttagtagattacacacataagtcaacacataaaaaaattagacaattaattaaatcaaactgtttaaatccaacaatctaattagaaatatgtcgtgaaaaagacttgcctctttttcttggggctattttgattgaattcttcattagttattgatcctggtgcttgagaaggatcttctagaagctggaccccattttcaatggtattgatgtccatttctgaagaaaccggaatcaaggctttatcaagaccctcttgatcatccatcggagaatgtatggagacagtggaaccaggcaaccttatatgtattccagaagacacattcttagtaattttgcaatcctttgaggttgttgcaatagcattcaagtgtaacccaattccaggtaagatgcgcctagcaggtgcttcaccacaatgcctaataaagccttgtcgcctctcattagcaggggtctcctcatcaggttgagctaaaactgaactactatttgaaccatcccctaaattcttccttcgagctactgacacatcaaagtccagacagcgccttcgcattcctcggtgcaagctgaaaaccgactatacacagagagagtaaatcacagtcaagtgttagaacattcaaactagatttcatatttatgaagtataaacatgcccaagaaaataagtaatagcataaatatatagcataaaaaacttgaacagaattattttcctattcttttctttttttttaagagaaagcggctgatgttaacaagtgaacaggtatatgattttagaattacaaaaaagaagcagttgcttaaaccatatttaattttacagttgtaccatttggagatcatgacatataaattgtatgcagaagattgacaccaagtaattacaaagatgagaataaagtgtccccaacaacctacgaccgttcctctacaatagtagaaaagatgcagcagagggaagggaaatctgttgcttttaccttgcaagtaaatgccatgcgggtttcagcttccttatcctttcgcttatttggattggtagccatgccactatttgaattaaatctatcctgtgtttgttccatatcctccaaatgactgacatctccagtttgagaaaggggttcttctccattatgttgttcagaacaacctggatctacaatttgcatttcatgctcattattaatctcattttgttcaaattctgtcccaagagaattactacacctgcctacaggctccagtgaatcatgaatcagccccttaaaagtctctgaagtgttgggtgaatcaaaaatcaagacagcatcagacattagacattcccagtcacctatggccccttgttttttcggctcactcagacacacttcctggatttgggcttcattatcagatagaccaatttcaggtgccacttgcacatgaggaacaagattagccgatggatcactcgaattggattcaaaatccgccacaacatcatgaggcgttgagacacaatcagggctaccacaatcatacttcaaaacacgaggtagctcgatcacaaaagctgaaccttcattttgtggctcagcagaagcttcttcaacattaacatctgatttacaattttcacgaagctcaaccgagttgttgtatacttggaccgtttcaatgacagcatcatcacttgcaggaacatcaactccattttctgaagaaacctcaggctttgcttgatcagaactattgtacctaaagagatgaaaaaggtattcttagatacagaaaaaatagatagggcctataataagaagaagaccaatatcaaattacctcctgagaaatcttgactccttgttagaactgacatggggtgaagtgaaaactgatggaggagatccaaaactaagagagctaaaggtctgagtaatgtgaagagacttcactggcttgataggagaaaggctactgatataattgaagacaggagaatcctgcacaatattgaaaaagattttagtacaaggaaacgagaagtgaaaaagagagacaagtttacacaaatacaatcaaccattaaaagcacagtaccatttaaaatgaatataatacttttttagaaatactaacttctggtcaaaaaattcacaataacacagaagaagatctaaaaaaagaaaaaaaaaaattaggtgtgtgtaaataaataattgtgaaaag

SEQ ID NO: 380657 - DNA, 2177 bp, Cannabis indica
ggtatacgttggtcggtttggtcaatttataccacattttattcagcccaatgtaaagattgggttaaaaaatctaagtacaacctgtctaattaagaaaaaagaaaatagtaacccgtccaatgttacggttgaaagtattagcagtaatcattttttaaataagttttcgaatgtcacttatcgtcgaaaggttttggcggggggtccgtggcttcttgaaaatctgttacttgttcttgaggcacctactagggtaggaaattatactaatgtgactttttaaatagttaaattttgaatccaatttcatctcatcttaattttctgtatgagtgaagacatgggtagtgccattaggcgacttattgaactagttactaagatagaggttaattcaacgggagactgcttggcattttatttgagttcgggctggagtaagcatcactaaatcactcctcaaatttcttaaaaatagtttgattagtggtaaagaaaagtctcccattcctcttaagtatgaacgactttcaaatctacatttttgttgtggtatcattggccattctattagagaatgtctttttagtggctagtgtttacctaaaaactgactctaatgatgtggacatcaatatttgacacgtggcaagaagaaaaacattcatggagttaagtgtcctgagtcatagtagtcaactctaggaaggggtccctagctctacgctaaggttggcttcgagaactctaaaatggatatttggatcctgctaaattgttttcaagtcaccatcattcagttttatgaacccttaagtcaaaaatactccaattccaaagcctgggaactaaaatacgttgattcgacatcatagaagtcaacccaggcgcctaggttttcactctatgcccaagttgacatcccaatctaaggttttagttttcaggtccatcttagtgcagattgctcaaaaattttacttatacatgaataagacatgtaacaagtagtatgctagaggcaccagaatcaaaatcagaacacttcccatttgagacacctggcacccagagcccaggttaacctagtgatgcacccaccgctaggtttattgtcaacctagggcatttcatataacgtttctgaagatgtttcttaagcattttctttgtcttcacccaaaattaggaaaaaagtacttttgggaaataaacgaatcaacttggaggccaaacaagtgacctactgcccaggttgacactaagcctggtcaccagcgcgtaggttgaaattttttcaacctgggccatttccaatagcaactctggcaaagtcttttggacatattcttcaggaaacaaatgaagctatctactagcgtaaaagaggacccaacttactaaatcaggtacgcagcgaatgagttttgtattatttgattattattgtaccataacccaatggatctccatatgtgtatactgctaacgcaaagttttgttaatcaaatatgagcctaacagtgataatatcacaaaaaaaaataaaaacagtaaaggaaaaagtatagacataaaggattttttacgtagttttgcagttaaaactctgcattgtccacgagtcaatcttattagatttttgatagtttttcagggcctttttcctcttatgatttttttgtccccttttttaatctaacttgcctctatttataagtacatagtaggcagttaattacatagttgaccataatctttacaacgtttatcccctgaaatcgtggggtttgattacatatcacgtagtataaatgcggttaatatttgaaaatcacatagctgtgagttatctgcttttattgagtcaaaatgatcgtgtatttaaacacgttttaaatcacaatattctaagatgtctcgacaggaactcaacatcattgatagcgagctggaatgtttcccctatcttttcgagatttatgatgtacgccttgttgtttctttgcttgaaggcataacactttattttgacaatcacagttctttatgaaaaaaatagtacttcagcagccatcattctaatgtcagcttctaactcgtcaaaactataagtttcactgaatgatgtctaaagttgattggtgaaagtaacaggagtgctccttcctata

SEQ ID NO: 380658 - DNA, 1517 bp, Cannabis indica
gtcgagggcacgatttagtacatgtcaaagttcggggggaaaaattactaattagcctaaaataaattctttaaattttattttcagtactttaaactattacgaatttattctagaaaaatttctagtgctgattgtgaaattcttatagaaaaaacagtatagtggattgagttaagagtactcgaaacatacatgtcttatacaatagggagagtggtctttgtaaagtcagtattgatgacaattcatttttattggacacaagtcatgatcttcccaaataagattttaaatagaattgagcaattttgcatggcttctttatggggagaaaatgttaaacaccacagactaggtggtatcttttgggataaagtgtgcaagccaaagaaagaggtggattttcattgcactgtgaactcaaattttgtggctatagggaagcatgttggtgggattataaagcccatcaagtcaaaatcatgctaaaagagtactgcaccaataagcaatttgagcaattgaattactctatcaaggaggtttgtgacctttcttccgatattactcctgctcggaattggtatgcttcaaatgtttggatgagatataatgtgctaaaacacatttattataacctggttagctgcttggcatagattgaacacaagggatataagttaagctctcatggtttactaccttgtaattgtttcatgttgttaactggtgtgtacagtttttgaattaatggaattcttatttactaaagaattaaaaactattaagaattttttaaaaatttaccaaattaattcattagataactaaaagtatattgtcatattaatatattgaaattagaactatttgaatgtcaaaaatatgaataaattgtatggaatttagattttagtatcaagtgagtgagcttataaacgggtgacaaactagttgagaaattagacaatttgcgcttgtctttttggagagaaaaatttaaggagggcaaaagaaacgtggtcgttttggagagatatcatatattagttattgcttgcttcttaaaggagggagggcaaaagaaacgtggtcgttttgaaacgttatgatacctaagaaagagattatattagagtggtcccagtggatagagaagttaattggttttcaccgtctttcggtgagaatataaagagaatggggtccataaatatcctttattttaagaaatatgttttgattcacagaacatgggccatggggcactcttttaaagtttggtctcactcactcgtggcccactactcttaatccacctcatttttcaagtcttcacttctctactctacggtttcaattaaatcttttttaactaataataataatacaagaataaaaatggaataattacataaggcactattttttgtaaaatatttacatttttacgttcaaataatgtttttttacatttttacggtttttaaaaaataatacgaaaacaacataaa

SEQ ID NO: 380659 - DNA, 1115 bp, Cannabis indica
aaatttatcttaaaagaaaaaaagagaaacatgaaatcaaaaattatgttaaagaaaaaaaagaataggcatactatggaataatgaattttatttgtcatatcaaatattattaccaatatttatgccatatccatttttctattactttatcttactccaacactattcgattatatatccattttgagctaattcccgataaacaaaaataaataaataaaccaaaaaaaattataaaattatggaagtaataaatgaattgtttttagaaaaatggaatccacttgtcaaagaacctttgaaatccacaacactcagtgcgtgctgctgtgtatctgattctgagctcaataattggaatgagtaatttgagttcaatctatttggcataaaagaaatgttattgttcataatggttttgttctgttccacaacaaaattatttgatacaaaacaaaaatgaccaaaataactgaatttaagctcatgtgatcaaattggtaatacaaaattatcccattctctgagaacataagagatgagtttattcaaccagtaaacttaagtgcctatttttcgttctctggttaatttgaaatttttaatttggactgagtgcagatcttttttgtgttctgtttagactttttttcaattaagccaccatttaatgattataaagaatacaacaagttgatggaatagtaatgtcaacatcggctaagacaagttttaactaccctaacggttttacctaactgtcagttatgacagttaggatcgggtctctaaactaaggctataaatagccaattgctgcagcattcaggtagaaattctgggagagattttcgagtgctagtttagtgaaacagagattaattctgagagagagagttgttatgtaattgaagctttgattcatgagttaatgtgtcaaagaacactttgtaatcctctctattctagcatcaataaagactaaagccattggggctgttcttgccgaggagtaggcaagtgaatcaacatcacttgtttgaacctcgtaaaaccttagtgtgtttgatttctttctccttcttcaattgctcttaattgcttatttatgt

SEQ ID NO: 380660 - DNA, 3160 bp, Cannabis indica
aataaaagtaagcaatacctcaagattgccagatccatcctcgtcttgcaaatcatcgtattggactttgatctgttttttcgatatttgcaggacggtacacctgaaccaacatcctcggatgccactatcttggcataacaattctatcttatcatcaaccttaaacagttgagtcaaccaaggctgagatcttaaatgcttgagtgaaaataggccgtctcttattgtaccgcgatttttagatgactttttggctctcgaatgatcggtgctgcttctagtcctcttcttagttccaacctttacattttctccattgcttatgtcatccgtttcttccaatgactcggactgaaggaagaaatcaggaccgagacaagagagaatcggttgatcaaaataacctcgcaatttactcaaatcaaaagactttgttctgttacttttgaactgtctatagcacatatgtactttgaccaaaaaagcttgaggaattgcagcttcacatttttcataatgttcacgagttaggactgtagcaagaccatctacacactcggcactaatgacttgtgcgtatggggttataaaaacttctttcgggtgaggatttcgtattggaatcacccccttgacttcctgatttcggtgaaaccacctcactttgaccttcttttgacccctcttgtcttcatacatatcttctagataagcaatgtagtgattcgcccccttcgccataacaaacacaaaagaatgaatctgcacacaaaggaaattcggaaatatacttaacaaacatgtttcttttacacaattaatatgataaaataagtgcatttgattcaacatctcttttattgtaactaaaatgcaattttttcgaaacgatgccataacaaggtatgtagaaaaccaacttgtctttcgtctttctaatagattttctatacagaattaaaatagttttgacattagctaacagataaggagatgtatgttactcagtactatgtttggctttaatagttcgagtagattcataccgatactgtaatcccgttcctgcagaatgccggataatgcttgagctgcttaccacacgcccatggacttcctgaccaaacaatatccgaaccgtgtcccttgaaattctttgcaaaacggccctaaaatacatttatcaagcgtcaaaaataatcattgggacatagctaggagaggcataatccttatccaaattaaaataaaacctacctttccatctgatgcatggttatgattaattccatcaattgggtattcaggaaactgtaatgcttgtgttgaatcatgtgtaggtgattctgaattaaaacaagaatcaaatatcagtcacaggatacacacacatatgtataggaagcttttaaggtgggggtatcacttttgctcctactgtaagagttttttctgtttttggaacctagagaaactatattctaatttttgttacatgacaatatacactatagttatagtaggcatcttatacgttttcgagaaattctaaataatttatggtatcaaaaataaaattcaaaatagtgagttgcaccctaactatttgaatcatattttcggcaccttcacttcctcaaaatttcccgaaaacagacagaatacctactatataactataatgtataccgtcatataaaaaaaaagtttacaatttctctatataccaaaagtaagaaatgcccacctaaaaattttcctatatatatgaatattcatgtgtgaaatcaatagggttagatgtagttagttgtatacattactaatttcatctactattcaactacaccaaccatatcatatcccattaagagtaaacaaagaaaaagacaatgttgaatctgaatctagaaaggaaatagtctaaatcaaaaaccataaggggtttaagagaacataccagatctatctccatgaagattatgttgcttggagagcatagaagtgagccaatcaacaacctctcttcttgatctccatttaaaaccagcatgaatggaactactttccttaccataaacttccaaaaactcctcagcaatcacataaaacatgtgtctaacactcctttcagtgcccacaacagctagagtggattctccattagaatcttttaagaaataatgaacaactctatttcccctctcttgtgaaacaaattgttctttccattccacaaaacatggaccatttccagacattttgacaaggatttaacaaaaaaataacaaaaccccaacttgaaattctaattacatagctaagtcttgcccccaataaagatggcaaagggtccaaaagagaaaaaaccaaggtaaaattcagaacaaaaaagcaacaatctttctataatggaacatcatccccctaatattttttcaaactttatagctaaagaatcataaaaaagttttatggtttgggcatataagggcagatcagaaaacccaagctttatagctaaagatgcccaccaacccaagaacaaaatcccaactatgaaattgtttttagaaaaagaaatcaaaagacttttaccatttaatcaaagcacagcttcagaaccaattaactctctcagcagatgaacttcaaaacccaacaaagaatcaaaagagcctataaagagctgtgctttgaaggagagaagacagatcagaaacccatcaagccaagagaactaaaaataaaaactttccttgattgtcccaaaagaaccaaaaagaaatggtcttggccggttgttttctacagaatcaaccaaaagaaccaaatgggcatctcagttttcaacagattagagagaaagaaagcttgagagggttggaagagaagaagagaggagaatgcattgtatttactttggtgggtacaaaggagagtaaagaaagagagataaaaaagatggagaatttgaggttagagaaggtgaaagatgaaaacttgaaatggccatggaacatggaaagtgagatgagaatgagttgcagagctttggagctgacaatggtggtgtggtgggaaagggatgaacagaagaatagttgaacaaacaacaataaaggttaaaactttttttttcttcttaatattatta

SEQ ID NO: 380661 - DNA, 2913 bp, Cannabis indica
ctaaaatgttcacctatttataattagtatccaattctatataagttagtataataaataaatattactaaccaattataattaagttataattgatggtaggccccactatttcccatatattatcgtctacagaactataaatttcactcggtttgaccaaaatttctttgaccaaattgaaaaatcttaaatatataagaaagaaaataaaataaattaaaaaataaaattgaccaagactttatttggtatataactatatacattcacacaagaagagcttacattaggaaaatatgaaccaataaagaaagcattatttggattttgaagctccatttaacatttccacttttggaaaataactattgctaaatagcaactattggcaagctccgagtaaaatttgcatatataacattagaggagagaagaagataatgatgataaagctactaatcagtttgttaatggtttcggccattattataatcgtcccaacatcagtagaatcagctagaatccgccattacaaatgggatgtaaagaacgaattcaaatctcccgattgcttcaaaaaactggtcatcactatcaatggcagaagccccggccccactattttggctcaacagggtgacaccatcatcgttgagcttaaaaatagcttgattacagaaaatttggccatccattggcatggaatcagacaggtatatatacacttctttattagtattatataattttgtacaaaacaaggcaaggatttaactcagcattcaaatcttagaattgggttttggctgggtttgaatatatagttgtttatttttaatgatctgtgtgcagattggttcaccatggtttgatggaaccgaaggagttactcagtgcccaatacagcctggagaaaccttcaagtatcaattcgtagttgacagggtaactaattgtttttattttttaaaaaacatataatccaataatgaattaagaaagctttattaacttctcattttttttattatgtagcctgggacatatttatatcatgcccattatgggatgcaaagagatgcagggctatatgggtcaattcgagtagcacttccagatggagagttagaaccctttgcttatgattacgatagaagtgttatattaaatgattggtatcataaaagcacaaatgaattatccactgggttatcctccatacctttccaatgggttggtgaacctcaggtactccaattactatattcttcatccataaatatataaaatgatcattacgacagcttttctaattggggttacttttctttgcagtcacttctaatacaaggaagaggaaaattcgattgctctagtttgacttctccaagttcaacagatcctaaagtctgtaactcatcaaatcctgagtgctctccttatgtccttactgtaatcccaggaaagacctatagactcagggtgtccagtttaacttctctatctgccctcagtttccaaattgaggtaacttttttttatttaatttattttggtttcatttttggaacatattttagttgaaccgttattaaaatcatggttttccttttaatatttgcagggtcacaatatgacagttgtagaagcagatgggcactatgtggagccctttgtggtaaaaaatctcttcatatactccggcgaaacatactctgtcctaataaaaacagatcaaaacccaacaagaaactattggatgcagacaaacatagtaagccggtcttcaaacacatccgccggcttagccattctcaactactacccaaaccatcccaagaggagcccaccttcgagcccatctgaaggcccaaagtgggacgatgttgatccacgtttggcccaaagtctctccattagggcccgtaaaggaatgggccgggccccaccccagacctcagacagagtcattgttctcttgaacactcagaatgaagtcaatggattccgaagatggtccgtaaataatgtctccttccaacacccaaaaacaccgtacctcatttcgctgaaacacaaattaacaggccaattcgatgaaaaaccacctccagatgggtacgattttgctaattacaacatctatgtgaagcaaaataactctaatgcgacgacgagtaatgggatctacaggctcaagttcaatacgactgtggatattattctacagaacgccaacaccatgaacccgaacaacagtgagacccacccatggcatctccacggccatgatttctgggttctcggatacgggtctggtaagtttgacatcgacaatgacccgaaaaagtacaatttggttgacccgattgaaaagaatacggtacccgttcatccatatgggtggacggctctgaggtttgtggctaataacccgggaacttgggctttccattgccatattgagtctcatttctacatgggtatgggaatagttttggaggaagggattgaaagggttggaaaattgccttcgtcgatattggggtgtggtgctagcaagggtctccgagtaccatgataatgtctaaatttgatcaacaaaaaagttcaaaattgagatgaaaaatcaccagatattctttattgtagttagttgttaaatgtataattacacatctattcatagatgatcaacgactacaatttcttttctttttttggtttgagagaggcaacgatgattctcttgagcaaagaaaactttaggcaagaagttactaaatataaatataaagtttaatttttagcaataataataattttgaattgtaggtacctagtaattattaagtgttaagtaaatttttacgtgagaatttttaattagttcaagtcattaaattttta

SEQ ID NO: 380662 - DNA, 3995 bp, Cannabis indica
ttttttaggtgctgcctacaattgtgaaactctttgcctccaatgatcgagctattagagttggtctcctgcaacatatagatcaatttggagaatccttatcggcacacgtggttgatgagcaagtatgaagcaatgatagaaagattataatcctaattttgaatgtggttttttaaattcgtttcaatgcttgtgactaggtttaccctcatgtagcaactgggttctctgatacctctgcttttctccgagaattgacacttaaatccatgcttgttctagctcccaaggtatgtatgctatgtatgctgtaattgtaggaatcatttgaacctatatatataaatatgtgtattttacttatctgacttggattgcagctctctcaacgtaccatttcagggtcattcttgaagtatctttctaagttacaggtgtgacttatacaaatatttcaatagatctatctatagcttatttcaatttcatttagtgaatgctcccgactttttaccattttaggctagacatatgctccttgacaataacatggttaagatttatataaatataaatgcagtagattatttctcgcgataattatttgtgtttatcttgtttttaatttctgcaagtcttgcaggttgatgaagagccagcaatcagaacaaacactactatattgctggggaatatagcaagccacttgaatgatggggttagtatctgcgcattataagttgtactgttaatatacatctaaatcttgaaatttttgttagttgtccttaatcttcagcttagtgttctctactaaatgttggtaccgtacgtcacttggtcattatatttaccaaatgttttgctgtttacctatgcagacaaggaaaagagttttgattaatgcatttactgttcgtgcattgcgtgatacatttccccctgccagaggagcaggtatatgacgttctaatatggaatttagtatagcttttctttttacatactcttgtttccagcgtattttttggggcactttattatgctttccaacctggtaaagatttctgtggcaggcatcatggcgttatgtgctaccagttcttattatgacatcaatgaggttgcaacccggattctcccgaatgttgttgtccttactattgatcctgacaggtcagacattcttcatttgatgtgtaattccgtcatttcagtatttttgtccatcttatcaaccataaggctctgcttagatgtttgtgttttactttgtatgcattctcttttttcaatataattcatgtttttatgacatattttttaatgtattttttctctacttattcaagcagtgatgttcgatcaaaagcatttcaagcagttgatcaatttatgcaaatagtgaaacaatacaatgagaaggtgtgttaatatattcttgccgcttttaattccaatgatgtttctgttttatgtggctgcatgtaatataagaaaggatttcactgttggatgtgattggactgaatactgtttctcctcatttttttctggcccattaaatttttcacaaactttccctgtctgtctcaaaaaacgccttccttctcacttcttacattaatatttatgataattaagttttaaacgacagggctcattagatatatatatatattattattattattccaaatgatagtgctttccaaagtctatcttgaggtggttttgtgaaaagaaataaaaaacacaattttgtgtgtgtgatttggtgatttttctctcgttctttgtagataaactcaggagataccagtggggctgcaagtgttggactctcatcaattccaggaaatgctagtttattggggtatgccactactttataatacttttataatgttcatagttcaatgctatctgcttttatgaagcattggttgaatgggaaattattttggatccagatattattacttctactatgttttggtggttgtactgatgatagtataatttgtttgtgaataacttcgtttctatggaggaatctgtcattcactaactgataattaagtttgcctttgatattttatgacagaccctcattagtttatttcctactttctcatagtgtatactgtgccggagtgcttaattctatgttccatatctgtttttgaactgaaattgttaagaggtttatcatgaacatgttttattgagttcttattatgtggagtcagtaatggtctggagctcttattgaccatgcagatgggctatgagttcgttgactctcaagggtaaaccctctgatcaaacttcacatgctcctgcgaacactagcactgcccctctatcttcttcaacttccaatgcaagctcaggtgcatatcatggtggcttttatgcttatgaatggctcacacacagacgcacatgcatcttgataaatgattttcacaattgtgatgctaatgtagattgttttttcccttatagccatatttatatagagaaatgctaataggcaccttaaggtgccaagcaccacaagacgtggcatactgttattggtatattttaatatcaggtcccacacattttaaattaataaatgatatgaaaaaccgctaactaattatagggtgctacatcggtgtggtgttaagcaccttgagatgccaaataacaatcctcatttctatatgatcacaatattactaatccttcatattagtgtttattatagatacgtggtttgttccaaaatctaatatctcacacaattctttgacaatattagttgtagttgtagataatccaagtaccgctcttgctcatgtaagttccagtacggatttggctgagcaacctctacctgagtcacccacatcaactgatggctggggagaaattgaaaatggtattagtgaagagcatgaaagcgacaaggatggttgggacgatattgaaccccttgaagaaccaaaaccggctccagcacttgcaagcattcaagcggctcaaaagcggcctgttgtacccacttctcagccaaaacaagcaggtactattttaataattagatttctacgtaattaatataatgtttgataatgctaaatgaactgtctcaatctgaatgcatgttcaacttttttctctctcactcattacgactaaaaatctactttgtccaagtcataaggtttttcttccctcttgcacttgtacttaggctttagcatacaaaaacttcatagtaacaaaatatacgttagtatcagctgctttttatgccttgtgccattttagttggtagccaggaacaaacttgtatacaaatgattgcatttttgtattttgacatttgattacacagctgtggctttaactaatgagatatattactcatctcttctattttctttgacggtagctacaagtttacgacctaaaaatacagcaacagctaaaagtgaagacgacgatttgtggggttccattgctgctcctgctccaagaacagcatcaaaatctttgaacttgaaagcaagtgcaatagttgatgacgacgatccttgggctgctatcgccgctcctgcacccactactaaggcaaagcctttatcacttggtagaggtcggggagctaaaccggctgctccaaaattgggtgcccaaaggataaaccggacatcatctggaatgtgaattacatacaaaggaacaacaagatgacagttaaaggaagcttcaaactgtagattttttgcccccttttggtggctggcttggtagtcatcttaaagatgagagtaatatgctatgtcaccacaccaggaaatgtattggttgcatttttcttcaacatataatttgatttgtaataatattctttggtttcttttagattgtcgtcttttacataaaaaaaaaaaaagaaaaaggaaaaggacagttaattgttatctctgctt

SEQ ID NO: 380663 - DNA, 6193 bp, Cannabis indica
atttgttgatccactactcgaattggagcttttgctgctcgaatgaaatattcacaactactcgagtatcttgctaatcacggtgaatggtgttggtatgctcttgcacctaccttagagcggcttgcaaattttgcagtttggtatcatctccaatcagcactcgggatttatccttactaaatctctttaattcctagaagttttcacattaagaaccataacattggaccagctttctcgttgggatttcccctccttgtagttacaaccatttttatgtgtcttaaaaagattcaaaacaatgattgtgttctttttctctcaatgacagatttaaatattgaccttgctcttagccaacgataatgagttaattaatgtgcttaagaagtattaaataatgttaattaagcaataagaacacaaatttactatagaggttcagtcccgtgataattgtaatagcctactcccttttcttgtattaacttgtgagaaagaagcaagaagttcttgatctctcaaaagcttttacaaaaattttagcagtgtaagtgttcttcgaaatgaataattttggatccgtagatagttaaatgaccccactatttatagggaataattacattaataaggtttctcaaaagaattcagaaaataaatgtggaatattatttaattttctgaattaaactattcaagtgtggaaatcccaccaaaattgggatttcattgatatatgaaagaggaaaatatttccaagactttcattgttgcatttaccatgggtggcacacgcaaagtggtcctggaatcgactcttgtccgatggggatatttaccctatgcggtactttggtcttatttctcaaaaaaataattcctaatggataatccaccctggatggtatgtcaatgacagtttcattcgtccaagtctaaaaatgatctacgtgtcacccagaaaagtaccatgtcaccctatgcacattttaggataacaaaaataactaattataacaaatactaaaatctaattttatctaagtaatcaatttcgaagattttggaaaattagaataactaacaaagataaaggtaaccaaatcaagttgagaataatcatttaaaaataattgtgagggttttgatttcaccctaatgtaatcatggtcctatttattaatattcccaatttattcaaatattttaagaacctagagcaatattttatctctatactttttttagagtgcctcataaagaatgtgtaagtgaataatagcatatattcctataccatcattaaatcctaccttcattaactcctactctagaaacaaccctaaaattccacctatcaatttcacaatttataattatttaggttacctaagtaattatttatctcttgatcttacaccaccttagtcacccttttcttgattgttcaaaagttttccactcgagcactaattttacaatcaaaataatagccctaattataatcacatataacaaaaaaaaaaaatagcataaatcataaccatggcaacaattaaccaagctaaaatcacatgaaaaatattagacgaatttgaatattacattaaatcataaaattaaaatcattattagagattagagatctatccaaaccataaaaactaagaaaactagccacacataatgtggtttataatctcaaaatattgtttaaaatatatataatatctaaaaaactaagaagaaagaagaagagcgaataaaacttttgaatgtggctttagatttattttgatctctcaaaattatatctctcttttaaaattttattttttgtcactctcatcgtcagaagtcgaagctataatgttctattcatagacttaaaaaaatgatgtttaaacattatgtttaattttgaattccatatgaacagcgctatgatgcctaggatgttgcggagtggcgccatacgagatttcttaaggtttcaactatgaagcaaattttaatttttggcatctggcgccacatcacctcaatcacagtgctacaacgccaaacctaaattttctcgttttgcatggttcttgactcgattgcttcctcattttggcaattttctcaaatatgtacaatttaatccaaatttgctataattttatcacattaagcttaacattgcaaactgtaaaaaaatatcaaatctatccaaaacttacaaaataaaaataattcatctaaataatggcaaagaatgagtgtataaatgtgcactcatgaacttcttcactagtatcaactaataatggcaataagaacaaccaatgataaaaatatataaaacaaagtgctatgaacaagtgcaagagcaataataaggtgacaaaaaatttaacgatgttcaatcacaatccaagatagcttggatctaattcttgagaggaaccaccttaagactaatctttattcatcaaacatgaagcttaaaacgctcaacaataaagtagccaattaaacacatgccaaactctttacaattttcctgagtactcttaatcttttattttaatttctctttctaaagtgtcccttaaaatagagaactaaagggtcttgtatagacacatatgcaggttccaaaaagataggaaaatcatgctaactaaccataaaaatcagttaagttagttaaccaactaaccaattaaataaaatttttaacaaattatataattaattataatttataagtggtcccaattgagaatatttttctttataataaattaaaaattatatttaaataaagcatgttttagttgcaatgctaactcacatcactataataacttgtgatttaatgggattacaaataataataaaaaagacattttggaggtacgttataaaaggaaaatttgacatttcatgcaaaaacatcacgcatggtattattttatgctcacaaaataaacataggttagttattttttagtttcaatttagttccaaaaatacccctcatttcatttcccccaatctctctaacttcgttctctctcctctttctctttcaatctcggttgtcttctcaccaccgcaccaaagcaaaacccttgaattgaatcaccaccaccattctaaccatccaccccattcaaacatgtcgaccactgcaatactcaacctaggagacccacaaaacccactcgacccacatgagaaccacaagacccacgcaacccacgcaacccacgagacccactcgaacccacgagacccacgagaccccgtctccgttcaccgtcatccccaccaccgtccacgaacccactcgaacactcgaacaacgtttatttttctttcattattttttgtaatttatcctttaaatttagaatcagtgataaaactgaaatgtgttgttattaaatttttgatttcaagtttttttgtttggagaagaatctaggttaggggatatagcttttttttgggtttttgggtgtttgggcgattttcggcaatttatgtgtgattttgtgcgattacatagtcactgtacactagttttttctgtttgtatgatttgtgatatttgtgtgattttgtgcaagttggcagtgtggattgtgtctacactattgagcaatatttatgcattttttgtgcgactttatgcaatttatgtcggagttatctgtttggatattgcatctgaaacattgagtgatgttttggcgatacgtatgcaatattttgttcgattttatgtgagttgtagtcttaattttatgtccatgtgatatgtaatatttatgcgattttgtgtgagttgttttttttggatattgcatctaaaaatgtagtgtgatgttttggcaatatgtatgcgatatttgtgcaactttatgtcagcttccaatatgaattttgtgtctatgcaatttatgcgatatttgtgcaatttctttgcaaaatctgtgcgatttatattctaattaataataatctttatttgtaaatgcagatggctccagaacttattctcccattgttagagcattttctagggtgtatcacttacagtgggaacggttactttgcttcaataaaagctaacttcaaagccttttacttgactgcgaaggtgaaggaaacgccctttaaagttttttggaatgccaatgaattgaaattctccagggttattgtgcatcaactattattaaggaagaagaaagtgagtgaggtcaaaaatgatgaagtgtggttttatgtgggtaaaaccgaagctagatttaggcggtctaagtttggtttgatcacaggcctaaagatgagcggtggcccttcgatagaagaattgactacacaatgtgattctgatcggatattgcaagactatctcaacaatgcaaaacggatgacctttaaaacccttttgctagcttttgaggtgtgcaatgttgcaaacgataggtacaagctcgcatttattgaaggcattatgttgtcaacaactgagggtctgtaaatctggacagatatgctgaagttagtagaaaatgtagacaacttctttgagtttccttggggcattctttcttatcaaaagctattgtcttccataactaaaagtattcaacagcttaggaaaaactacttggataaggtctctagtaagaatgataagacgaagaagaaacacaagaaggagaaaaaagttactcaaccagaagtgaagtacaatgtgtacggatatgtaccagccccacaatattgggcatttgaggccatccaagatttggggaagaagtatggccagtgcaaatggactagattccctcgaatgttgaactggagcactcccattcgatcacaaaatacgatgtgaagcaacctgatgtggctgcgttgtttgagaaaaggttatgtgaatctttctctatgtattattgttgttttgatatgtatttttgctataagtgttaactgtgtttatgtgggatattcatgcgacattagtgctacacctgtgcgacattaattatatttatgcaatttatgttatgtgtttgtgagatattgtgtgactttttgtgcaatttagcctaatagagtgcacacgttttttggcaattcatgtttgtgttttgtgacattcttgcgattgttgtgcaattttcccttaacaatttataaaattggcttattctaacgatttataactgtcatttatactatttctattgctacctaaaatcgctggctacctgggtgtcataaaaatcaaaactttaaaagacggtttatggctgttgagaaaagacagtttaaatgacagtttataactgttaagaaaaattactttaaatgactatttaaaaatgttggcaaaagtaattctttttttattttttttatttctgctattatatttagcttctatttaatctgattttatattattaataatatattatttttttaaatagtaattaacataaagacaattctttcatcaatcaatttttaacaaaaaatataaatgttatttacataaaatctgaattttatttacaatcaaaaacaaacatttactttaacctaaaaagaaaataaaatcaaagaacactaaatcttaaaatttggtataaacacacttggaaccaaaaaaaaaaaaacctaaaacaataaaaacaaatcagatctagcttataatggaacgaccgtgagccacaatttgcaaaccaccaccgtcatttacaaaccccaaaggagaagaggactttcagaaggtcaaatgtttggtgaagattaaagatcgctagtagagacttaagttacgaagggtgcttgtccgctggtgcagattggaggctgaagaagagaaagacagatcgagagggtgggaatttgaatttcaaagacctaagaagaccattttagctaccgacgacaagagaaaccatagctgctgtccgggtacacacagagagacagggggagaaggagaagaagagaaaaaaagtagtggctgcgaggaagagaaagagagaggcgagtagattttaaatttcatcaacttgatctagccatggttgtcgttggctatacacgcagagagagatagagggaggaagagaagaagagacaagaaagagagagagagagagag

SEQ ID NO: 380664 - DNA, 1541 bp, Cannabis indica
tttattagtttttgccttcatatgtatacttttcgtttcaaataaaacataacaataattgagatagagtcttgtgtgatgtgaactcgcttatatagaaaacacatataattagcagtacactgtacatatatatactaattaatatatgaaacaataaaattgtcatgacttgatgtatttatttatatacacaacaatattaattgtgtacacgtacacacacaggttaagtgtactaaaaacaaatattgctcggggaaagcagtgagagtagtgataaccgattcatgccctggatgtgttgccggttctgctcattttgatctcagtggaacttcttttggtgccatggctcttcctggccaacaagaaaagcttagaaacacaggagttttacaaattcgatattcacggtactaataacattaacaaccaattataatacacatgtatataactccaaaattaacaaataaatagagttttcgccaccttaaattattataccaacccaaatttttagtgttttaattacaagtttaattttccaaactattatcattatactgaatttaacatttctttccaaaattcaaaaatatatttttggtacgcacttgtaactaatatttgggagacacaattctataaacaataacaattaatatgatgagtcaattattaattatattcattatgtaacacaacgcacaaaatttaattaattactatatactttttttgttagggtggcatgtgactattctggtaaaagaatagcatttcacgttgaccagggttcaaattcgaactacttcgcaagcgtggtggagttcgaagagggagatggtgaccttgcagctgtggagttaagggaagcttcgtccaaaacatggcgagccatgcagcaatcatggggtgctgtttggaaattggacgctgggtcacagctacaccctcctctctccttgaggttgacttcaaaatattctggtcagactcttgtcgccaaaaatgtcataccagatggctggaagcctggtgccacttatagatccctggttaattataatgagtagtatgatcacataatccattttacagttttagtaaattataattatatatagttaattcttaattgttaaaatcaaagagttatatttattagttagtgatcttcaaacatgtaaaagcgattgagtcacatatagtactcctcgatcgaatggttatgtaatgtaaatcgctatgcaagtactactattacacatagtataatatatgtacgaacctactagttggtgttcaaaagaaaatgtatgaagttatttgttgttcaaaaaaaatgtgtaagaatttttgctaattctacatattggaatatagctctttcgaggggtatgttagttgcattcaaaactaaaattactatgaccaatctggtcaacttttcgatgaagtttaattgataaggcattcactactaaaatattaaatatataagccgagaaatatgattatttgaaaacttataa

SEQ ID NO: 380665 - DNA, 2264 bp, Cannabis indica
agagagagagagagggagagagcgcaactgaagcatgagtgtacatacctttgtaagatataactgagcaaaatatgcttcatgcactctcttagtcactctaacaagtttaacctgaaatggcaaaatagagaatatcacaattcacaaccaacattttaaacagaacgaagcatggtcaaacttttagcagaagaaataacagaaccctacctcgtatcccattttatcaatcatttctttcaccacttgataaagcgtaggcctagcctggaaaccaaaaaataatttaactatcaatatagattttgaagaacaaaataaatgtagcagcaaactagttcccacatgattatcagtcttccaaaaacaaacaccagtaataatcatcaaaagatgcaagatgggttagaatgcaaacatacaatttgaacattacgcactgccgccatgagtaaaacactaggcatctccactgcaatcgaagcaaaccactatgttaacatttaaacaaaaattaatagaaaaggaatttcatatgaagtccacataagtagccctcttaaaggaactgcaaactattatgctgagggcaaacatacaaacgattattggaagaagaagaccagttccatcctccatcttcagcacaatagcagggtgcggagcataatccggcagatgaccaccctgtggattgttatggacacacctcaaatgcctaccatccctcattttaatcatgaaaccgtctacaccactcttcacctcaactacatcaaacaatcatcaattactaacatgtatatatgaacatgcatacatatagacacacacatagtatagttatatgataactcaaataacaaacacttaaatctagagaagaaataacatgatcagtccaaatcaccctcataaatcaacgaataaacaagtaaaatgaaatttaacttaaaactatgtctttcgaacataccagcttccagtacgctggatttgacatagtcttcgtcgttttcattgaaattttcagccatgctaccgtttccattagacgaagaactgaaagtacaattaattgtcttgaattttcgcccacttacttgacgagaaagataacctgcctgggtgatgctactattgttgatccctttgaatccccacaattcacttctgagacgactaccctttaccggaaaacccatcgtggctagagtgtaaaatcccccttgcttagcacgaacagagggacaaataactggtccttgcagagaccccatccccacctgcaaaagtctacaaaaaatcgtcagtctgcgtcagtagctaacaaaatataaaatggggataattttacattacatataccgtaatattatgcttgatcaccgataactgaaaattatgaatttataatattattttccaggaaaaataaattaatatcctgtccatgaatattagtttttaatgcagctttctttctgtcagaatttttattacaatagtttagtcattagctttctttctctgtttttttttcccttttaaatcagtaatcatgaaccctagatcgaacctcaagaccttcaaagagtctctaccttagaacagagatcgagaatcagaagcttagaatcaccgatcaaggccaggaaagaaaggaaatcctttgctttattttcagacaatgaatgcgaagcaagaaatccgaagaagagttgtgcgatcgaagtatcgaattttatgaataaaatttaaaatacctgaaagaatcagagtaaagaaaactctgaatcggacaactaggattgaaaatggagctggtagttgtagtagcagtagtagaagaagaagaatgaaaagaaaccctaaattggattcggatattaatgaagtgacccaaaacgaggatcagattagaaggaacgagagaggtgagaagataagagattcttctttatgtcagagaaataaaaagacattcaatgctcccgctactgagttattttctactgcaattacttatatgccctttttgtttttattttatatttctttttgccaaaaatattatatttgtttgataacgactggtgatctgttttattcttcatattttcccactggtgtgtaaataattacaatagatcacttgttgactacgtcataaaaattcaaaacaaatttaagttccaaaatatcaatttgattttctatacttatatatacctaatattttatttctaaactaatacata

SEQ ID NO: 380666 - DNA, 4804 bp, Cannabis indica
ctctctctctctctctccttttggccctaggaaaccatcaagaaacccattgtttcttcatcaatttctgaagtttttagcaagaattaatcttgttctctttattgtttgggtgagttattttggattggttacatgcaaaatatagaaaagagttctaccctaacctggaagattatgggttgtctttaggttgtttttatgttattttaagttggtttaaggatgttttgatggctgttagttgagttgagcaagtttgagtttaaggatgttaaaaactcaaacttggcttaacaatggtagatttagattctatgtgttctagctgttgttatagcttggtttatgcttgtggattttgaattagatgttctggaaggtttggctaaatttgggaaaattttgagtaagtttcaaaattttttggattttatatagaaaaacggttaaccgttttcccaggcgattcctaaaaaacaattttctattttggaaatccagttcaccggttttagcagttttaaagccttagttttttgtttcctcgttatttagggtatttttatgttatttattaataggaaaacttctagttttaagtttaggtccccgagaaggttttgacaagttgtttacctatttatgtgattgtgacatagagcctccgttcagcgcgtaattttctattcaggccgatcgacacacttgaatttgaaaacgaggtaagattagtataaaatatgtatatatgtgtgcatgtatgtaaattgcatgttgtgttatatgattcatatactaccaatactagtacggtaacggtatgcagtgcattggtacagtatatgatgttcaaagggtacaacacagtgttaccaacactagtatgggacgggtacgtagtgcatgtggtacaacctcagcggtacttagggtatggttcaaccttaccaacactagtacaggaggagtaatttgcgcatttggtacagaggtcgtacttttgttaagaacgttcttgatcatctgttaagccttgtaaataggtgtatgggcacctcaatataagtcggtaatatgttatatgttatatgtttttcttactaggtttgtcgactcacatatattgtttgcatatgtaggtaaagaaaaggctaaggctgagcaccagtgagtccaaagcttggggatgattgtacatatcaggatggttagacttggagagttcggtctcgggacgacttgggcctacattttgtagtcacgaagcaacatgcctataaagtgtatttgaatatgtgaaaattttaaagacaagattctaactttttgtatgaatatttatatatttataaaagtttaatttaaaagtttcaactttacacgattttttagaaaatttttgattagcaaaggactgcacagtaagtaataaatcattgtagcttgcctaaacattagggcattacatcttatcttagtctgattcgagttagatcttatattggcttagtttgaatccaagttaaatctatcttgatctggtctgagataagatttatctcggcttagtttgaatctgagttaaatcttatctcagttttggctgattcaaggcattttttggctcggccctaagtttagtcttatctcaacccttttcaagttaagatttataatatgagttactcatgctttgtctttattatctttccaatcgacttctatagtttttctttaaggtgtcgtgtcataggcatttacattatcatttcattagtttttttctttcttgtgggctttgttaaaaaaaaaatctcattttttctcccaaaacaatggcattggttaactagacttgggtggaaaatgattagctaactcaactaacactttgactaggaattgtcagaatgtggcacatgttgattgggacaaatcaccgacaaaccgtatgtaacatttttctcttcctcaattttttgagtaatcaataccttcaacaattgagatgacaaacagcgaagaaaaaaacacttggacaaatcttacatactttactgaattcaaggaaaaccctcaccatttctttttgattacactacacaagacccaccaaatatatataataagaagcctacatgtaacacaaatatattactttatatggaaatactgttcggaatgcctttcccggtgagtccttcgttgggatgacccgaagtgttgggatatagcaaagtgtagggtagtttcacaggcccaactctgttcttccatttcccattactgttcatctctgtgattctgttctctatttcccttagcctgtcaccgaatcttgtaaaagctttcaatgcttcttcgtccatagtccactccattgtgtctctctgaccaagataaatctcatcccctgtgtgccgtgacagtacctcaatcaacgaaactcctagtagggtttgaaactgagcagtaatggttttcaaatacgccacatctgggtacatttccaactctttgtactcgggtgtgcctggttctggcatgaaccgccggctcacggttggccggtttgggaggtaccctgcatatgggtattgcccaaaattcactgccgcgtggagggcagatgcgatccatatgattatggtgcaggagtggatgagttcggatatggtctccattttgggccaccatggctcctttttcttgtctccgtggccttctgttcggacctcggtccaccatgattggagctcagtgtcttctttgaccattttatctgtttcgtagtagatgttgcagtattcggttacccaagtttggattgctgaccagatttctagtccatctaccgcaaatgggtaatcctcaataagaagttttaggccatggggactgttggagtcttcaaccgccactcctctgaaattttatctcagttgggttagattaagagtttgctttatagatgattggttttttgtttggtcataagggtttttatttttggctttacctcttgaggagatcagcaggcagagcgtgatccgtgaaaacccagttcttgtatataacagcagacatttccatggcgtattttcctgggaaaactgtcatttctagtataccaccggcattgatgagggtttgcctagctagtgcgttgatattcatggtatctctgaagtggggatggaggagcttgtatattgggtggagaacacttagttgtctatttgttgcaatgataaaaggctcaattacagcatgggtgttcaacctgtagaagtgaattgagaaaataatcaacatgtattcattagttgacaataacaaaatctaacctttttgtagccaaagtcataccaatggctaattagttgatggtagccagagtcatttacagcagcataagctttagctagctgccaaatggtttctccaatgcctttttcttctggagtgaaaactttgctgacagctccatgttcatacccttgaggatgaggcaggctcaattcaattgctagtggtttcaatgttccatcatcttgtagaagaaggagtgttctggtagcataaattttggaatcggttgagtttattagtgtgaggaatggcattagagcatcatgatgatccaaaatgaataacttgttctgctcaattgcctgtatacattaagaaaaactacatcacgggttcatttttcaagagttggaaaaggaaggaaggaacaagttgaaataattagtacttctgatacagtgaggccattcatgtaagcctttatgtgttcttctgttattgtactgtcttgcttcccatattgtgtagcatctagagtactgacagggggaaacacctgtagtttacaaaatcagtagattgttcatcaaaaaccaatttagatagtaaaagtagttgttttattttatttacttcgagacgacgaatgatgacagggttcactcctgccagcatttcacgtccaaactcctcatctgttctccaagcactattatcctctggattcaacaatgaaaaaattcattacttgtaaccccaaaaatcatttggtgttaatttttaggtttgaccatgaaaggttcttgctttaactatattacctctgatcacatcaggcatgggaagcttgcaaaaaccctcctcttgacgaagaatttccctgagtaactcacaaggtacgcattctcttattttacttagtgtatgcccttttggtttcttggcttgatcatcatacagttccagtacttgtttgaaggagtcaaactcgttaaaagttttgttagtcaaatattttaactccgggatcaatacttggaccagggatttcaatgcataagcgagaaaatcagaaaacttcacatgtccaaacctttcatctctaggaacatagatgtctagattcaaaagtggcaatcttgtctcaatttcaggatctgtttcattcatacaaacatatttcttagtaattcaaaagctcttttaactaaaaacacattcataagttgtgtgtcattagaaattcttacactttttgtacttttttcgaccagttcttcctcttcgagggtagggatgttcctctgatccaccaagaactgggcgtgcatactttggcttgttaggtttccctaaatcattgtagtagtcatagtcatatactctatcccactccttgagctcaccagttccattgcctcttagattttttagctcttcttgtctgtagtggtgcaacaacggaggtgtcttacaaggtaggtaagtc

SEQ ID NO: 380667 - DNA, 3852 bp, Cannabis indica
agtgtcatatgtcaaagagccaagaacattcttggaggccatacaaatcgttggatagttaaaagctatgcagtgtgaattgagggctctaactgacaacaagacatggactatcgtaccattaccacccaaaaaaagagctttagggtgtcgatgggtttataaaataaagtacaatagtgacgggagtgtcgaacgattaaaggcccggcttgttgctcaaggttatacgcaacaagagggactagatttcttcgatactttttctcccgtcgcaaagatggtcgctctaaaattattgcttgctgtttcaactattaagaattggcacattttacaactagacgttaataatgcctttcttaatggagacctcaatgaagaggtctacatgtccataccacaaggtttaacacttccttcttctttcaatacaagttgcaacctggtttgcaagctacataagtccatctacggcctcaaacagtcctccaaacaatggtataagaagttgtctgaagccttgatacaagaagggttcaaacaatctcaagtcgactatactttgttcactagaggagctgaagacagcttcattgctcttcttgtatatgtagacgacaacctcattactggccccaatatcgacgtcttacatcaactacaagactccctgcatcacaagttcaaacttaaagctctagaaagccttaaatacttccttggctttgaagttgcccgtgcccaaaatggattgtttctctctcaaaggaaatacacaatccaattactggaagaattaggatacatcaacagtaagccaagcaagacaccaatggatcccaagctaagacttgacaacgacgatggagaagccttggacaacccttctcattatcgtcaacttgttaggaaacttctctacctgactttgtccagactcgatatcactttcaccgtgaattctctcagccaatcctcgcaccactcatctccaagttgtgcatcatctgcttcgctacctgaaaaacagccttggataaggccttctctacaccaaaacatcaatattgcacctacggggtttctcaaattctgattgggcatcatgccccatcacaagatgatccaccaccgttttttgcatatttctaggagattgtctcatctcctggcgcacgaggaaatagcctacaatttccaaaagttcagccgaagctaaatatcgagccttggctgcaaccactagcgaaattacatggctgcaatatttgttgcatgaatttcacattccttagccacaacctgcctttatttactgtgataaaaactcagctatacacattgccaacaatcctacctttcacgaaaggaccaaacacatagaactagactgccacttcgtaagagacaaaatcaacaattctaccattaggctaatccccataaatagcaaactccaattagctgatgccttcacaaagcctctcacctccccaattttgaattctcatgtatccaagatgtctgtttttgatatatacgctccaccttgaaggaggggtattaaagaatacaatacaacatactgctactattttactctgtttccttcccctgttttgtattgtattcctcttttactcttcctattaataagggaagctgttagaagttagttgagatctttggttaggcagttaagttcgttggtctttctcctcctatgatttgtaccgacttagtcgaagtcctttccctatttaaaggctttctttttctttttcctgcactgtgatttcattcttctttcttagaataataaaaagattactttttcaattttcttattagagggtgatgatgtgtcaaccactttagttattcctttgactaagtttcatagtctagacactcaaatttggggccttactattacaactcagttcagtttgaatttggcttatcatttaccattttcttctatttcttctccttcctctttaaatcctcaattcttgagaaaaattgtagactttcctttggcactcaaagctttcttttaagattaaacattttatttaaaaaacgtatcatcatattcttcttgttgctataaatttatattctagaaaaattattcctaatgcaatctgttcctagtgtaataggcatctggaaacggtttcccattcgttactcgattattctaaggctaggaaattgtgaaaacactcaccaatttatcactttttattgagtcgccaatgtctagatattaaacatttatactttcttgtttcgaagaagaattgaatggctctaattatgtgggtttttctgggcagtttggaatcaaagaaataatcatcattttgggaaatctaatgtgtttttgagaatatttttagttggttatcatcatatttacaggactataaagagaatcaaagagaaagaaatgtagggtatcaccaaaggcaacaagtaaatagaattgatgtttggaaacctcctctaatgggggtttgaagctaaatacaaatgttgcccaagatatcaagaaatcaattacaagttatgatgtagttgttagaaatgttgaaggaagaatggtggcaggttgttgtaagcctttaattggagtaataaatccaactttagcagaggcaatggctttataatattctcttacttggtgtcgagtgattggtttgcctatttctcatattaagctagacttttaggttgttgtggatagggttttgcctcctaaagatgacttctcaaccctatatgatgtgatcaaagaaattagatcatctttattattttttttcaaatgtaattacttcttatgttcttagagaagttaattgtttggcacacaaagttggtagaaatacttaaaggtagataaaaagttggtatggaatggtgttataacaaattttaagttgtaatttatattcacagttcttatctttaattaattataacttttgaaatatatatatatatatatttagggtgactattcaatggttatatttttattgtaatcatcatcgttacatttttcttttacctattagcaggttaccaataggtaaaacttcctttttagaatcaattaattataattaattatttttttaaaattaatttattgaatatttaacaagatctcttttagtaattaatgattataaataattttttatataaattcctactataattattttaacagttaagtcatttaattataatatttacaatgaattttttttttttacaaaaattagacttctttttacacaaattagaattctcttcttgtataataaatttttaaataattaattatttttaaatgagatgaaattatttttttataactagaagaactaggtatgagtttttctattcgagtttgaggttgctttgttttctgggggagcttgactttgttttttgactctggtttggtttattgagtaaatgactccttataaaaaaaatatggaggagtttagccttttttttttagaaaatacattcaacctatttcactttttactttttaaatattcaaataaaaaaaataaataattaagtgtaataattttaaattaaagttataagtataataaaattttaattatgaaattatatgtgtataattttaaattataaagaattttgctataaaaattttaataatttaaggaaaaaaaaattgctaaaagatccttatttaataataaattacgaaaaattaattaacaattataattaatttaattttaaaatataattatttttcattaaagttttataagaaataaa

SEQ ID NO: 380668 - DNA, 3430 bp, Cannabis indica
tttctatggtttgtggttctcagtagtgcttctgcgatgaactttagataaacttaatattttgctcaatgggttgacaggagctactctaccggagtcttaattcttcagctgctgtaaaatttgttggaaacactgatgggtcctcaaagagttccttcttgggttgcctctccaaatttgttaaccaatctccagaagtatttgtatgtgttttcttctttctttgtatataacttaggcgtacttgtaattaaatattatttccaatataaatttataggtcttgtaactaaattaaacaggcttttgttatctttttatgttgttttcagtgatgtttctgctaactatgttttaatttttgtcttttaattcgatttcatgtaataagtcatggacattagcaaggaaaaataattatttaggtttaggatatacaaaactaggtggcaatgcttaatgccttttatgaggcttgcctttagaagaggtgattgtttttcagtattcactattcaggctttcgtctctggatgttttaccctgttgaggttatgtatacttaattctgtaggtggtgtaacacttaactcaaaaccactacaaaattgatgaaaaatagaaataattgtttgaaggctggtcattgacatattattagtactttttcattatgctgtttaatgttgtgccctttttcgggttattcattattgattattctatctatgtatgtgctattgatcattcaaggagcatgtataccatcctaaaagcatcaacattctctttgacatatacaactctatccttgtattttttcttggatgggttttttatgtatagatttctaagaagtgatgtatagatttctaagaagtgaatacaaacagtctgatgtaattgaacctatacttcatgtcagccaaaaaacaagacaaaagaaactaaaattcttggacaacataaactgccagatatttagtttaaaaatcttatagtcagcctaacaatattatgtagctcattgagcagtttcattgactcttttcatttgttaaaacctttaattttcttacatcttgttattttaggctttgttttatttgaaatatagacattttgaatgatgcttgtaatttattctaccagacgaaaattggcttcaaaactgagactaacaagcaatgggttatcgtcggccccgttggctttcagatgtcctcagccgcgcttgttccagtctgcagaagtgttacctcctttctccgccaggtccttttcaacaatgggaaattcagttgattcatcatcagtgaatttatctgcatctgtgtctgatgtacctccacgaatcaaatttaagaggctcgataaaactgccaggaacataatgcaggtttttatttattctaactatttgtttggagatagatacatcttctgtcggttttatcttattttgatattttacattgtagattttagatagggaagctgtacaggacgtgaggacacagagagaaataccagaaataaagcccggttacatcgtgcaactcaaagtggtattaagtttttgctgaaggaagaatgtccttaactttgtttaatgtttatctgaaattttgttgttctttacacgtgaacaggaagtacctgagaacaagagacgtgtttcaatcttgaaaggcattgtcatagcaaggcgaaatgctggtttaaatactacattcagaataaggaggctggtggctggggttgggatagaatccttatttccactgtaagtggcttgtagactagacttacttttaacaaaactttccatcttcatgtgttttgtttacttgacttcctacataaattggagaggaagcttatgttgcctgtatattagtccagaaagctggaggccatctaactttgtagataattagcatgataattttctccccttgtcagttttacccagtaaattctgtgtagttatatgttgttggaccatgagcctctagttttggtaaagctttctcactagaccgatgtattggttcgtatattttaatttatgtttttccacataccgagattctgagattgttttgctactcagttatacacttgcctggaatctggcaaaaaaaaatatttatctgaaagtaagaatttgtcttttcctaccttatgaattcaaatttattcacccttttggagttttgttggttacatgctgagttaagttgagggagagtaatgcagagatgcactcaacctcatagatggttcagcaccttaacatatggtttgcaaagttgaggacactgtcatcaaaagtgattattctttaaaatgtttgcctgctgagttttacagagggtttgattattcaaattatgaaatttgtttaaataaaatatctgatcattgtacctgtttgagtgcatttcaagttgacaatctattcataatgaccatattcatgaataggtattcacctaatataaaggagataaaggtgttggagaaaaagaaagtcaggagagccaagttatactatctcagggacaaaatgaacgcacttaagaagcaataggactctatacagggggcgagtactgatacatatttcttggtgaagaggtagacactaaatacagcgaaaatgaaatcttctggtctgaaatcacgccacacttaattattttattttcctccaatttcttgctgtggaattcaactcgtgattcgtttcaagttgtttcagatccatggaggttgtgtgttttttgtagaactgcaggttgggaatagtcaagtccactggaatgcactttgctaaaataatatttcattatgagctcaacattatcatttaattttaacttttaaatcatgtgttcggcttttggggttgctgtagcttctaagttatcatgttctgtagggatttttttttatctttatatataaattttttaggagtgaggtttaacaaaatgatacccactaattttggcgatctatttatacaatttcggtacaataagcttgaagatgctattgctgatcggttgtattttggagtgaaatatagatattgttctacctaccatccaagcttgaggtttttattactaatgccagtgcacctgttcatctacataggatagtttcactttaagaaaatacaaaattttatgcataccgaatgatgccatatcagagggtatgaggatttgtattgtacaccattattcttgggaaatttgacaatccatgctttaattggatttaggcacttaaactttaaactatgctatcctattatgcaaaatatgttacaattaaatttttcatgcaatttcatcccttaaaaaaaacaaaacaccaacacaccatttttgtcattgaaacacgaactgca

SEQ ID NO: 380669 - DNA, 2510 bp, Cannabis indica
tttaattttaccaatctattataaatacgcttttcttcaaaaaaaaataaaaataaaaatgccatcataataaaattaaactaaaaaaattgtctgaatacaaaaagaatcctttaagggcttactataacaaattccactagtaataattacaatttacaagtaattaataataaaagaaaaataaagaaaaaataatcgtcttaaatatcttgatgatgataatgtttatacaattacataaataaaaaatgtctatacatgacatgactattgattagaaatcacatttagaaggcaaactctattatgaagaaaaagcctaaacaacccttctaatccattttcaagtccttccatggcaacttctaaagcttccaactttttcaatacatcttcaatcttctcatcattaccattttcatcacaactcaacaaaccattcattgccatgtccaaaccttcaaactcattcatcacatgatgatgatgatggtgattattaccataataccctttgtgaaccataatagaaaccaaagaccatctacttatcttaggcttccacaaaggtgttgacaaaaacagagaaagtgaccccaaaattgaacttgtaaccaaactagtttctctcaaaactctaaccacagcactcaaatgggtatctaaattaagaggaaagttacaatttttagtaaccaattgcccaaaaatattggaacttttcttcatttttcttctcaaggcaaagtaagcactcacactagtttctattgaagaatgatcgtcatggtcagattccaacaccttggctcttcttatggctgattgaagatctttgacactctgtttaagcattgaaacgacatcgtttgtgttgtgacaaatgtctaagtagctaagcgagtcatccactaactcattaacccatttgtgttgttggtgctgagccaaagcttgccgagtcaatggtaagcttagcaaatcttctagttgtccgtacaagtctttgagagaagagagtgagttacatagtgatgatgatgatgatgatgttgttgttgttgaagatgagatctctttgttgataataaggttgattttgtttaactcttgttcaactttttgtgttgtggggtgtgatcgaactggtaaggtattagatcgaatgttgtaaagatgtttttgggtgaaagaaggcatttttattagtatttgagtttgttgaatgagtttctccacaatttataacaaaaagattcaaactttatttatgcccacgtgtcaaaaaattgtggggttccctttgagttgtgatattgagatatttatgtatgtgtacagagcaaaagaatctaacttcattaatgccaagtgtcaaaaaattgtgggtttttttttggaagttattatattgagagtattgtgattggttattaatgtttataacgatatattttaaaaattatttttttaagtttagactcgatatttaattatactaatattgatatgacatcaaacagaatgttaggtaccagtaatattttttagcaattctctattaaaaatcgctgaatatgcaactaaagtagaaataaaaaatattatgagtatctaagaataggcagctgcattttaagaaggtatttaaaaataaaacaaaagttaaagtgagatccaacaaagtgtaaaaatgagagaaacaagatatttatgtatgtatagagacaaaagaatctaactttattaatacccacgtgtcaaaaatttatggggttgtgttaattttggtaagttttgaagttatgttaacttgtcacatctttcacccaacctttaacactaatagagacaatgatgattatgtgtatgtgtacctctctaaaccaaacaaagggttctctcatttttatttaatttaaattttagttttatttaactaaaaagaaaatagatttaattgccatttggcatatatgtgtaaatggtatagaaatgtgtctcttgttggtttcatgcaacatagcagccgactaaagccaccgatttcttgtttatatgtcaaaattcattgaagttggttaccaattaagaaaagttgggataagagtttgtggaaaccaagagatcttgaaagatcacctacactttattttatcttatttatttattagttagtttagtgaatgcatatatgggaaatggggtttgggtttgggtttgcttttctttcattaataaaatgaaagaagaagaatagaatagaatagaaaacttttttgtttattaatatttggtgcacgagtgagtgacatgtttcatctatatgtcccctataaggatatcaaacctaacattaattttattatagggagattatggattatgtgtacacaaccctctaaaaatttatcaattcaattttgttttcaatgattgtgtttattataataattttatattttgtaaaattttaaaattttatttaaataatttatagtataaaa

SEQ ID NO: 380670 - DNA, 1578 bp, Cannabis indica
atatcgattcaaactaaagtcttgaatagttaggcagctatacattacatatatatatatatttataactcaccaccataagtaacaagatatatatagatatctttatattgcagatatgataaatttaacgaaaatggtcatatcaatctgtccatccaaaaagaaagccgaccatatacatatgtatagtcatatccatcaccctatgtatacaactttcaaaaggcactaataaatttatgtaggccaatttagcatgaatgtcattattacaataatgcatgtatatgaccaaatctgtaccctctagttcaatttagcaggtacaaaaatcttgaatcaaactaatttagatatatgtaacagaaaatgagaaacttaagtctaacttactacaaatagtttgatgcatcaagacatttattaaagaaaaataataaagggcactacatattttagttattataattaaaaattagtaagcattatttccaaaggcattggtatttaatagcaatttattttactaaacgctcctgccttttgcctcctctcttttgatatgtgcagaaatataatccctttacctctttttagtttttataaaattatgaatataatgtagtattgaaattaagtttagaaacaatttatttcatatgagtataaaacatacttaattaaaacgttctgttttgcatgtttgaccatgtaaagtatctaaattttttaaaaatttatggaagattctaataaataacattattcatcttcataaaaaagattgggattcaatttcggtgtcaaaaattcaaaaacatgtactttgaaagttgttttatattcatcaaatgagaaatttcaatatttacttttgacattaaaaactattcaaaatttcacaaaaaatttatgaataccctaaataagaatgtatccttcatatataattaaaacattattaaattataatttctcaatatatataaaaaaaaaataaaaaaaaaaaaacactcttggactggtgagacgaaaagaatgttcctacctaatatttttttttctatagttttgctgatacgtactttacatttgaatttcccgctgaatcaatttaaagaaatgtatattctattttatatatgggatatattacactattcaataaaaagatattaatttatattaattatgcttctgaaactaatgtttgagtagttatatattgaaattaatattcaaatatataatatagctcaggactcagaaatcgattctctctcatttaacgtctttgactgtataatgtcacatgtcattcaattctatcatcacctgaattgactctataatgtttcagctttaattagtactcatctgatcatttttaaaataattattatttcatttcttatttaactttttttaggaataaaaaacaattagtttgggaatcttttaacgtctctaaattattgcacttatcataaatatatatatttatatgtaaataaataaattgctattaattttgcctgttgtcttctttattttttatttttgaataaatatata

SEQ ID NO: 380671 - DNA, 7688 bp, Cannabis indica
tcagagaaaaacctgagccttctctctctaaaccctagccgccactctctctctctcttcttccttgagatttcgaaccacttagtgattagagtagtgcccacacacagcaagtgatacctcaatcatagtgaggaagatcgtgaagaaagactttcaacaagaaggagtttcagcactaaagaaggagagaaagagatccaggttcagatcttgataatactctgcgacagaaaggatacaagggttagagatctgaacggaaggagtcatattattccgctgcacccaatgtaaggtttctaatactttatatgtgtttatttcataatcgttttagaagttcatatttagggtgttaatcaacatacttgtgagtagatctaagatcctggtaaaataatttccaacatggtactggatgggaagctttatcggagggggttgtctgtgccatacctaaggtgtaattgttggaaattaaaatcagtgatgtcatccatgaagttcatggagatcatacatccaaactgagtctttccaagagatccttctttaggggtacttttggcccactatgaaggactgcaaagagtatgtctaaaagtgtgatcaatgccaaatatacgccaaggttccacgagcaccaccaactaaaatcacgctcatgagtagtctgtggcccttccctgtttgaggaattgacctagtgggatccctcctcaccgagaaaggaggagtcaaatatgccatagttgttgtttattacttgattaaataggtagaagcgaagcctatgaacatgattacctcaaagaaggccctgtacttcatcgttaaaaacattgtgcatcgcttcagacttccacacaagattgtctcaaataacgagaagcagtttgacagtgatcacttcaccaacttttgttaccaacacagaatcgtgaagagcttttcagctgtggccaaaccacagacaaatggacaagtcaaagttgtggagaagctcctgaagacaacattgaaaaaaatttctaagcatgtaaagcccattggcaggaggaacttctgcaagtcctttaagcatacagaaccactgagagaattttaatagggaacacaccatattcgatgacttatgggtgtgaagcggtcatcccagtagaaaccataattccctctcacaaacaagacacttacgacccagctcaaaaccactctttactccaagaatcattagatttaattaaagagctctaggaacagtcacaagctcaactcaaattgtaccaaggcaagattaccatgcacttcaattctaaagtcaagagtcatacatttgatgttggacatcttgtcttgaggagagttttcccaactttacaagaaccgggagtgggggtcttaggacctaattgggaaagaaccaacgagatacaacataaagtgggaaatagaacatttcaactaaagagaatggacagatcagagatccctcgtgcctggaatgcaaaaaatttgtgatgttactaccaataggctgggggtgtctagatctaaacattcctcaaagttatatgtaattctttctcttgatataattcttcaggtacaatgaaataaaaatagaaaaaatttacacatgaattcacactttttttctcctacacaagctttaaacaagtgaccaagaatttgaagacatccaaacttcctagctcacttgaggtaccatacttagctatgtgccctaaaaagcatacagcgctcacttatatcttgtatttaatctttatttgcatttaatttctcccttgtatcttatttttaaaattttaaactactagttgaaaatattacttgaatttttatacgtcttcagccccccttcttggaaggacgtattgcttgaagtctattacatgttcaacttggttttcacctttagtcttgagtgggaatatttcttgaatttcaatacatctttaacccctcttcttggaaggaggtattgcttgaagtctattgtacattcaactttattcccataaaaagcacaaccaatacgctttttgccttttccctgaaaagggaacattgcctgaattctattgtagtcgattcagtctggtgactgtgtcaataggtttcctacaaggagtgagaaaaagaagcatgcctgaagtcctttgtatttctagaagctctcttatcacatatttgggaaaaacttatctgatgctaagctggctttgttactttcgattgaggaagcatgacctaagtgttaatatgcatccagccttgtctccccgtaaggaacttcgcctggattctgttacacacttggcccccttccctcactaaatttaattaacgaaaattggtacagtaatttgcttaaggcggctaattgggaagcacgtagacaggagtcatgctccgtgactcatatggtgatttgggaaaaagcttacacttcctccgagtaagattaactcactaaagtttacaagtcccatcaacgaggactttgaaaaggttgacatccaaagagaagaattttttagttttcataaataaggggcttcaaagttggaaagtctaagggcatcaagctttggtcgttggaaccaaaagcttcaaaaaaatcctaacgcaatttatcaaatggcctaagtgaacaagtaatagcagaaggaataaagcaaaagcaagcatggcaagaaaaacaaacatacataaaccaaagcagcagttttctagtctattagatagggcctcgtggttaaggtatagttaaattgtctctgcaaaagaaaggtttaaagtaataaaaaggaaaaaaagaaagtttcaaggtagagctactcctggacttggtcttgagttttgatcttaggctagcattgaggatgactcttgggtttggtcctaggtatgagctataggtgcatcttgggttgaagccaaaaggtctttgggtttgtccttagaagggtcctggaggtcctgggcatcattccttgaagaaaccaccactttagcagaaagtttgggctctaattctccagataatttctcgctagactcatcaccatcaccatggaggtcatatttctcaagataagtgtcgtcatcaatggcaagcaccctccgagtgtattaatcctcatctgttgcaagattcttgagaatggaagggtctttcttccatagactgtgaagaagtagagaatatgacatctccatggatcaaagacggagcctttcaaccttagcctccaccttgacaacatcctagatagattgcagaatgttctccctagccttttacatggctgtcaaggctataaaagtcttcccaccattggctggttggtgagcaccttccctatgtagcttctttatagtgtcattgcaagtattattggttatgtggataccctgcaggactatattttattgattatatttgacattcagcaagtctttttccttctttaaaaccttaagcttgttctttaggccttcaacatcgcctagtgcacctttgatcacctaatctttctcattgatcttattttgcaaattgttgacctcttaaagtgtggtcttcaaatcatcaccttggatcaccaatcgagcgtccttgctgtctctttcccttgtcactcggagaagattgctttgaagagatgacacttgagacttaagcaggtccaactctacctgattgtcttggtcagctttggccttatattcttcatatagtttgtagtgcatcggactgacctcgctatggtcttctcaagctcagcaagtagggccctattgttattatgcaaagtttggatcctggtgctggcttgctcaagctctataatcagggcccctacttcatttaaagccttcttcgcaatcaaggccatttggtgaaactaaataacgtgagaaagcaatacacaacaacaaaagcaaagacaaagaagtcaaaacttacccctatgactttatgttttgaagcctgagccaaagtaaatatgaggtcagttcaatcgcactgcctgccacttgatccaagagctttgcagtaaaaggagctacttctctcccaaccttgggcaccattcacctctccaggggctcagtgtttatcattggccctccttgaacgttttgtgaatgccctcagagatctcagcccttttcactgctgaaaggttgttagccctcttttggagaataatcctttcattctaatgatgcttcctcaaaattttgtctgcctctcctaccttgttcaaaatttcatgaccaaggcgagtaggctttagtggaaacttgaaactcgaaggtggaatactgggcaagcaactgacaagtccaagtggttggctagaagcagaatgtaggcccctcgaaggagtgatggctgctgactaaaggtgttcctgtgatggttgatgttttgatggttgttgttgttgttagtggtggtgttgttgttgttgttgttcttattgttattgttgttgttgttgtttttattgttgttgttgttattgttgttattaatcttgttgcagttgttggtgtttatgttggttttgttgctattattggttagttgtgtttgatgatgatggatttgggggtggagtggtggatctgcagatatcccctctcctctgggcgagctatgcatgtccgcagtaaacttggcttttttagtgtccctatcgaatgttggggtggagtcttgcacatgggagtcgcaaaaatgtccttccagtggaagacaagtccgtttagactctcatcgaaagcattgatgcccaccaagtcctcctggacggtcccctccccaactcattttggcaaagcctaaacatgggctagtggttcgagatggcttgtatggattttgccactcccggacacattcaattccttcaaagcctctctagtggcggtaggagtttttctaccctggcgggagcttgggaaatggaatttttggtgttcacctttgcaggaggaggaacttcccagacatctaatgaggaagaaatagataaattcctcaatttgtgggacctgtgagccctgaccttgtctttcccttttcctctaaagccttccatcttggaaaggctcctcatgatcttttcgcttaaagacatcttttcttcaagagtatctgcaaacacaacaaccaaatgaatagcaagccagctctcagcagcaaaatcagaatcataattagcatacagcaacatgttctaaaaaagtgtgcaaaccatttagtgaacaactataaggttttccacgagcaaaaaggaccatgtcatcccagccaatgaagctgccatattctctgaaatgtgggaaagacatggttgtaaaagattcaccctaatggtatctagagacaactctggattgctaggaatcctaatgatctcatctactctatttatgaagtcactaatgaggtacatagtgtggtctaaattcaagaagtaattatcgaatcccccttgatccatccaggatatgggatggaagttgggggtacggactacgtagaagggcctattacctcttcccaaagtgctaactctcagagcaccttcattcgggtacgctacaacatatctctgcaagatctcctctgcttctattaagggatttgggtggcgaagcatccaactagcttgtaggagcttgtcctccttagttgcatctataataattttggccaagtcattggctatgatctcattggcctcttttgaagcctgactttggcccctgttgctgacattgtaaatgctttggaaacaagcaatcaactcatgtttacaaatcaattttttggtgaccaatccctcgacttttaattgggcttcggtgaaagccttgtactggaataatttatttgccagttcctcatttttagcactctgaggtacaaggtctatcaaaatacacgaagacatatggaagcccaatcaacactttaactgagacagaggaaattttgaaaggagaagatcaaaattgcaagtgtaagagtgtttacctaggatctagaaattgcggtggagagcaggtgccatctttactgggaaactagtggagaagaactaatactttttgagatcaggggaacatttagtgtagctggtggggcagtgagcaccagaatacctctcgagtttgtagaatcctaatttcttacagttggttctcattggttgaggcttcacaccacctcaaacttatgaatcttacaaaaaaatgtaccatccagctaagagcttataagctagaggtatcagtcgaaatagagcaatcccaattggcacaataaactctgtgaagtaagccctcagggtgaggtgtgctccgcttgagatatgggactagctccatgcaatgaatcagtccgtgctcacagatgttgattcctccgcgatagccaacctatgccacatcagttttggtatgttgcgtagttcagcttcagtggcatacgtttctagtatcctgcatgaacagaagcagttttccttctggtccatctcctaaatagagttgttgaatttttaagcaggaggcaagatttttgccttccctttccctttggaccttatgcatgtctcggatagagtggcctccggaatatttttaagagcgacatccaagtgaagttcccctataggaacttcctcctgagttccctgagtcactattccttcaataggggaaattgttgtgttttctttaatttcaaccgcttaaagatggaactcttggttcaaatccatcactagaaaaatgaaaggaaaggaagagccaagcaattagacacccactatccaaatgacaaaatgggcatcggcgaaggcctcccctaagattacatggagaggttcctatcagaccaatcactcccagaagcctaccttcaccaaataacctggaacaatagatcagtaacccaaggaaaattaccagaacaaagtctaaagaaaaattcaagaaattaaagccattcgaagtcctaatcactccaaataggtatgaaaaaataaactttcctagtgttcattcaaaagtttgtcaggcctggttcaacccctaattctaaaatcctagtaacatgcaagtgtctacggaatacagacgaccataccctaactatccacacagaatcaacacttccatagcacaaaaaatttctacataatcctactctagaaatgaaactttacaggaaatatttcaccactcaaacaaactagacatcctatacctagcttgagttaagcatttctatcctaaatataaaatagcaaatattcaacaaatcctcaggatacttacttggtatttgagtggggaatgagaggtttttgtggaaattcatccaatagtgtttgacctagtcgattatgtgatcgtagtcagcttgaatgtcgaagcttttgttagactgggggtggaatagttcgaggtctaatggctctgcttctggaaaaaaggctaaatgaaggtttaaaaagtattgaatcaagtagttatatgttggaaatatattttaccaggaacttagatctactcacaagtatgttgatttaacaacctaaaattgaacttctaaaacgatgaactaaaca

SEQ ID NO: 380672 - DNA, 2958 bp, Cannabis indica
cctctacactacgacgtcgtctcactctctgacgtaccactatacgccgccagcggcttctaccaacaaatccgttcgacaaaaaaaaaaagaaaaagtcttcgagctcgtttttgtttacctgtgaatatttttaaattttgaaaaacggaaaggagtttttgaattctgatttcttgaaaagcaaggattgagtttttaaaaacgcagtaagagatggggaagggcggtggctgtgttccaagcaagaagaaggtgccttcaggcgccgccgccgccgctgaagattcccggcaagtatcggtaaacgcgccgattccggccgatgataggtcgtacgatgccgtttcgaatcctgcgactgttaacgatgataaccccgcggtagctgctgcgaagaagctgaaggtgttcgttgtgttctactcgatgtacggacacgtggaggggttggctaggaggatgaagaagggagttgattcggttgatggagtggagggggttttgtttagggtggctgagacattgccgattgaggttttggatcagatgaaagcgccgccgaaggatcctgagattcctgaaatcacggcggaagagctggcggaggctgatggtgtcttgtttgggtttccgacgaggtatgggtctatggcggcgcagatgaaagccttttttgattcgacggggcagttgtggaaggagcagaagcttgctgggaagccaggtgggttcttcgtcagtaccggtactcaaggtggtggccaagaaacgacggcgtaagcttacttttcctcttgcaatgttcttctttttactgttgaattttcgtttttattgaattgggtttgtttgaatgggaattgggtttttaattattcaagttgaaatggatgattttgctagttactgattgtttccataataccttgaccgtgaattaagaagattgtgtttaccagagtagatgtcgggtatctcattggtagtgattaagctcaatagaattagtagcaggaatcttaggattagctttgtgatcgaaaaagataggtagttttaatagaggagtgttctgtgtttgtggaatggttctttgcttgatttccctgctcgaaattattttggataatgaaaatgattgctgaaaaaatgggaatgttcggataatgaatgtactaggaattgaagctatgatgatgtggtaaatcaatgggatttgaggagaagaagacttttcaaacttacaaaactatggtatctttttgttttggctttcaatatttgcatgagtgaatgcttttgatttcttgatcgagtgttgtaaatgtacttacatactgccaaatctatgatgatgcatttttcatttttacatgtgaagtatttggtttctgattcattttgattctctcatattcatgcttgcctattgcctatggaactgtttaaactttcattacgtatgtcaagttaccactttgttttgaaacatgaaactcgaagtaatttgctaacttgtttgtggatataagggttttccttgtcctagaatagagtcattctgcgatggtaaaacatgtcgtgatctataagattgatggtctagtctagtgtaggtaggagattcgtgccggaaatgtaaacattccaatcatattttcatttcttgtttcttgcatctagaaatgatgaaacttaattgagatttacaaggattaatattatgggggaaattcttgctgaggggtcacacttgtttcatgggatggtccagtgcttttcagcttcaatgctgggtagatgaattaatgccattaccatttgtatctgagtcagacatataataggtatttatgcattagagtgtatatgtgttgagaggaaaagaaatccatgagttaattatcttcacactaaacagtgttattagttttaattatagtcccaaacatgcaaagaaagtagttggtgaatatgatttttcatcatcaaggacttaaagggagcattctttcttctcaacttgaaagattacaattagttatagttattgtattgtctgaaaactcagaggctaatatttgttcattcttttccatcattgcttttcatgagactatatcttgagacttgtacattttgtcaattattgcagttggacggctattacacaactggtacaccatggaatgctgtttgttcccattggatatacttttggagctggtatgttcaagatggactccataagagggggatctccctatggtgctggtgtatttgccggtgacgggacaagagaacccaccgaaactgaattggctcttgcagagcatcaaggaaagtacatggcagccgtggtgaaaaagctgtcctttgcttaaaaatcttgttcgtgttacgttacgttttgggccgatccacatttttcgccttgtgattgattgttttttccattgtttttttcttttttgatcagaaagatccctttatttcctcctattccagttctgctctgtttagataaagctgtacatggtttttgatttgttctcacatcacacatgatttttgtcaataatttgtttgcatgtccaaaatttgtttttcttgtataagttttttctttttatgtaattcagtgtgtacttgacgtaataataatagagtatttttttgtgcattttttcaatctcatatgggtagacactacttaattgaatatagacaaaatcaggtttggcaaacgactgtttctaagggaaaactagtcgtttttcatatttttgtttcaattttggtctttggttcatggagaattgttcaacctcctaactgttatgttcaaactattaggtggcgtttggttggaggtaatgaaatggaatggaatggaaaggaaataattttcattccattcctttgtttggttgcattttaaagtattggaatggc

SEQ ID NO: 380673 - DNA, 1789 bp, Cannabis indica
gttttagtagctacgtttactatatcttttatctctttaaatttaattcttttttgtgagaaaaagtgactttattgtgtagaggagagtgagttcgactctacctctgtgtatacgtctttattattattaagctttcaggagaaagttcttcaagcttgcgggagaaagtgtttcaagtcttacctcgaaaaggaagaaagtactcttcaagtaaatcgaagggagttcgaacacttgaagtttcagcaagattcttttaagaatgtagaatacatcaagcttgcaacatataataaaagagagtctatttatgcataagtcaatttactttttatttttaaaaatctatctaatgaatcttatctctcggcatgatcccgtaaagtaaactagtaacaatctataaagattactgataccatgtataaaactgtttgcttttaattttctttacttttattctttgttggtttctattttgcagttacacactactatacgaaaaggggctttaatcccgatttttatgggcattttataccgatttttgctaaaataaaaattaggatatatgtcagtgggataaaagctcatacaaaaagtgggataaaaaagtatttttaatttcgattattataggaaaacgggataaaagattttttttatcccagttttaattgaagactcagatcaaaagttccctttaattccaatttttccataaaaattggaattaatactatatatatatcaattcatcattcttcaaagaaatagccaagatactatgttcttcgttacaaaaatttatctatagtttcgtcagataaataaaaatatgttcatagaaaagattaaacatgagatcagatctcaaattacaatatcaccattaattaatgaaatcatatcaaagtcccaaaaataacacaaaatagagacaaaccataaatattaacattacaatatcaatggaagaaaaaattaaaatttattacagtatcagcgcgttataaccatgaaccatgaagcaatgtcgatggcgacgaagatgagagagagagagagagagaaggagagagagagagagaaaaagagaaagagatgagagtgaaaaatgtactcgcgcgctgtgtcgattggggtgtggctgctgctaggcttggttcgacgtcgttagggtgtggtcggttgctaggcttggtgaaagagagagagagagggagggagagttagatttagggtttccgaaatggtaaatggtatatgggggaggctgaaagtggtaggttatatatatttagggtttgtgaaatgggcttgacccatttgttgattttaattttttacgaagcaatttttgcgtcaattataaaccgacacaaggttagcgtcgatgcataatcgacgcaaatagtcttacaactgatgctaaccttgcgacattgcataactgatgcaaaatttaccaattcttcaaaggcgtcaatttttaaattttgccaacattggaactgatgcaaaaactaatttttgtagttttgatattagcgaagaagaggaaagtgaatctctaataaaaaatgagatatcagagaaagaaagcgtcattcaatatatatcgcttacagaggagtatagagctactcaacagaaaataaaaactatctccgcaaatagtgaagactgttagaattagatacattacagttctgaaaaaaactcaactcactaacaaatttaaaattggcaataactaactctcagctctctttagcctcttaat

SEQ ID NO: 380674 - DNA, 1774 bp, Cannabis indica
cctacaactattaaagctgctcttgctagtgccaaatggaatgcagccatgcaacatgaaatcactgctctcaagaacaagaaaacatggattctagttccaagaacctctgacatgattattgttcaaaacaagtgggtttaccggattaaatttaaccccgatggcactgttgaaagacttaaagctcgtcttgttgcaaaagggtttcaacaaactgcaggtattgacttttttgaaacttacagccctgtcatcaagccttgtaccattcgaataatgttcactttggctgctacatatggctgggaaattcagcaaattgacatcaaccatgcattcttgaatggggagcttcaagaagatgtatatatggctcaaccacaaggttttgtggaccctaaattcccaaatcatgtctgcaaacttcaaaaagccatctatggtttaaagcaggctccacgggcctggtttgatactctgaaaaacactttggtcagttggggatacaccaatagcaaatctgacaccagcctcttctttacaaataaaaaatggtcatctacttctcatattggtgtatgtggacgatattctcattactggagctaactcctcacaagttcagcaagttattaatgatctacacaacacttttgctctaaaaattcttggtccagttaactactttctcggttttgaagtttgcagaactggcaacacaatatacttaaatcagcaaaagtacatcagagaccttctagttaagactcaattgctggactccaaccctcaatctacaccaatgtgctcctctacaaagattactgccaccagtggtactcctatgccaaaatcccactcaatatcgcagcatcatcggtgccttacatacttgacaatgacacgacccgacatatcctttgctgtaaatagattgagccagtatatgcaacaaccaacatctaatcattgggctgcctgcaaaaggatactacgatatctgtctggcactcagcaccttggtttaacctttacaccatcttctcgattggacatacaaggtttcacggatgccgactgggccgggtgtcatgatgaccgtaaatcgacttctggttactgcatatttcttggaggcaatctgattagctggtgctcaaagaagcaaactgtcgttgctcgttcaagcactgaatcggagtatcgagccttagctttagccacttcagaaatcatttggattgaatctgttctcacagaactcggcatctctctacctcaatgtccaaacttatggtgtgacaacatgggagctggctctcttgcctcgaatcctgtctttcacgcacgcactaaacatattgaagttgatttgcattttgttcgggatcgtgtcttagcacacaaactggatgttcgatatgttgaatctgaacatcaaattgctgacctattcaccaaacctctgtctacttccactttttcctatctacttgacaagttaacccatggcttaccccaaccgttaacttgaggggggatgttagaatgtaaaatcagttacgtctgttactggtttttttactgttaggaaaagtcagttaagtagttagagttgttgtgatttttgtaacagattgattcttgtaaagatctctcttcttgcttctgtttgctgtaacaattattctgtataaataataaagagtctcaatcagttgaggattgagcatttcatttcatcactttccactttcatctctctctcttt

SEQ ID NO: 380675 - DNA, 5173 bp, Cannabis indica
tgaaaaaatggtagaagtaacgtgactaatagatttttgcaatggaataaggtgctacccagctgaccaaaacaagacaattaaataagtactcatatttatagtaaaataaataaaacaaaatacaatttcaatgttttactaacataaaacttaatcagcatctagttttacaaaaaaaatcaaataaaaaaatggtgcaagaaattactgagtggagaattaaattaactaaattttaaataattaaaataaggttaacaaattttaaagtgttgtaagtctcacacttttattcaagaattttttttatttacaaaaaattcgtcgtacaaaaccaatctcaatccttattttttctttgtaaatttctcactctacctctcaatattttctctccccctctcgaaactcaatttgatcgtcgtgtttgaaataataaatgttagtggtatttataagcttaggatcaagatcttaaaagttggtgcctataagaacttaagttgttaagttagttaagacttaacaaacttaacaaactctgttatgagagagatctccacgtcagtttaagtatagttgcttccagaaatgtctatgagagcttccggaatcacggaccaaagcacgcgtaggaggagctttccagataagaaaaagccagatgtagtcaactatttgaaatgcctttttaggaggaataattagcctgaggacccttcccggaaggacaagaaaaccttttaggacttactactgcgagtcaataactttccaggaataatttttggagatctttttatttagaggaactattccacagatagttatatgttattcttcttatagcataccatttaaatattttgataaaaaaaaaccattcgtgcgttgaaacttgtacatgttaaaagttatagtattatgtcaaatttggcacaaaattaatgcactttttcatttacattattgtctatcggctagggaaatagccaaatgactcggagtctaataaatgttaattattcactggtaaggaggttagaattataaacaaacaaataaataaaagtaacacatgatttatagaggttcgactcccttgtatgtgggtaatgacctactcccctttagttgtattacttgtgagattataccaggcagatcactaaggaagacaaagtgatttctagcttcaactctcaaagtgtttacaaaaaaatctttcagcaaagtgctcttagatatgcaagtacgagtatagctcttagttttcggtcccctccccttgtgaatgctttcactatttataggagaaaattaatatatggctccgtaaaaggagtaaataaataatagatatccctattttctagggagcagttacaatctattgaatctcttttattcttggatatatttttagcatccgaaaggattctattgtagatatttgaggaagattgttgaagacaaaatcaaggatcgcgtatctctgtccgatatttctagcagtggaagatttgacaagtatgttggtcattcggtaaaatctctctatacttgccttctttgtgaggttagcttgtagagtcattcttgcatgatgttgctcccatcttatttggctggcatccggccagatgcttcatgggacatcaacatcctatggatgttactccttatatagacctaccatgcatattcatgcatgaagattctctactaggccaaagagatggttgtaacatgccacatgaaaagactacgtcagttgtgcaagctttaggataacattttccctctaagttttcatacgaacatttgtatggatgggaacttttgatacatatatggatattggcaggcatgtgggcttcacgtgcttagtaccttgacagttgtaccgtgtagaaataaactatcacacttctgtctcttcaactgactattaatctgccagctctcataatggtagtttagaagcatattttgtgggaaaacgtgatgacgactgctcttcccattattacccatttttgctctttccacttccccataataaatttattatttaattgattttcgggagaaataaaattgacgcttatataaaagtcattccttattgttttaagctttcactttcatttttatttcttttaaataatccccagagagaaaaaaccaaaaagcttgaagaaagcttgaagccttcttcatatttttctaccgttgtgccaaagaaaaatcatcatcctcgatttctccacccatacctcgcttcaagatcacatttttgtactgtttagcatgctaagcctgaggaaggagctcgacctggccagaggccagtcaggaactgtgacgtccgcacagacaaccccttgggggttacaacgaggctagagagcctttgaatgagattcgattgctatcccaattgaggataaatcatgctgaggaggagctggcgaatctggagcctttgcctcaaagagaggagtcaaaagctacttgggtggctcagtgaggtaaagctaaggaaaaaacttccccaaaacgagcaagattagcaataatggacaaagattagatcaacaaaattgtatttactattggaatatttggaacattacaattatacatgggaatgcgtacatttttttggtttctcaatatactttcatctatttatcttcctgacgtccacaaaaacggatattgatctttgggtcacattatagactagaaagcttagaattctaaataattatggactttcaagatctgaaaaagttccatcagactcttcttcagtttcagagccaacacattgccccgattcaagcgcaaatttcattgcctggctagccaaattggcaaggtcttgcctattggcacttttgtaggcatctatgatagccttgtacaaagattcattctgttcaatttcttcattctttagttgactgtaaatccgcttcacaccttcaaccattccagcttttccataacaaccaaccagattgatataggttacaatgtctggtttcaagttctcatcttgcattttcaggaatatgtttagagccttgtcgatctgcccagctgccccataagcatatattgcagcattataagccgaagaatcaagatttaaatctgcttttgtgaagacctcacagaactctagtgccaaatcttgcatacccactacagaaaaaacagaggtgatgacagcttgccgggagtacggtttaccttcctggtaagataactcaagctgtttcactgcctcaattgaaaaacctcccttctttaatacggtaaatagtaccataaaggtccaaggatctggcaggagttttcgggttaccatttcatgcaatagttcaccacacttgcgcaactgtccattggcagcataacatgacatgaccattgaaaatgaagcacagtctttcactaaaccagccagctccatttcctctgctatttggatggcatcttcaagcataccagtgcttttgtaaagattcataatggttgagaaggaaacctcatcaactaaactcttttctctcaaatattcaaaaatcatctttgcttcagataccattccaagctctgcatagagattgatcatactgttggatgcaacaatatcagggccaccctcaaaacccctcatccgatcataaagtgccttggcacctttcaagctccccaccttaccataggcctttattaacgatgtcaagactatctgatttgctgaaatcccggattcttccatctggtgaaaatactttagcgcttcatcaacatttccatactctacaaatccattgattaaagacccatatacaacttcatttggttttgtccctgtctctagcattttgtgatacatatctactgcttctgaaagctggcctagacgagcatagcatccaataagagcggagaaggttaaacattttggcttgagccccatttcttgcatttcgcttaggaggtcaattgcctggtctgctaaatctccttttgagaacatttgaatgagagaattataagtgcactcatcaggccaaattccatgatttctcatgctcttgaagagagggaaagctttgtcataaagctttgccttgccataagcttttatcatgacgttatattcaatgacattccatttttgcccaaccaaacctgttttccggaagaacacctcctcagcttcaacccaaagtcccttttctgcatatgcatcaattatagccgcatacgtttttgatgaatacccaccatctttctggcacttttcaaaaaataacttcgcccgattaatcaatccattttcaacatacatcttaatgacactgggaactgaattttcatcaatccgcgaaccagatttctcaatatcttcaatcacagactcgacatcttgaatcatgcttctctgacatagtacatgaagtaccgttctgtgagtaaccacgtctggaaaaaggcccacctctctgatcttcctataacattcaagagctctatcaattttgcccacttcagcatacaatgataaaaagatgttataagtctttgtatcaggagatattctcctttcttccatcttagcaagcaaagcttctgcctcggacaaatggccatgactcccacaagtaaatatcatggtattgaaggttatagcatccattgccaccccagattttaacatttctccaaacacattggctgcatcctccagacgccctgctttcccatacaaatcaatcagcgtgttgtaagtagaagtcagtcgaggcttccgaatcaaattttcagtttccaaagtggtcgaatttttcagtgtggaaatcctaccaccggtcctaaaaagctcagtagacaaaaaatgcttaaaactaatgagttcacaaccagagtcatcaacagtggaatcaaaatatggatcatccagctcaatctgcccaacacaccaatccttgtaaaatctgtgtgccctatcgtactcttttcctaccttcaagacccgaacaactgtattcatagtcacttcatctggaaaaatccctcttactatcatgtgcttaatccacaaaagggcttctttcacaagccctgccttcccataaacatcaac

SEQ ID NO: 380676 - DNA, 4204 bp, Cannabis indica
tcaaaactaattgacaataaaatgagtagcattggcaaaactctcttcactttgatcaaagggacatgttgaaccaataactctttgttcatcattttattttttttaaatataaatccaattcgatgaagtatgttcttgcatgaagaacaagtggtttgaaacgaaatgagagatgaaaaatgattaaccaacatatttcatatccaaaccctgattcatatttctaacaagaattcgatcatgcccttcaaattttgaatctctcaacattttgtgcatattaaacactaatcgtgttcaataccacaataaaattgttgtgattatgcaatcacacaatggagaataaaaaacatagagcatcaatcatgtacagtcgactaaaataaataaaaacaaaatcgaaaataaattgagaattcaataaagaaaagcagagaagaataagaacaagatgcacagaaaaatggttcagcctttcttggcacttcttttattcaattaattagagaattaggttacataataatggtagcaacacaacaatggagcgaaggtccttacaagggattctctagctacccaacgaacaaataccatagtcaaggatcccattcttgtccagaatctgcattagacataaccaagacatcagcagattcataaccatctgcagccacatcaacttgtcctctttctttctcttttttccttttcagcttgttcttcacaataatagcacttcttgtcagtggtgtttctaggattagattttgacttctggttccctttgtcattgctatgtttggatctattgtaccccttcttgtcatgcctgtcttttacgaacaaccgctcaccaccaatttctgttgtctcatctgatttcttctgcatctcctttgaattcaatgctacctttacttcagacattgtaagagtgtcttttccataaagagttgtatcaacaaagtgttcatacaatttaggcaaattacttaatagaatgatagcttggtcttcctcatctacttttaacaccaatgttgttcaggtcaagaacaattttattgaaatcatctaggtgtcttttgagttctttgttgttttccattctcaaagtgttagcttcttttttcaagatacaatttattagcaagagacttcttcaagtagattgtggcaagtttattccatagaccaagagcttttttttttcatctgcaacttctttgagaactttatctccaagacagaggagaattacagagtgtgccttagcttcaatctccattttcttcttctcatcttcaacaacttggagtgcctcagcattaatagcccctgttattctttgatgtactaacaaagctctcatcttgattctccaaagattgaaagcattggcacatgtgaacttgtcaacttcatactttgctaatgccatttcttgattgagttcttgatgtttcgatcttcaatcgaacagttcttgatcactccaatttaaactttgctctgatacaatttgttgtgattacgcaatcacacaatgaaagatcaaaaacatagagcatgcatcaatcatggattgtcaactaaaagaaataaaaacataataaaaaataaactgagaattcaacaaagaaaaataaagaagaataagaacaagttgcagagaaaaatggttcaacccttcttggcacttcttttattcaattagcttgagagataggttacataacaatggtagcaacacagcaatagagagcaactccttataagggattctctagctacgtacccaaaactctaaactaaaaaaataaaattgaaagattttagctagggttagttattacagttagtttcggttagttttatatagaactaaccacctaactaactaattgttggaacaaatgaagttgtgttatgtgtataagacttagtaactagatcacaaactaacagaagtagtgtcttgtttctttaataattattaaattaaaatatatattaattacatcaatatataattactcattagtattttttagcatttctcaaataattttatacttatatctctccttttatttagttaatcaattgtgtgtttcttttactttatatgtattaatttgtagcattaattacctaaggtctaccttaaataaaaaaagtagtgtccgtagctatagctagaagtttgtgcaattttttgttggctatgaatgaatatatgatctcaatatatattggttatctgttcatgtatagtttatatgcatatctaacattttcttgctttttgcaattacttttgaattatagatacatattttttttaaggtataagagtaaacgtgaaaacgactcacctctttttatatgataatattaattattagaaataataatacataatgggacagtagtagtgagtacactactacacagtgaaaaggagaatttatatatatatatatatatttattatatagtgagtgatatataaatgatgacagtggtcctctcttcttgattattcatcaggtctttctagagaggttgacaaaaaagttataggatcaccttgtccaaacttgccatgcatggagctctttaatgcaatatctatagtcctatatatatatggtccccggctatattacatattcaattatatatatatatatatatatgtgtataaattgcatgattacatattggcactattatttgcaagatatatataaatatatatataacaagaatattttgacttatctcaatcttaactatttggacagcatgggacttgtatttatatgaatataatatatttatatagaactgcacatgagttgggatagttactattaatcagaataggaaaactttatatcatatataatatatctagctagattttttttttggttaaaaaacatatatctagctagattttgagtatatatacttgtgtattagttatatatatttgtatttacatgatgcatggatgtcatgaatgtgtgcatctaactctattactttacatggaaacgttagaaacatttactaattaatactatatctctgtcgtcaatcatttaaacaggctttatatataattaataaatataaattattttaagaagatattgtaggcattattttatggaataaattgtaaaatattgagtcatgtataagaatatgagctacttcacttatcactaattggttttaagatagaatcatataattctcaatggtatcagaatcatatctcttacgagcatgtgatcctatcagatccattatttttaaaattaaaccccataattctcaacagaagattattaatgaatataagtagcccacattcttatataaatggttcaatatttttgcatttaatctatttgaaataatgtagtccaattctatttaaatgtatggtacattagagattttcttattatacaagagggaatatgaaggattacaatcaaaatatacaaaaatacatataaaatgtattacatcaaagattataaaataattaaagaaaaagaaaaaaaactcaagaacacacaatagatttgactaaggctcaaacacttttgtcctaaaagttattttctccctcacatagatacttagaaaactttagaaacacttctaagaatttttaagccttataatatgcttaacctagctagtgtctatgaatgagcatctcctcacaagattctaactacacaactagtggtttcaactaggctatttaggatttttaccgcctgaactgtgatacatgtattattgtgtcccatgaacttttcagtctgttacaaatagtccctgaactattcacagtattgtaaattggtctttctgttaagttttgtcacacttggcaaagaaagtgatgacatgcatagacactcagtcaattgtcacatcaacgtcgtacatgtataatttaacatttaaaataataaaaattatgtattttttttaaaaaaatcaaaatcatttaatgattaagaaaactacgtacaactaaattaaaaaaattaaattattattttcaaattaagtacacacgtgtcgtttatatgtcactgacgtagcaactcgctaaacaagcatgttattattttgtttgccacgtgtgacaaaattt

SEQ ID NO: 380677 - DNA, 1884 bp, Cannabis indica
gcgattcttacacctaaaacaccacaatttagtactccccaagacggggtatgaacccatctgagcaaagaacttcagcaactggtgagaatgaagccaaatgccttaacaaatcaatagctacttctagactctgaacagaaggtgctgagtcccagaaattcttcaaacactcaatcccaccttctttagcaatacaaagtttcaaactttcatcatcagaagccaaattacaaagacacccaattgcattttcctgagctaaagccgtccctgaacttgctacccccaaaaggaccacaaccccattttcctcaacaaaattctctttgatttcagggaaagaggctaaatttcttaaaaccccagctgcagaagcttgagaaccaggtgtaccaccttgacaaatctccaatagagatgaaatcccacctctacaaccaatcgctctagcgttctctttagagaaactcaaagcttggagagccacacaagctttctccttaccaaacccacttccagaatcgagtaccctaagcaaatgattcaagagaagcaaaccttctgcgatcaaaacgtgtttgctgctatcaaccattgaaactctcgaaatcgccgccactgttttctccttcatttccaccgagctcgaatccattaacctaaccaaaaccggaacaacgccttgagcaacggcgatcatcacgttcttatcgtcttcctggagaagacccaaaagcgagtccatcgccgagtttctcgactcgccactcccaatctgtaaccgagtaatcaaattcctcgactcagatcgtacaacctccttcttcgacaacgagctggaaactgcgccaacttcgtgaagagctccactcctgattaaaatctcaccatctttaatcaatcgatcgagcttagcaagcacggagtcgaggtcgctctgggtcctaagcttcccctcagccatgtcaggactctgacacctcttggccaataaaacggcgtcgcttagagtaacggagaccgaaccgagaaggtcaacggagagagtgttggatacagaaccggagagtgagtcagcgaagtcagtaagctgagaacgaaggtcatcaagtttggcacgaatcaaagcccatttgcctttgaagttttggacaagtgggatttcttcaaaaagcgaagttaaaagctggttagagagaacaatggggtcactttctggagctttcatggcggaagaaagctcagaaccaaaaaaaaaaaagtagtaaaagcaataaaaccccaaaaatgaaaacaaagaaaaggttagaaaaagtagaaagttatgagagaaagaatagggctttagatattcagagcctagagagagaaagtatagttagtagggtataggggagtagagatgatgaagaaggagaagagagaaggatagtgtaggagcaggtacagggtagggtaaggtggggtcttattattataataataagattggttgttgtgaatgtgattttgatagagaggtttgattatttgtggtgtttcttggtttacgcgccaatttcagagcgtgattccctcgcattttcccctcactcacttaactttctgattctctttttatttatttatttctttccattttcattttgttctttgaatttaatttatttttgggtaaaagatatcttcttgatttgttttagcaatttcagtgcaaatatctttcctttaatcgaggttgtatttaatacttagggatattttacttactctataagtgtaaattatagtataaatatttaaaatttaactctcagttgttaataaatagttaagtttaacttttaacggtaataatatttaaattatatttttagaatt

SEQ ID NO: 380678 - DNA, 5603 bp, Cannabis indica
tgttttttagactacgtcatgctctcatagtcatatcttaggcctggtgtattcggaccctcccactcacccttggctcctcacttgtgtgtacggtcatccgtatttttatgcaaaaaagttgttatggtttgaagtcatgaaagagggggataaatttggtggccgatggtggatctagtgaaatctcggcctctcatcaacttgaccattgaaggagataaattaacttaggacaaccatcattttgggtattagtcacgtcaagtcagcattggacaaggggtaagttaatgaaggtttgattaatttgttcacaaaagctatattgcgctcatcctagacttgtaattcaaatcatatgcctatgtgcctttcctttggaggggatgacgagaagcttaaaagaacctttaaatttgaagaaggttggacccaagatgagagaagaaagttggttgttggctagggttggaattcagttgctcattattgggccccagccagggtgtttaaaaatattggagccactcaggttgccttgttgaattggcacaaatcccagttagggaaaattgacgacactataaaagagttggaatgcaaaaatgatcatcttcaatcatttcccattggatctcgtgactggaaggcagagcgtgaggtcaggcacgcccttaatgagtcacttgaaatgatggaactttattggaaataaaggacacgtgtctctttgttgaaagaaggggataaatgctccaacttcttttttctatctgtgactataagagggaggcgtaatgctattgagagcatcctagacaggaataacatcttgctcgcaggttgaagtgccattggaaaaaagttcactagtttccttagtgaaatattctctggatctcactcgaatcaagatcttaattgtgcaaatattattaccgatacgctctcctctgtggagagggaggatatagtttgggcccttgatcttgataaaatttagtaaactttgttcgctatgggcaaccataaggctctggtctagatggtatgtcagaccttttctttaagcaatattgggattcactgggagaggatttttgtcatgcgatcttagatttcttcacctctggaatgatgcacaaggggatgaatgctactaatttagtgctccttccgaagattcaaaacccgaagagagttcaacattataggcctctatacctttacaacatttcatataagttcatctccaaaattattgcaaataggattaaacctttactcccgtgacttatttgtcatactcaggctgcttttgtgcttggcggaagcatccatgacaacaatgtgattatccaagaaatcattcattcatttaataggaaaaaggccaaagaaggtttttttgcaattaaaattgacctgaagaaagcctaacacaagatgagctggcaatttattgaccatgttctgtgttgctatggggtaccgaaggtctttcgtaactgggtttcccaatatattttgactacgtctctgaatgtgtgtcttaatggtggtcaagttgggaaaatttctccgacatgtggccttcttcaggcagaccccctctccctctacctttttatttcggcggcagagtttttgtcgaaacttcttgataaaaccatgggtaattgttatatccggggcattaatctttgccggggcggccctactctctcccacattttttttttgcagatgatttaatcatggtaggtagggcctctctggcagaagcaaaaggatattgggacttcaaaacttttgttcttggtcaggacaacaagttaacaaactcaaatcttctattatcttcagtaaaaatacccctgagaatgtgaaacaagggattcaagatgtcatgggaattggaggaccagaagggaacatataatatttaggctccccttattccgatctagacaaaaggatggtgatttcaattttgttgtagaaaaccttatcttaaaattacagggttggaaagctaaaacactttcaagagcgagtcatgctactcttatcaaatctgtgggactgtccatgcctatgtatgcgatgcaaacaaccaaactctctaatagacttgtctcaaggatagatagcttggtgcatgatttttggtaaggatttgagaaagggaaccgaggtgtttggttgagagcttgggataagattttccttcccaagtccagaggtggtcttagattttgtaaaacaaaggacatgaatctagccttcctagctaagtgggaatggaatttactattcgtgagtcaattcctttgctaagaaatcttaagagccaagtatctcgaaggaaaaggattctttgggtgcaagtacaataactctgattcttagttttggaaaaatatggtcaaagctagtgacctcttgagacaaggtgcttgtaaagtggtctctgatggtagggataccaacatcagggaggatccatgggtgacccatggtaaatccttttacgctaagtccaacagtcaccctgattgtttcttgagaaaggtggcagaccttctaactaacataggagattgggacatccagaaactgattttcctgcttgatagtgaaatgatttctgctattctaaaagggggtagaccttctggtctaggataagataattaggtctggactaaagagcgtaacaggaaattctcttccaaatcaacatgtctttttcaagccttactgagagttccaccgtgtgaggttgccccgtccttgtggaataaactctagaatagtaaaattttagagaggcataagattctttagtggtgtattttatctaaagttctcccgattagggtagtttttggcaagggaatataaattgaagatgttattttccctttgtgtgggaaagaggaagaatttttagagcaactatttttcaaatgtgaactagctttctatttgtggagatcttctccatggggtatatttctagtgtttgattcaaatatccgtatgtgggactgggtcaagttaatttacagttttaataataggggcatcaatattgatgaggtctttatctatgcttctattgtaatccatactatatggaaagcccaaaatgaaaaggttcataatcttaagcggtttagtatatatgaatcattgtcttgactctattcgttattctaatgcaaatttaagagctactcgtattcccactccacctcctttcagagtggagatggtcctcctcctcaagattggatcaaaataaattgtgatgttaaagtgggatttgaaagcttgtgtattgcgattgttgctagaagctatttgggtgaggtaatttgggttagcacgacaaaattggctttttcggatgctctttgtggagaggcggcagcgtgttgtttggcgatcgagttggcaaagctcaaagattacaagtttatcattgtggagagcgattctagaatagtcatcaattctctcaatcgcaaggagatttgctggcagattaagaactattcggccttttgtcttctgctttctactaattttgtaggttgtgttttttcttatatttctagaacttgtaattttgctgccaataatgtgcctaagtgaacttttgcccataaataatttagtagcttgcatgtatcgtcttatccaacaaaattattttgtaatgaccatatggtctaattatgaaaataaaaagatagttttttgttttgttggcctatattgttagtgattaatagtttatggacgccaatattgttagtaattaatagttaacagacttagcatatgtgtgtagttgaatcagaagtgtgagtttctctagttacagcagtttttgataagcaaatccaccccaacaagcattatgtagctaagtcccttccataactctataaatacattatgtctcattacaattatatacctttgataatcatataaataaagttatttctgatttagagatctagaaaaaaaaaaacttaatagacatagattttaattattatctagtattattgtgttctaaattatatacaaatttatacattaaatttatttaatttttattggtacaaaaataaattaaaatatcaaaagattattagatctaacccccatcgagttagttctctagtaatcatatgcaagagagtatatataagagtacagtaacatctacttatgaacttatccaaaaaattattgagagaaataaataaatttatgcgatattgaggaatataaaatataaaataaatatttaatttttttaccaattctatggaaacatcaactttccgactgtccctggtattttttatttttaaatgagatgatgtattgttgtaatgtgcaccacgttatttacacaaaagttctctatcatcattgacaaaaaaaagaattgataagcgctatttcagaaagagaattgttaaaaagaactaatagtatttagcatcctcttaagtgtcaatatcgttatccgtccaattaaatattgggtctcatatagtttaatataataactttcaatgagtattgataaccaatcgcaattcaatatatcaaaaaagtgttagacactaatggtacttaatagcaatgctctttcagaaaagagcaagacaaaaattattgcaatattaatagctgtacgccagcaattaccgaattctacttgttacactatttgaaccaataaaatgatattggtgtcctaggcccttcgtcttacgtatgattcaaaatatgcatgacagacattttatttattataataaaataagtgaaagaaactttatataacatatagtatatatatacaattacatttttaataggtattatttacgaaaattagtttttatacttaaatttttttatttaataaaaaaaaattacatggtcatgaaaagttattgatattttaaaaaaaaaaatacttttttatatttatttaattaagtagttttttttcgaaaataatatttaagcagttaaatataacataaaacttaaatttttattttattattattcgttattaaattaaaatctaattatttaatatatttaaatattttaataaccataaataagtaatacattaaaaagggtaatataattataaatataaatagataggcatatatacatgacatcatgtgttgattttagctttaatgcatgtagttgtgactagtcactataatgtatgtgttagggtttttcttgctagtctagttatcaagaaagttttttgttttttttcgctaattattgaatggtttgtatttttgtttttctaaattgtttaatctaaattttttataagtattaaattgtgcaattcatcagtaatacccccttaaaatataattttatagtcatgacgcggtaaataataattgataaattaatacaaattaagtacattttttctttttattttaataattaaagaattaaaaatataaatataaattactatataaaaaaaattattttattatttattaacgtaaaaa

SEQ ID NO: 380679 - DNA, 2626 bp, Cannabis indica
aaaaaacaaaaacaaaatttatttcataaacctgaaataaaacattttgaacaacttaaactatatatttactaaaaactaaaattaaattaaacaaaatctccaaatgttgcaagccctagctagccacatcgtatgtacatgtgttgttgcacatattagggttaaacaccgctgcccctaatgcttgtttatgaggtattgtccgtttaaaaccattttataaacatgagggtctttccaaaatttctgaaactcatcaaggtatattatgatattaatttttaaaaaattaacacaggaccattttataataaacccatatcattattattcaaaagaataggaagatttcaacaccaatttctaataatatgtgaatactcttatatactctaataaattgagtaacttgaatatataattaatatcctctacaagaaaacataccatttagtaattttttttttgttgatatttttgagttacaaacttaggtttcaatcccatgatcctcactcatacactcccaatattttctatggttacttaagctaaccttaaatgagtaataatatttttttagtacgacattactcttttatgcaccataagaatttacttgtaactaaaaattaatatttaattacaaattattattaatttgatttttgcgacttaaaatacatttaattacaacaaattataattttaattttaacatggatttttttttggtaaattaatcaccaattttgaagtgataacaaagaaataataatgcatttactcaaaaaaaataaaataaaattatgcagctgttcaaagcaccaatttgtcacttggcttgcctgtttgcaaaggttacgtatactaaagatagattggctcattttagagttatctgaaatgatcaatgtttgctttgtggttagagtcaccatttcaatgtttccacatgaagatgcaaaacgcatcatcaacatttcacttcctgggaggcctgttcgtgactcttggctgtggctgccaagtactaatggggagtttgctattaaatcggcttatagattgttaaagaatggcaaccacagtaacgaaggcgatgggaaatggaaatccatatggggagcaaagatccacaaccgccttaagatgttctggtggagactccttgccaactgcatccctacaaaagaaagacttagtatgtctatccccattcaagataccacatgctccttttgttctacatctgctgagaatagcttctacttactttgggagtgccactatgcaagagcaatctagttcgggtgtagctggagtgttagagccgatgtcatctcagtctcgaattgggatgaatggctgggttggttttcaaatgctactaataggccatcctatcttgacttcaaccaatttttgggaggggctgctattatctttgaaaacatatggagagagcggaatgggcgaattcatgatagaaaatccaaccccattgtcgtctcaatcaactccatcaacaatagactccgagaacttatgctacctattgattccgtccacgacaatccttcagagtggcagccccccctgagggttgggtggcttgcaattcagacgtggctatagggcagaatcaatcgtcgggagctgctgtttttcgagacagtgggggaaacatcctctgaattgcatcctttcgcctgaaccactgcgatcctctgccgggagaggttgcagctgtgtgtgaaagtgcagtattggcagtggagcttggatacaataacatagtgtttcaatgtgattccttaaatgcagtagctgctttgaaaactaaatctcaggacatccacaacctgcaattcaacattcaagactatgttcacaagttcctctcttttgcaggtaagttaaatctctgggagatcgtttgggcccctagagcctgcaacggtgtagcccattccgtggctcaatgggcaaatcgaattaacaagtttgggtttatcgatttggccaattttggtgactccctacagctgtttaatgcagatggtcatggatccgtttagttagtttagttgcttattttagtttgtttttttcagtctttttttctagttattttcttttcagtttgttggttggccgtttgtggcctttgtctctttgcttgttttctggttgtctgcgggtgtgtttcccttattaaacactaatcaaaaaaaaaaaaaagaagtggctgggcagattgctcattggagattggttgaaatggattcaaagatacacgtgtcaaagtttcgtagagaagcttttgtagattgtcactacaaaaaaatagctaattttagtgacaatttaatttttagtagtcataacataattttttttttgggctaaatgtgacttttacttcacaataaaaaattacttgtcactaataatatttaaatacaagttgtcactattatgactaaaaacacatttagttacaataaattatgatttttgtgactaatacttttagtcacagactttttagttacaacataggaataataatttataattagtcacaatttattttacttttagtcacaaattttattat

SEQ ID NO: 380680 - DNA, 4037 bp, Cannabis indica
tttttctttagtgaaggggcatattgagaatatttctttttacaaagtcttggtatttatgggtttcagtgagatgcaacatatgcaaatgatcgatattatgctgtattgcaaattcccaaaacaatatcacgatgaaattttaaaagttcaaattaatgaatataagaagttagaaccaagaaagtggaaaactttggatatttgaattcttgtttcttattctttaattattttacactttctaacttttattttgtagaaaatatatgtataatttatatatatatatatatttagttgcttgagtcgagtccggtttaggcgtagggttatgacaatcttggtgtttcagagatgtgttctttattaattttatatcaactcgaatgtaatagtcatggcctcatggtttatggtcttacttgtgtatgttatttccttttaccactcatgttttttttaatgcataatttccgttattataatttttcagtaaactaattatgattctttattttattactagcacttctggatttcaatatctatggtgttcctcattgctgcaacaatattcactcttctgaagatatgtggtgagtataattttattcttgactggaatactctgcagtttcaatacttctcaatgtggaattcagttttgttttatcacaattctctactatgaatttctaaccagaatcaatcttctacaaaattctggtggtattaatagttaaaagctcattaagcaatttcagactaaattgctttataatgtcaatgtcatgtgatgtaggtgacgtagctgctttaggatggtgggacttatttattaactttgggtaaaaatattctcccttaatgcccatgctagtcctctcctcacctgtgaaaataatccatgtttgtttttcatagaattgcagagggttttgcctttcttgtttgcaccaagtggtataatccggcaatacataggcattctcaaatcagagaagcctcttcatcttcatctgcttcttcctcctcagttatcagatatcttgactggaacagaggtatagtaatttctccagatgaagatcagcaccagagtgggatctgtgatttgcaggatattggtggacatattatgaaagtacctgtgattgttttccagatcctgctttttatgtacttagaggtagtaaagatattattataagtgtttgtttgggcaatttgttgaaggttttttagttatcttcatttctagcacatttcagggaacaacatcaggcaccgggcatctctcagttcctgcagtgttttctcctcttcttttgctgcaaggagctggggtattatttgctatgtacagatttgtggagaaaattgttattctagctcatatgggtgattttggaaggtatagtagatccagaagatatttttccatagcatcaaaagtccaagatttttttggtttcatgcatcgtggctcaaggtatgtttttgagaattttaagtttgaatgattggttatcttgctgatttaacgaatatcccaatcactacatttatttgataacagattgctaggttggtggtcaattgatgaaggaagtcgagaggaacaggctagactatatagtgcagggaattcagggtttgtgtttctataatattttctactgcctttaacatgtagtagtgaatacaattgtatttttactgtacctaaatatgcatgcttcctacttatctgctgctcagttatttgaaccatttatgaggtgatttaaattataaccatatctttgaagttccttgcaacttaaataattgtatagacactgcaatgctgtaagtcttctctctgttaggtagagatgtttgacctgcaactctgccttgccaattaaaaaccagttagattaggcagttgaaacacatcttccatataaaatttatgttaaaggatggcgatctgaagtataaagttgatgtatacagttcttccgatatatacgttattttactccaagttcaattctgagggctattatacatgtgtagttaaaatagtgattttattgttgttgattttggcaacatatcaaagaactgttgtctgctgcggttgatcaatgtttgtatttttttttcttgtatctatgagctttttaggtgcaagcatggtttctgtaatcatttattttttatggttcttgtttcttggataatcctatgtgcttcaataaaagcaaagtattgtagattaacataaagctacggataaatattaatttgtttatatctttttgattcagctataacactttctcacccgatactgtgaagaagatgccaaaatcagatcttgttgatgaggtgaacttttctttctaggctactgtggtatctgttattaattctttctccctatatgcaacatccttttctctatcaagttaaataaacattggactgtgttcagttgctttatttgttccattcttctctgcgcagatttggagattacaagctgcactaagtgagcaaacagaagttacaaaagcgagtcagcaggaatttgaaagacttcagaatgtaattttcagctcttgcaaatttattacaattatgcaaaatttgaatgttttccttagaagttattatcactgctgcaagaagaaggtggggaaaaaagaatgttttcatcgttagaaggaatttcagtcttatcataatcgtgttttaatgattttcaagtgctagagaaattataattctcgtatcaattatatcttaatgagtctgttcttctgctgagatgttgatctgatttaaatgaaacacaggaaaagatcctttgtagaatatgttttgaagaccagattgacattgttttgcttccttgcagacatcacattctttgtaggtaagtgatcaaccctattgatcttgattgccattcttttcctcactttctttattatatcaaggaggataatcctcatttgggtaacatatttattgaaaattcatctatttttgaaaccattcaaatgtgattgagaagatagaaatttattatccatattgcattgttgcttatttccaaaaaattttataacagttcgctcatgtgtttgatttgatgcttcttctcagaacatgctgtgagaagtgtaagaaatgccctatctgtcgtgtcattatcgaggagcgattgcctgtatatgatgtgtagtttagaagttgtgacacaaggtgagcaatagagaattcattttcaattatatataatctgcttgtggttttagttgaagcaagcatgggtaggttggaaaatacagtgccatagtcatttgagtatctgatatagtgttaaaagaattgtaaataatatacttcaatgaactgcaattacagtattgttgattttaaatttgttccataacatttagggaatacactcatttggaaccctatatttttccagaaaaaatgctcattgggcactttgtattttaaatggtacatatttggtactctaacatcaatatttaccaataaaattttatcaatttaactaaactactatcagttatatataattaaataattgaatttgaatttaaaattcatataattgaagatagtttctatcataattgataaaatttgattgatgaaatttgagttcgggtaccgaatatgaaattgtattattttaaaatacgaagtactatatgaatattattaaaatgggtaaatatcattttggattctgtgttttgtaaaagttaccgatcggactctttgttttgtgaaatgacaaaatggattttatatatttaagaatggtaaaaataggatactgaaattaattttcaacaatttaattttttaatataactaactttaaaacaatttttaaaatgaacagatatagaaaatgtagatagttttgttgtaacatttttagggtcttatttgtacaaatttaaaaaatataggatctattttgttatttaataaaa

SEQ ID NO: 380681 - DNA, 1306 bp, Cannabis indica
ataccatacttatacctcttttaatgggtgatgttagtcttagatcacctttgtaaagattgtacacatggtttcaattaaaggattcattttggggcactctctttctttgattgtgtttcttgttgagaagatgtatgagtgtgtccatattaaaaacaagttcaagaatatatgaagtaatctttttttacatagttaacagttgattaatacctctattaacaagaaaattatttctttgtttgtaatacttaattggaatctacctactttgtgtatgatcaatcccattattttgcaataaattgagtattgctcatataggggtgctcaaaagactttgtaactcacccaaactactttattaacaatttaacatgttttttttcctatttaagtttaaaaaatactatttatacctaataaatataaaagtgtacacttttaaattggtcattgtcatgttattttcggattaggcacatcgactcgaaaatgacctatttaataaatgagttagtcatgtcaattcgaaaaaaacccaaatctatttaagaaaaatctaaacctatttatttcgtacaagtttcgagtcgtgttcgagtcttacatacaccccaagtaaaaatttatgcctcttacaagaatgtcatctagcacctatcaaactttattttttcataaaaattttcattattaaggttctgttgagttggtaatcgagtttccatcgagttttattgaatttgcaaaaacattttagatttaaaaaactacaaaagtcatgaaagaaaacataaaaaaaaaaaattatactttatatttaattatttatcgtgagtttaagatctaaattatcaaaaaaaaaaaaggttaatttcaagaaaagagagagaataaaaatagagagaaaattaatttatatttaaatatttattgtgagtttaagttcctttgcaattattttctaaaatcatattttataaaattattttgacataaacacaaatttttttttgcaattattttccaaaatcatattttataaaattatttttacttttcaatttttttagttgagaatcaaaactaatttttaaaacagaaaaaatataactttcaaccctacccgactccagacccaaaccccaaccccgatctagatctggacctgaacctagatctcgacccgaaccccacaccttaatgtcaacccgaccacggtctcgaacccagactgttgacccaaaccctaactcgagcaaaagtgattaaaacatttaaaaacaaaaatattaccaaa

SEQ ID NO: 380682 - DNA, 2146 bp, Cannabis indica
tttctttttttacaattacaaaacaaaaataattatttaacacaatttaattttaaaaataaaattttaaaaatacaaactttatttttatttttattttttcattaaaaaattaaaaattaaagtgttaccaaatccttttaattaagttaattaataagaaaccaatgtatacctgtgagataacaccaagaactccaagtgagactttggctgcgtttagttcttcatcaccttccttgagccgtcggactttgacaaatccatccacctcactgcccggactgacgatcgtaagcccaataacatagtcatgaaccgcgcttcccttgccccacaaagtgctgccatgtgcacccgtccccaacatacctccaacggtcaaaccccaccaatagggcgtgtaaggcaaagccagctttgcctttgcagcttcacttatgaggtttttaagcgtcaccccgctctcaaccgtcatcgtcatggcattcctgtcgatgttgagcaccttgttaaggcgctcggtgcttataagaagcccatcttctcccccgggacaaactagcttgggaatgctgtgagagaattgggtggttgccttcattttcaatcctctccttgtgccgtcagcgacggtcgcaatgagttctgcttccgaggtagggtaggctgcggagcctgccctacagatagtgcggtcgggaaagataccataggagttagtgattgtgcattttgagttgccattggtgcacgtaatgggttcttctggaggtgtagaataagctaccgaaatcaataataaggatattagtagtcctaataagggagacattttagagctgatcaataaagacatggcttgtttgttttgtgtagatgtccattggtacctagattattatttatactaaaagttggagctgtgcttataagacttggtctgagaattatacatttaataaataattaattaacaatactacttggtaggcttttgtatatatttatataaatattgctatttggcacgtgccaaatatatttctcaccagaacgaaaaaagaatagaaaagacagtacgttatttatatttattaatggataacttttcgttgattacatacttgactgtgtccgacattattgtaactggtttatgttagtgttaccatatatatatatatgtacaaagttaattaaattaaatgagactaatttggtgttaaattttaaagagatatcatgtcttcttgttttttattctgtttggacatgagtaagacagaaaatgtatgagaaatatgaccagctcagaatatattgtgctcctagcaaatattattattgtctagctagcacatggaaaattgattatgacgatgcgcacaagggttttgtacttatgtatatatagtcggccgtttgaatattaaggggaaaagttattgaatgaaattcaataatgccaccgaggttttcggtgataattctgatgatcatgtgatctataataataataataattaatgattaaaaaattaagattactgtcaaaacagaaaattatgatcattttgaagataatatagctaacacgtttgttgttttccataacgatccgtagttgacaaaaagacaacaagtatatagtttaattaagtatttctaacacacacggtgctcttaccctacaatttaatatttttttttgacacaagtaacacatacagtggtgattaattagttgcatttttttttgttagagctagccagctaggccccataattataaacaagattaatgaagtagtaatggtccatttggttgttgtatattaatattcttctcaacttatatattttaatatgagtcaaatcgaatgtatattatatataatatatattatatattatatatatatttatataaattatatttatacaagttatgtacctatacccatgtaagactgaaagtaaatgaatcatgtttaggtttcaacttggccataggactaggacatgcatgcgtgaaaaagaagaagaacaataataataataaaaaggatattttacaattttgtatacattattttaattaaatataaaatatgtgcgaaaaaacttattatcattttctcat

SEQ ID NO: 380683 - DNA, 3010 bp, Cannabis indica
aaatagtatcccgatcaaactacaataagaacatgttcgagttataaacttagtgaataaataaaagtgctaaagtaaaatattaaaaaaagtttgagaaaaaatgtcaagattaattataaaatatctatggtcctaaagaccaataatatcattgtcatcgttgttatgagtctcgagatgacgtgctgatgatccagcaccaagaggagtgggaaatgcgggagtggatccatagcaagtgttcaccgaaattttcggaaagctaattttaataatttagaataaaataaataaatgatcattcagagaaagaaataaaaataacacaaagtttttacgtggttgaaaagttaacgagccttagtccacgagtcaatattattatgtatttttagatagaaaagcctttagaaatacaatgagtatatgttctctactttttcctgagtaagtattgcaagggaatttaatcctcaatcagaatgaatcattaggtattgatagtattatgagaacaatacttagtttactttttatttcctctaatagggagattaattacatgaaaatacataagattgggttgccttcttgaagccatgcccatgaaggggtcgatctactgactaggcatatggaatatggttaagctatcaaaactgtgtcctataattatggccaaataattagaaattaattgcttggtctttatttaggtaatttctatttttagcttgatacgatcttctgtcgagtttgaggaatatttaattccttaatctgtgtgattgaataaaaagggaaaccaggcttgtcttccgtgaacacactatttggtccctctgggatcgcggtactggaactgcctctaggtgcgggttgtccttagcggagcttgtctgattatggaacttggatacctttctggaaggttttgtgttatcttctttgagcccactgacgggctttaaatattgacctagagtccacgtatcccttactggaaatacggataatatttaccctccaagcttccagcatattatgcattgtgaaagcttgtcccagtctatatgagtgggcatgtggagatcgagaagtagtaattttatttctttcatggtgctaactgatcatggaaagtaaacttccatctttagagttgggaaattaacatggcaaccatttgttggttgagggacacatttaccgaggagttactttccaggatagcttttattttgacaattgttcattgttggcgtgaaaattaaggaaagtattttaatcattattttgcacctcgattcttgaatgcattaattacttatcacgcttgatgcctagatttcctagccgtcagatgtgcttatccttttggggaaacgatcctgaatcgttcattcattctcacgtaaattgccactttgagtataaatatccacaaaaaacaccatttaccacttttctccaatttcatattttcaatcacttgaattcaaattcattcgagagaaaaaatacagtgatagattcttattgtgaatgaaccgttctttgaattgttttctatctgagaaatcgttattttctaaatcgtccacccctagtgatcaattgtttacagaggagtgaactggagaacgtcgacctgaactttaaaatcaactcattgattactctagtcaatggtcttcatgataggtgtgctcgattacctctaccagacccagcaaagatcagtttcgtaccgttgattccaccaataggtatgtgtttatttactgttttgtctctaatcacacttttgaattcactgtggaatctgggatttgcatgttcttttttgactgaaggtaggatttctttgaacgaattttgaattcttttagcctgtaactgtggggacctctccaagtagtttagtagggaggattcccttgctccctttctatgctagatattttgggtagctatctacttggttttcttttctatttatagaaactatgtcgaaaaaggtccaataaaaagtggttgaactggaagaagagaacctagagcaggagaatgctctaagattaatgttgaatgatagtccatgggatatggaccagtacatcaacaactttaggatttataacaatctgaggaagtatgaaaccttgcaagggttagaaggtgttgttgggttgcactagaaaggctctccgttcacggagagaagccaagaaagtgtgcgaatggaggctttggaatctggagttgggcccatgtggatatgggtgtgcaccttttgctaaagttttattttgccaaattttgtgtcgtagtcgaaatggtgcctttataatttatcccttaggtgtattgcctcttatctggatggtacatcctctgtacctagcataaaaaactagcaccaacaccagaggagatcttgtgtttctacaaaattaaatctgagcccatgaggggccacaaggggaagattggcttcaacatgttggaacgctactccaagaaggtggcatgttcgattagcttcgtgaagtacagtcatgacttctgggaatactggttctctatatctctgacttccacttgaaaagaatccctacacttagtttggactttaacacaaccagtaagtattttgtctttttcttgattttacttctcgtattcttccaactactatatgttaatgaattttttatttcttctagattgtcttccccaatcacctctgactccagagttggagcagaaaattattttttacaactccttgtgcctaaggagtagcagattagactgaatattttgaccgagtttgacctagactcggccaacctgcctatacccgacccaatcaacccgtaaaattaaaaaaatccattatgtttgggcgagtcgggtccaacccagtacacttttgggcgggtttgagagttggttttttatggtcaccgagtttcggattgaacctgaacccgcccgccaa

SEQ ID NO: 380684 - DNA, 2220 bp, Cannabis indica
tttttttttttggtttattatgagtttgttttaaaattcaacttccagttagctactaaatattttatattcaatcttttcccaaaaattttagaaataagccatatttatgagaaatcccctttgtaaaattctcgtagccttacttcggttccctggacatgactactggaccaagggtcctatggatttgttatttatccaactaacatgtgagagacagtgaaagagcaggtgaacttaatcacttccaaagatggattagatagttgttatagcctaaacaaagttggtagcaagcttttctaacccacttaggaaaccttctacataaatgaaagtggcctgaaacatggtatcatgttatcaattggagaaatggcagagatagaatggggacagacttcaagaaagaaggtgaagcaaccactttcagttccatttctatgggaagtaaggccagggatgcctaagcaggactggaaattaccagaggttgctttacgtatttcagtttcgactccactcaagctcattgcctcggttcctttccagtggaaagaaaagccttggacaccactaccttctttttcacagcccactacatggttattcatccaactccaaggatgaaaatttaaaagattattacatcagtggtgatattaatggacaacatgaaaatcgaagtctgattaaattggatcttgaaacatttggttttgaaacagactattcatatactcctgatccctctctcctagcaaactgcctggtgtcatcggtagccatttctacagctgttccagcacacaactcttcttctactgaagacaacaacagcgatacagacagcagtacaagcagctatgaaactggacattcaagccttgtggaggcttctttcctggaatgtctcttcccattgtttccacctaattctggatatcttggaaaggttcgaccttcagaagagtctcgacaccagaagaagtgtggaatcaaaaggtcgatgatgaaagtaatgacagacacatgataagaaggccacaaacactaggggagttgataatgatgagccggaggaggagttaccgaagaaaggctgttcaaatgagaaaacagaatttgtcaatggtaaacctcttattatcataagcttctactttcaatgacattattacctgagattctgagactatttactaatgatgctaatatatgccataaaagaatataagagtacaagaaacactccaatttaacaaaatattgcaatcaataaagcaatttgccactcttaacaaggtaatcataaacacctattttacctttttgtgatgtactttatgataggaattcaccaaagggggagcttttgggtgctgcatctttggatattgcagcaagatgatagaagaacgggacatcaagaggaaacaattgccacgactgaaactggcatggtgaaaaacaaagctaatacttgaaccaagtttaaccatcagttgggaatagattgttctccaattagtttctgaagcatcttacctttcctatcctatgataattatttttaatgtaaattaattgagaaaagtgcattgtaaaagacagtttagctgaaattcatatgaaacttcacaagagttcaaaatttcaatttcagttgtagtattccatttcagttggaaaatgcagtagaacaagggaagaagaaaaaaaacacacactccataaactgtgagatatactagattaagtaattgttgggatccggtccataactataggaataacatcttcagctatagtagtaaaacaacaacgaaatcagcctggctctatatatgtagtggccaactgatccagcagttaaattgatctttcagaaacattcaactcctgatcccataacttaagttcacctttctcaatctatgatagaattaacccaaacggtagaaattgcacaacgtatactttgcgcaattcccagttgctccatacttttgtttacttataaattacatttcacatacattttttcacttggaagaaaaatcattaatggacttctaagtatttagattccagaatccatttacaggaaattacatttatgttcaagtttggtgattaatttcggaaaagaattatgagttatcattatagaacttagagttatcatataaagttatatatatatatataatatta

SEQ ID NO: 380685 - DNA, 2723 bp, Cannabis indica
agtatactagacattatttttattgttggattattttttaatattctctcccctccaattttataataaaatttgttattcgcgattccaaattaatgatgtgtacatttctacgacccaatatcaattaaagtaggtccattcttggcccaattaaattaataaattaactcacaagcagatataagtccagcttatagacgcgacaaggctggccagagactaaaaagtccatcaggacaaatctcgataatctcatgggataatttgaaatgggaaactgaagagacattcggattactccaaatatcatcttacgtggcatccttcagacagggccccaccatgtcgggggtttgtctcgtatgtcagacctcgggattgcgctcaccacaaaaataaaactatctatttgtccaacgacatattctctaacattctcggtaccaacatggttatgcatgacacctgacatcaccaaaagatcctcacttgcatggatgaccgttatcttgtgaattgacccaaagttaatgtatattgtattttaccccatcagtaggcctagttgacacctctaaaatctaccgatcgagtttgggttcacacatactcgattctaccctataaataaagcattatcccttcatgtaaatgtttgaaaaatcatttatgctatcaagagataagaattagggttcttcagttagggacaaaacactcgtgtaagaataatttgaagctttaatagctcaataatattgacttgtgaactaaggttcattaacgccctaaccacgtaaaaattattgtttcttctttttttaattatttctttcttaagcttatttattttacatttagtttctaacaactcggtaaatattttagtactttaatggagagacaaagaaagatttaccatacaatttgtctacaacaatggttgcaacccgaaaggcagtggtgaaactacctgctcgagatggtagggacaatgttgccaatgacggagagaaccatgtcccccattaaatgctcaagtgggtgtcgtgggggacgaggaagcaccagagataagaaaccgtgtgcaccaagaagaccaacaccgtgaagagcacatcgctgatgattgcatcgacgaagatgagcagaaaggtcacgaaaatgaccctaaggatgaccacaacaaaaaccaaaataaggattatgaagaagagtactatgagcaagaccatgaagtagtacttctgcagcaagagcttgcagatacccaaaggaggttagtggatcaagagaaaatcttacatcaaatgcaagaatctcttggatgtttacatgctcaatctaacctccctgaagaaaacccttctgctaagaagtttaaccatctttgagctaagtcgtccaccctaggaaatgacaaaggaaatggtgtaatgggcgccccttcgagaagacccacatacaatgttccacggaacaacaaaaaggtaactgcccgaccccaacaaaatgaagcagaccaatcaatctacgggctagagttgtgcagaatgatgggtcgggtactcaggaaacaataggggattaaaaaactgcccatgtgattctgttaattatgagaacattcatgtggatgatctagacccggaagaaagcatgccaactgcagacctcaggaactgtctgaatgcgaaacgggaaaaacaaagggtgagaaagcaaggcctcgtggaggcgatttaagaaaaatcatcaacgatagaatctgtgaacttgagctcctagatgattacaccagatgactagaggatcaaataattgctttaacataactcacggacagtttggtccggaaacaaagtggagccatattcgacttgaaagatgaagattcagagccatgtgtaaaaataatcattaaggcacaactgccagagaaattcccaaatgtcacaaatggagctgtatgaaggcaagatggaccccagagcccacctgtccaagtataataggccggtgcaagtggcgcaagttagtgaagatgggaaatgtttgtgtttctctttaaatttttccaaatatgtcgaagattgatggaaaaggttgccgttcgactctatctaaaactggaaagatctatagtccatgttttggaagcaatttttagctgctaagaactttgatacggaggtcagctcaatgaccaacatcaatcagcaatcttgggagagccttaaagcctatatccaactaatgatggaggcaatagccaagacgaaagtcaatgataacatgaagttagtggacctgtattctaggattttgacaggacccctgttttaatacctggccctttacatttcttatttcctattttttgagggccggtaatctaatccccacaccttccagactcaacttgctttggttcagtatcatcttttaccttagcttctttgtcttcctctacaattacttgcttacgaggcatgttatctatttcacaattctgcttatgttcattaactttatccttcccccgatctgggtttttcttcatccaaactattcctttatctcttgcacaattactaacattatggcctagtaatctacaagtagcacatgtggcgtttggttgggaggaataaaaatataggaatatgagtgggaatgggaataggaataggaatagaattatggaataaaatttaaaa

SEQ ID NO: 380686 - DNA, 2472 bp, Cannabis indica
ggtgtatctaattaagtattacatatacctaaaataaaaaaagttatgtttatatatcctttgaaaaataaaaaatgtaaaagtaaagtattatatattatcataatagtttcacgagggattcccgcaataatgtggcctacaggttcccttccaaccaaacaaatatgtattaactttgatactgctggacatcaataatatctctacctaagccagtagtgctattatgatcatgatgaactttatattttctgttcattacctttctttctttttaattattttttaaaaaaataataagaaatggacgtaccaataaatttgacactataatgaagcctatgcttgtagatcgtaggcccaataatccacttgtaatattgagccagttgagacgacaaccggcaccaggacagtccgtgttgcaaatataactaaatatactattttaaaatttaaatatatttagagattggcaccattagtctctaattttaagtatgatattgtaaaggataatgtctcaatgacaaaaaaaaaaaaaaaaaattgcaatttaattaagtttctgattcttaacattattagttgcaaagttctttatccttaaagattattaatgtaaaaattaggaaacttaattaagttgcgtatgttactcttgatccttaacaacgcctgggtaaacctaattatagttgcatagcagggcaaaaaattaaaactgcctaactattcaattaatttaaaaatagaatgtaaaagtcctatgacaagtccgtagtgttcttgcaatactccaatttttgttgttcttagccaatttcatcgccaccactacccattatagctacctgttaaattcactaaaaagaaatttctcttttagtaacaataaaattattagctataaataataaaatatatgtggctaaaataaattctatcttacttacttataatcattaaaaagtttgtatgttactaaaagttaatgttagtctcaattattataatttattttactagacaataaagtttttgattaatttttgtaacagaatatagttgtatagaagtctctctctctctagagtgtattgcatgtccctccactgtgagtgctttgtgattggttgattttggttcctgtgatccgatagcctcatcgtacgtccctgcatcatggcttccagtagcacgcgcttgaaggagattgaagaaggctggaaaaatatccagcttgaagaggaagaagaagatgaaaccttctatgaagaagcagaggccgacgatgagcagcacatcgacagtcaatggtgtcttgttgggcggcttttaacatggaagatctctgattttttggatctttcagaacattatggcagatttgtggaaacccggcaaaggtatgtacgccaaacaacttgatcaaaatcaatttttattttaactctatcatgagatcgacattcagcgagtttcaaaggcagtccgtggacttacaatcgaaaacaaatcattatcgagcgtctcagtgaaggcggctaccctcgggctgtgccgcttaacacactcgatttatgggttcaagttcacgacctacagtccggtttctcgactatgaaagtggccaaggatgcttgtaattacgttggtatatttctcgaattcgatccaaacaacttcacgagtgtttggcatgagttcttgcggatccgtgtctctctttctcttgactgccctttgaaaaggcctatgaaattcaagaaacgtgatggcagttcgttttacgccaattttcggtatgaaaatgttccaaccttctgctttatttgtggtctcatggggcattcggaacgtttctgcccacggcttttcgatatgccggagcatctcatcgttaagccatatagtctgcacatgaaagctacacctcggccacaccagaacttcaaagaatcaccttacctacgatcgggcaaagttggcagcagctccttccctggtgtgaacgcaaacaggtctgccaactcctcccctggtgtgaacacgaacggtctaggcagtaatggcatggataccaaccgagctaatttcatgggattggcttcccctaaattttctcaatcacgtaactagaataaaggtgttattgcttatagtaatcaaggtgatgatgttgatgaggtggcagtatctgatttaaaaaggaagagatttgctagtattttaaataaagaggcccaagctcctaatgtgggccagacagtcaccatgggccagcttcatattgacccaaaaaacttgcattcggtgggttctggtttccaggctcaccagccattatgaatactttaagttggaattgtcgtgggcttgggaacccacggacctgtcaattccttgagaacattgttgttcaaaagaagcccaattttatttttttgtgtgaaactttttgcaaaa

SEQ ID NO: 380687 - DNA, 2122 bp, Cannabis indica
aaaaaagaaaggaaaaaaaaaaatctcatcgccagtgccatgaaaaagtttcatggtttatgattgtggagatgatgttgaagaacgccgtgttgatgtcttgtcttcttgttctctttgcgagccatgcccaaacggcgtcgcatttctcttctggtccgcacattactgatgtgaatattctgttgcctcccaggatgactcatcctgtggagtacaggcttcaaggaactgacggttgcttcaaatggtatgtttcaccacatttgaaatgagttgtactttgtattacgatcatggtgatcaattagactctgattactgttccctgttttatttaattgaaaaaaaatgttttctttggttgttgaccgttaatgtggttaaaatatgtaggtcgtgggatcatcatgacattttatctgttatacctgaatacaattcgagtaatcactgctcaacaagtgcgcggttgagatccgttgcttcttatagtggtcgaaaggagacagctgtatatgctgcggatgtccacactggaactgttattcgttgcaaagttttcattgataagttttccagaatccaaatttttcataactctgttaaacttgatctagacgggcttgccactctccgtgttcgtgcttttgatactgaaggtaattataaaatgttaatgatcattactagtgtaattattatcctgattactccttaggtatctcctttggttactacattatccaaccatcactatgttgtactttggtttttctttagttacttgtattaggctttaagatactgctgaatttcgtctaattttgttttggttatttgttgcagaaaatgttttctcttcattagtgggcttacagttcatgtggcaattgaggcctgaaagaaatgaattgactaatcaccttgttcatgtacctttgaaggattctcccctaagtgattgtggcggattttgtggagacttagataagcagatcaaacttgaagacagtgtatgattgttgatatttgataagaataagcaatggaatgagattttttttttcttattttcattttatctaattagtgtttcaatttgtaatgcagggtgtattttcggatctttatgttgtgaagggaattgaaattgggcatgagattgtttctgtgaatttgtttgagccaacatttgagcatatggcagataagattattctaactgtggcagaagcaatgtcaattgaacctccctcacctgttttggtcctcattggtgctgttgttagttatcgtctaaaagttatccgtggaaataatcctcaaggtttatatattaattgtttttggggattcgaccattcaattcttttgtacctgttgagatatgttgttaaaacatgctcaagtttaaatatgctaaatcaaatacttactgatagattctttatcgtgaaggctaattagtagattgacattgagttcacatgtttgagcattactttactgtcattgtgtgttatgttatttattaatgttagctgagtctttagcaaaatgtataacattctttatataatttagaattttatgttagccacattacctatttctagtattgctttagttaaataaattttgaaggtattctttagttgtatacatatttaggtttatatgagcttttcatattatgttgttttagtctagttgtgattgcttactcatttactttttgggattatgcagtggtaactttgccgtcaccccatcatcgatggtcagtttcaaattcttcagttgcaaaggttgactcactgatgggttcaaccaacgcattacacttaggagtaacaaatgttatagttgaagatacaagagttgcagggcacatccaattgtcatcacttaatgttgtcttaccagattttatttctttatacattttacccttgtctatatctgatcatttggtggaagggactgaatcaatttcgtccaaggcgaggtggcatgttgtttctggtcaccaatatctcatccagataagggctttttcacagggatcagatgcacaagaaatctatataacagaggtaactctctctctctctctctc

SEQ ID NO: 380688 - DNA, 1396 bp, Cannabis indica
acaatattaatgtagcatgatattgagctcttaactattttattttgcatataattatcataaacatactcacggttattagctaatattataagaggtggcatctacacaaataatttattttttaattatttattaaattaaatttgagaaatttagcattaaattacactataaaaatgtaatactccttgtaaacaaaatgtcccatcccaagttggagtttaatctaaaaaaaaaaaaaataaaataaaataagaagatatcactcatttgtagtgttgtataacttaccattttagcatttatcttaaagaagataaaagatatatgtccccattactttagagcctcatttatgatcttatataacatataatgggaacctgtgagaattgcagcatacgaagaaactcaatattttttgtctttctgacttttgaaaagaaattgcaatttggaaatgaaacttaatttcatacctccattgaaattcaattaggggctgataagaaggtatattcacattgaatttttaaagtttttcaatttgggtggtctttcataaacttaatatatccaaatgcataaggtgtggattgttgactcttgtttgattactctgttttgactttcaaattcaataatgacaaccaaaaacacgatatctctaatttgtaatttcttttcaacattgcaattggaacgttctcagattataaagatttttatatctcctttcaagaagattattgttcagcttattaaatgactcaatctcctccctttgccaagaaggaaccataaaatgccatagctaacatgaactagcagcctaagccttgatataaaagaaactacaaaaaaaggaagaaataaagataagataaaagcacctccaagtcatgaatcaagaactctacgaaaatattaaggcatatccaaaaatttccttttacaattgaacttgatatcatcaaacacaaagtatgggaaaagaatatagaagaacactaattggatatgattagtcatataaagcttaatcttacaatatggttaaataaccaaaaattcacattgaacaattaaagaaagagagataataactactgaagaaagattcagagcagcagtaaaattggtcatttgcaggaatagcatttccatgtggatgtgatgattatatatcctggtataagtatatgcatggtcaaaagagtgtaattaattaattaatacaggttcatagcaatgccaaagtggaggcaagaaggatggttaatgaggaaattacactctatactctttttatattgtcccctgtcacttcaagatactctccaagtgattctattaagagtataaaaaggtatgtttcaaataaatataaaat

SEQ ID NO: 380689 - DNA, 3719 bp, Cannabis indica
ctggtacggaagagataaggaaagagaaactaaatccttgatatggtgttttttttattggtgggcttaatccttgagttaattctgttgaacagtaattaaaaatgagagctaggtacaaataatatttttaatcataggctgtgctacgaaaccttcgaatagtggaaacattcaagatcttgaggataacctggttggtggtgcaccttggagtcttgaactggctcattgcagccccattcccaataaaatgttccaaaattttcttaaaagtccctctctcaacaatgcacagctctaaaggacctatggagtttgttctcctcgaaacaacatagccatggtccacaaacgacgcgtccatctctccacaacattctttaagaaccctctcatctgcatctcctttaatctcccagtaaatgatatagtgaccaggctgttttgccacctcagcatggcttgtaaagtcaacaagttcggctttggccttgctggttaacagttctgaccctttctccaccactatttggaggtccttctctgtgttcttgtcgatatttactgtcagcaaaagctttcttctgcataagaagttcaatttcggtgtcccattatgaaatcccgccacttccactacgtcccctaatctgtacctgtaaagtcctgtaaaatcaaaaatattaatcaaacatcacatgtgactaaatatacatacattatataatgatgatgcttttgaatattgatcacacattatatagtactactaagaaatacccaacggttcaaatcgatctacgtctaatcaaagcttctagtcctagctataattgtacgcttattttatttttatttttcatccttatctttttgtttatggttgagcaaatatggtccatagtgagattgaattcactgtccactgggaattgtattgtcttgaggaaacatttctagatatagcatatatatttggtttagctaagccacaaaatgctcaaacaactttatgcatgtcttgcccctacgtacgcattttgatcattgtttgagagactatgtttttaaataatgtgccatatatgttaatattagtaggagaatcttttttgttgttatctgtttaaacaaatagtgttttgataataatataataataataataatatctagtaccgtaccagtgaaagtggtgagcacaatctcatactcttgtccaaccttgacttgggaaagtgggactggttcatcttctatgaagtcatcactggttgaattgcaattcgtcttcgtcctataaagtggtatgaactcaaagtaagaaaaggttggaatgactgcaaaagtgaccttttctggaggcaaacaagggtccaaattagccccaatccagctctctgtcgacccataatcagcactaactaatggcaaatccttagcatagtgccttaactttttcatgtaaggctgcatagaacctgtcattattgagtaaacatatttggcattaggccaaatttttggaatgagaccgtgccaatccaaatcttccaactcctggcaacaggcctcaatttttgaagccaaacttgggttaggaaagattatttccatgactgattttctcagttttggtagtgtaattactgagatacttaaagtgccttgtcttatatcagcgcacaactctttccaatgctcttcaaaggaaataaaggcctggactatgctgtaggcaaaagtggaggtaatgaactcaactttgtcagagaagaagagcccaagtaagagatgacaataagttgattgtttataatctccacttgatataacctcttgtgggctacaagtaaaggacttggttttctcctgtttgattttgaattcttgactgttgtaatagtgagttgtggctgttcctactgttaatccacctttagttttgaactgtttgctgctataaataaactcaagtattttacctccctccttcgttggaaaagccctacaaaatgggagcaaagaaacaaacaaaaaccaatatcatatagagctataaatgtatacataatcattatgaactataaaaagaggtattgaaccttgatctataagctgctgccagtctaaaaatttgaagtgtggtttgggcactgtgccgagtgaaaggcacaaatttttgcctgccttctgttgtaccggagcttcatataaaaagtagaacaacttcaataacaacaacaacaacaaattctgaaaagaccccagaactcaaagccacaatctttttcattaaaactttcaaaagatgaccttttttagcacaataaaacagaacaacacagttcaaaaccagagcatatatatatatataaatagtttaccttaaggagagagtagtgattggttgttgagtgaggagaggagcagtgtccccatctgcaattctattaataaggggttcgatatcagcatgagaagaaagaggaaccaaagaagtgtaaagggattccaatgcacatgaatccaactcatggatatctatgccattaagccatttcttcagatactctgtaccgtaattcaactccagtatccggcgaagagtctgagtttggacccaaccggcgttttcagacacttcttcaaaccagctaacgacatcgttttcattattaccgtttctctgctgattttttgtcactgaattattacatggttccatattgaaaaaacaaacaacaaaaagaaagaaaagaagaaacaattgtatgtgtttattgaggtaatcagaaaattggtgttagtggtttgtgtaatatataaccatgttaaatattagagctacatacttacatacataaatagctattatatagaagatcgatcaagtggtggagagaggagggacttgaattataaatatgttggtttatatggggtcaattgataataattaataaatatgatatgtgtatgtatatgtatatatatcttcagtctgtagttctgtaccttactgaaaagctccaaaaatacagcagaaaaaggctatcgtagaatggtacgactgcttattgaccacatgagatggggttttatcacgtagtaggatgattgtgttgattgtgttgagatagagagatctttctctatgtcaaggccttgtgaggataccattacaaatgtgggagagagatcaaatagggaccactttaataattgtatttgtgaatagctcccccatcccttatatatctagattctacctttgctttcattaacctcagtatacgtacactcaaaatctcactatccaacttgtttacaaattttacgcacatttatttacatacttcccttgtttgtttttttctttttttctttttcagtgggtggatggatgtaatgtatgttgctggtggctttacacatgtatataaattaagtaacgatatttatatactcaaaacggtgacactgaataaaaaataaatcttaggtgtcgcttttgataaatattattggtttgaaagattacgaaatcattttgtgtcctctttagatacatatgacaatacagtgtacatataatatatttttaatttcaacattaattaaaatcatttttaagaattaatatttatatatatttttaaggaattttttcatttttacatttcaaaccagtttttttgtatttttaggaaatt

SEQ ID NO: 380690 - DNA, 2136 bp, Cannabis indica
ttaaaatctctgatgacagcagctataccgctccccatctggtctggactcagagctgcatcacagttgatcaaaaaagtatctttcggaggtgccttccatctgttcacacttttatctatcttcttatccttgatgtctgtgtcctttgtaagagcatggttaacaaagtcgatagcccaaggtgtccagctcttcaaagggggattcttattttggaagattcgattatttcgttggctccacaccatccaactcatacccacaaatctttcaaactcctgattagagcatttgtttttcataaacattagaaactccatcaaatccgtcatcagtccaagacttttaggaaaaagatgtcagagccccgtttctttccaaacatacttgagccgaggacattgccatatagcatgacaaaatatcgaggaactctcaacctttgtttttaattattaattacagttggaatattgtcggccaatttcgtaaattatggtacatcacgaatccatccatacggatggagaatctcattaggagtagctagagtccccgttctaatattattggtgggatctttactgattgtagagactccaactagacttatcgagcgaggtcacattgaagaaggtttaaaaattttaagaaaaattcgagggttggaagatgttcacaaagaatatgaaatgatcacacatgccactgaattagcttctcaagagaagcactcttacaaaaaacttatgcatcgttccaacagaccccaacttttggtaatcgtgacactacagatttttcaacaatttaccggaattaatgtgattatgttttatgcccctgtactgtttcaaacactcagttttgggagtgatgcatcagtagtgtgaatgtagcgtcaacttttgttgcaaatattattgttgataaggccaaaagaaagagtttactgattgaagcaactgttcaaatgttcgttgctaaggtaaatttggtaacatttattttattttaatttaatatgttttgtgtgtttccttctaatttttatatagtattatatttgtgttttttttttaagaaaaaactaatgtgggactttcgtgtctttcattttatgaaataatacatttttaagtcacatatacgactattttggcattatatattgtgatattcaattaatagaacaacaattcaatcagtattgtgtttatttatgttgtatatacaatataaaattttgggtctatttatcctatattaaaatttttggatagaaagtattttaagccaaaatatgagagatacctatcaagtatacatttatactttagtctctatttttttgtttttgttttttttttctttaatacttccttaaatctcaaatgaagaagaaaaaattaataatatttgggatatattttggatgatgatattattaaggatcttttcaatgagagttattgttcaattgagtaataatgttgaggaaaattgttggttttggtggaacgaagttgttgcaaggatttgttggtctttagacaatagaattttgctcagaaacacaaaaatgattctttactaagttgtgataatttattaattagtttattgttgatgctgcgatgtttcaaaatgagaataagtttggagtcgggtgtactcaagatcacattggggttgttttgggtgttatggcggattgcatagaaggcttagttgacctaattatggctgatataatgagaattaaggaagcgttgacttagatcatgggtcgtggctggtgcaatgtgattttagagtttgatagtcttgtgagtgttcaagcaatattaagcacaatttgtatggtttctcaatttagttttttggttgaagattgttgtttattgttatttgagttgtctaatatttttttatattttgctaagcgctctgttaatggtatcgtttattctattgtaaaagcatctcattatcattcagggtataatttaagagtggatgatatcattcagagtgtaatttgatttaaaaaaaaaaagtacacaaaattataatatatggtatatttatttataaaggtggcaattgtatataaatttcaattgttttatt

SEQ ID NO: 380691 - DNA, 1104 bp, Cannabis indica
aaaaaaaaaaaaactaaagacagtcatttgtccgtaggacagatgaaaccaaaatcagtactcaattcgaaagttaaggccttgtctattttcatttcagtacaacatgcctcaacgccttcttctctcatccaaatattttcttcgcctcaaaccagatcttcgtaatcatcatcatcaactgctaatccatttcaatcctagtactcctattcacttctcaacttcctcactctctctcttctccccctaccatgagttgacttcttccatctcagtcaacgctctcactccgaggcaatctggtaccgcatcaaattcaaaacaccaactcttcgtccaaattcttgccctctgtaccttttcctccattcttctgtttcttcggctcatctctgcagttcttttgcccgattttcccagtcggtggcgtaatttactgactttttgcgaagaagctgaggccagaacgtgtgcttacccttcacacgtgtggaaagccattgtcgcttatgaggacaggcgattttttacgcattttggtgttgacctagttgggatcgctagagctacggtgtcgttttcggctcttggcggtgggagtaccattacccagcaggtacgattttgtagactttttaatctgtattgataaatttaataatgcacatcttgtgtttgatgctttgactccatcaaacacgttttgtgtttttcttatttttgagttttatatatggtataacattattgtatatatggaagatgtttgtatagttatatttttaatgtacatgctataacagaggttgcggttattcaaataaatttttatatatatattttatcagtggcggacccagaatttaaagtgagggggacgtaaataaatttaaaaagaaaatataaagtgtagttagtgggatttaaacctttaccctctaacctatttaccaactaccttaaccattacaccaaggttactattatgtctataaatatcatcttttaatacaaatatatgttgtaactaattaaaatacatatacatttttttctcgatttttttttcaggggggcgactgccccccctcgctacaatgt

SEQ ID NO: 380692 - DNA, 1979 bp, Cannabis indica
tatttaactacacaaactcatgttcaaattaatgtataactaatatttttcttatttttcccaatataccaccaaccttttcatgctcctctttatacttcttctacaagcaaagcaataatgagtttcattagaaaaagataaatgctacaaatgtcgtgttagagtgatgcctaacactattaaaaaaatatcatatttaaatagaattaaatatcaaattttcctgtaaaatataatcgctagtcatttataaagtgttatatgggacatctataggggggaaatctaaattttgtattaaatcaacactaaaaaactactatttcaacactaattttttttttccaattccaatcacaacactaaaaattacactaaattttatattctttattattttattaatataataagaatattttaatactaaatatatataattatttactttttcttcttaaaagtataatttaattattaattttttttcatcactaatacttaatataatgttttgaaagaaatgtcaaaaaagatataacttgaatatttttttcaattagttgccctagtactaatattatttatttattttttttaacaaattctgcattttatatataatattaggtgctcataaatgttcacaccatacacaaattgcaagtggacaaaataactagatattattgtcacttgttgaattatcatttctagatatttattcatttatatttttcattcttaatataagaataaaaattggttattagtggttaaataaattcagtgatgtcccatacctgaaaattaatgttttcttctttcctttcttctggaaaaactattctcttttggaatttggaaagcaaacaatatttttgtttttgtcattattattatttaaatcaaatcaaataaaaaacaagtatgtatacttaatattttgtgcacaaattttatgtggtggtgctactgatataagtaaatatataattattcgattaagatgtcacaataaaactccctttcaaaaaaagaaaaaaaaatcacaagaaaaacatggatttattaattataatgtcacactcgcatatcaatccatatttactatcttcatccataaaaaaagtgaatgtaaagataggataagagagctaccacaaataaatgatgagagaattaatttcattaataatttagacaatatacaatggaagagatcgattgttattatttatttatttatttaataaattatgttattttattaatagtaataagttaaaataatagcctacaatttaattaacaagctaaataattcgtcgcttaatttcgagattattttaccaaaaaaaaaaaattaaaaataaaactagattaaaaaaattgtaacattacagttaatcttaaaaacacttatatttaatttcatttaacgctcagaagacacaacagtataaattattgcaacaggttcattcaacttcatagtttgatcacttaatttattgtgcaaggtacgtattaacaacccctttagtgcacagaacttgttttctcaaccactaacaatgatttgatgacgagtcatcaaagaacaaagaagagccgacaacaaaacaaaacaaaacaaaaccatgtcatacagataagactaaaacactcaaaattaagacacaaaaacaagattaatcacagtaacaaaaatcgaatcatcataacaaaatacaacctcgaccaaattgcacctatgtccagaataggctggcgagccttgccaaaaaaaagaaaacctcttataactataaatttaagaacaatgattaatattattattaattaatttatataactattaaaatattatcatagtcaaaatcaaaatagacactaatagatgggatgacacgattatttattttagtcctatcaaatccaagtacatcttatactcaaatatacaaaggata

SEQ ID NO: 380693 - DNA, 4167 bp, Cannabis indica
ccggcgctaaagtatatattagccttcgaagatgaaccaattatgattctgtgtactgagacacagggtaaataaatagctaagccaatcagatcaaaccatctatttgattaagatttgggctttgagcttaaagcccattcggcccatattaatttttaggcccattagcttgatatccaaaaaaatccatccattatggtcttcgttctggtattttggctaaccaacgatgaaaatggcactctgctaaaaaaaatctctacttgcagaaaaggctgcacctttaagctatttatctccatttttccatgaaagtaatgattttttttctcattcttatatgtttttccaagttataattttgttccatttaaaaataataaaataatcaactctggtgtgttctttattttttcttgtccttttgggtgaagtgtagctctttaattcttactttctgtttctgtaacagcttctgggcatgtgttgattttggattttgagaatggaatgtggctcttgtagttcctcagttgctggtggtgctgctatggctttgtggtgtggtaaagggttggtttcaactcccaaaatgctgcctttaagggtttctctcagtgttaattcagagtctttgaagtttaatccatgccctggtcttggttttcttcattctatgcaggtaggtatctctctttgaggtttttgtttttagtttttgaaaggatataactggttgtgggtattgattatcaagtgttactaacaactgaatcttgattttaatgaagttaattaagttagtgattatgttcttcatttttgtgtgtgtggtgtgatcaaactattacttgtccataattggaaaatcaaagatacattaaagaaaatttcaatatagctttgatttgtgtttgttgtacttcacaattgtcattgttggtgtttcattaatgagttgcttgataaatttggtactaaaccaatgataaaaattggttagtttgcaatttggattctaattatactcaaccacatcttatcttctttagctgaactagtttgaattcgcctttgcttgcattgaaatgtgtcttttggaagcttctgctttttagcaacataagtatgctatttttcaatggcagaacttgacattgagttttcttgaatttctatgcctcaatctatgttaatcgtccatagtttggttaatgttgtttttttatctattggcagcattttaatcataaactcaaagttcaattaaagtcatctcagaagatgcatccatcatatgcatcgattatcaaggccgaacatcctcaaaatactgatttgcctcggtactattccaggaaggagaagaaaccgttcccagtacccattgtagagttgaggcgtgctgcaagggagaggcttaagaaaaggaaaggtcagcctagaaaaccagttccacctccaaagaatgggatgcttgtaaaaagtttcataccgatcgcctatgatgtttataatgcaagaataacgttgataaacaatcttaagaagctcttgaaagctgtaactgtcaatgcttgcaagtaagttttcttacttttaacttctgtatagctcattaagttcactttcctaaagttgtagagacatatggtggtttttggcctcgataattctgaagtgttttcaataacatcgtctgaaaattcgctgtttttatgattgttaacatacaatgctctcattacttcatcctattcagtaatgactattgttggttggacagcccaagttatatgcatttggttctagaagtaaaaattgttcatacttcttgtctggaatagataacaacatgtgactagaacaatgtgtattcattttatttttagatattcaaattaagaggattgtgatagtaatttctttatgaatatttgtgtgttgaattcttttggaaacttttaaaagatgacagaagttcatagagttgttctgtgatgatctcaatacacgattatgcaggtactgtaatgaaattcatgtggggccaactggacatccattcagatcttgtagaggccaaaatactagtgccagaaggggtcttcatgactggacaaccgcaacttgggaagacatatttttacctgttgacgcttaccatctctatgaccgcctcgggaaacgtattcctcataatcagagattcgcaattccaagaattccagcattagttgagctttgcattcaagccggtgttgacatccccgactttcccaccaaaaggagaagaaagccaattattcgaattaacaagagtgaatttgtagatgcagacgaaagtgagctaccagatcctgatcccgatgctcccaagccaccaatattaactgaaatacccgattttgatatagtaggtccttccaacgaagaagaaacgacattgctcgcagaggaaacacttcaagcatgggaaaagatgaggaaaggagcacagaagctaatgaagctttatcccgttagagtttgtggatattgccctgaagtacacataggccccagtggccataaggcacagaactgcggtgcccacaagcaccaacagcgaaacgggcagcacggctggcagtcagccgtcattgatgacttgatacctccacggtatgtctggcatgttcctgatgtgaacggtccaccgttgcagagggaactcagaagcttctatggtcaaggccctgctgtggtggaaatgtgtatgcaggctggtgcagctgttcctgaacaattcagaggaaccatgaggttagatgtgggaatcccaacagatcctaaagaagctgaaatggtagtttgaaaatcattgcatactataatctataaatcttcatattgttgatatttctcagttttgtgttgtaaaaaatgtaatcttgtgatcaaaattggaactttaatagtaagagtgatatcaatagtattattgttctctgttcacaaagcaaatgttgcaaaatctcatgctttttttttgcttcaaatacatcttaataactcttgttaatgtttccttttctgagaaagttgtgatttttgttagttttaaaattaaattggacaaaagactgagacttttcagagtcaagtaatcaccataggaaacaacaaaaatcaatatttttgccacgtaaggctgattagtaatattatgtgttgtccccttttttcatgtacatttatgattcatatcagaattcagagactttataatgtttgacaacagattcagatctttctcaatttttgtgatttcaatcaactactcatgaaaaatgagagaccaaaatttaaataccaaaaatgaatttactttttaacttacttggttggtttggatggatcctatttaaaagtgtgaccacacaccaaaatctgcattagacaaagtcaacaaaagacatggcagccacaactgttaacaccagaacattaatacccacatgagataatgaaaaagtcttcactaaaacatcataaacaacaataactaacaatacccagatcaaccattaacccccagaccccacgtggcaaaataaaatgctctttcactcaatgatcaccaagtgtttgctaatatccctctaccatctaccccacataaactcttcctcatttgatcaaattacaatccaaatttcacagccaagtaaattaacaatggcaggagcagaaggagtgaagacaactagccaaaaagttgccacggcggggcaaaactcgaccgaggcgctgcaccagcggagtaagttgccatactgtcccatgagaatggcccttggtgggtttgccatagccatgactctaggttactttaccttgtattccaagaaaaagcctgaggccacagcacttgacgttgccaaagttgcaacagggacctctagtccggagaacactcgtcctcctcctcgcaactagatcatttttttacgtaaacaaacattttcatatgctataatatcatcttggtttatgagtttttttcttttcattttatgggtttctttgtaatactgataagaaataataagtgtttgtttggttgaattttttgtgattaaaatttggaaaattactccatatactatttttttacttttt

SEQ ID NO: 380694 - DNA, 3014 bp, Cannabis indica
tagttacaaacacaaacacatttattcttcagttgctcacatgcttatttattcttcaacatcatcaaaatcttgctaaaacattttgtataaagattaacattttctgtgcaaaatagttaaattgtattaacaattcaaatcaatcaaagtactgcgtaggcaaagctaagcttagtttatatatatagcagtgtgttaattttctgttcaaatggcataataaggtctagaaacatacttgaaagggctcgactttggttcctgaaggtcgtgcaaaaaccaaatcccttgacaaaagaaatggccgtctctcagggatagcatccatcttgaatgccacaaactgtttatcctctttttcattgatattcttgttcttcgaaattgtttctttacgcaactctaatgtgacatccaacagtttataatcgttccatttctgaatcaaacaaaacaagaacacatcacaccattattgataaacttattggatcacctggtcataggaaagcaaaagttaaaaattctaacgctgaaaaacttgatattaatgacaaatagggacagtctatgcctaagcctaagtgatgctcgaagtttcattttggtgtcatattgatatggttcctagagcacataaattctaaaaaattctttcccaattatctctttcatgaaattgaatattcttcagattaacactagaggctaacatactatttttatgttacttcatagaaaaaaattcattgaaattaacaataaaacaaactaaagtgataggctattctgaagccagatcgaaagtaatatcatatagtaattcaccttcaaatttctatgagcataactcattacattgtatgtcttgattcttgaataactaatgataaaattatctgctcttacctcatagtaatagtcttcagcatataaaagagcagaaaagtaatccttgtatcttgtgggcgacaggatcttcttaaggatttctggcacaatgcccttctttatcaaatccttaatatcctcaggaattatgtacaacggtaatgaatcgttctcttccaacacgtaatttgtttttcctagttgttttgttgaaacacttggagaagtaggggacagaaaaggcttgaaggttggagggatcttatggggggatgaattagattcagaggaagatggaaccttagaggaagaagttgtaggctttgaagatgaatttttagtggaagattgaggaaatgtagatgaagaattcgattcagaggaagatggtaccttagacgacgaagctgcaggccttgaaggtggattataactagaagaatgagggagtttagatgaagaactggaatatcgattagcagaaaaagtatatgttgttgatgatgataatagatgtctattcaatagcgcttgcaactgactcctttctaagtccacatgagcttgattttgagcataagaagatctattatgattagattcttgttgaactacattaggataatcccaattatgtattacttggtaattgttactagaagaactgctagtcctaacagaaccatcatgatcagatggagagccccttttgaaggtatttttaatgctacttataatattaatatctatgtagaaagtatcatcaatctcatcttggcaacacagaaaacaactcaaggcattaccccaaaactccatatatagtttcttgctgcaaatcaggaagaagaagaagaagaaaaaaaaaatcaatacatattagacacatttcaggtctgtttcttagcgaagaaaatgaaaacgaaaatttattatctctcctcgaaatcatttcacaaagtgaaaaatgaaaacggaccacggtaaaaagattaatcccagagaacctactctaatcagttcctaaatatagatgaacaatttttttcagccctctggataggttttcgcagattggaaattgattgtatagtaagagtgaatttaattaagaccccaagataatttttaaaaacaaatttaagtaaatacttttgttttcttttttttactttccttttcctatcagtttatcaccaaccaagcagagttttttttttctttttactctttcaaaaacagatattgaaaagaaaagaatgatcatggagaagtcaacatgcatacataaagcacagaaatgatgttaacctcttctatgaatctgattaaaaaaagaagtaaggcttggaaaaaagaataacagaagaagagagaatgaagaagaggaggaccacaatgatcgcactcacctgtcactgaagaccacagtgtggttgccttgttaatcgtcgatcactcaaatgaataattttactttccctttctatgaaaagagtatacaaacaaacaaaggatgtaaaattttaaatgtagtttgtacggacgcctgtaggatttgcttcagcataccagcctaccaatcatgttcattgcttttctgacaaccttaaatagagtaattgacccataaagtcaaggcaataccgcttctcagttttcttcattattatattattataagctgttgaaataaaaaattagagaatggctaaaagagagtactcttgcttagcatcttgttaaaggctttaataatgttgttggtgtaattaagtattgaatctcatataatttaagaaaatagctcttagacaatattgctaaccaaccgtaagacgtctctaaaaattaacactactaaaaagtatagacaaagatcacttaggtttgttaggatacacaattggcatcgaggataagacctccactttgtttgtgtttagattttgtacccaaaataaaattaatttcaatataaatataatatcagagatcatttttgaattattatttattgttttgttcacatgtttatttcataattaattgtttaatactataaatttagctaaaatctaaaacatataaagttattcacaattatagtgttgtcacta

SEQ ID NO: 380695 - DNA, 1062 bp, Cannabis indica
acaacaccctatattttccaacagtttattaattataatagttagaatatttatatatataaaatttgtacgtacgtatcagttttttttatttcattttgttttcttttctgtttaaaatctctaacttgttgaaatgttagcatcaatattggctgtttacactatttcatctaaaacagaaacatttgagattggaaccaaactatataaggtcccaaaaaatgagataggttggagatttgggcaaacaaattataagcagtaaaattatagtgagaaagggtattaaggtactgacagcgtagacagcagcaagaagtctggaatcccagccaagaacccaaacatgcatgtcatgttcgaacacaaaagtgacaatgccaccttccaacacacccatcaagcatatccaggctgtgagagacagctccgccggatatagcttcaacgtaaatgattgtaaaatgaagaaggtggcccatccaccgcagctcccaacaagcatgagagttccgaggacccagtggtggtccccggactcggcgctggagctctgttgtccgctcgaggaatggctgtgtatgatgtctaggatgggacctttgtacagtgtcatcaccattgctcctgaaactgtaattgctgtccctatcacctttgcaaggctatgccactttttcacattcactgtctctaactgtataaatgtatataattaattacaaaattactattaatattgtacctttaatacacatagaatagataataaataaaggtaaaatggaaaaaactaaggaggattactattagccacaagctgtgtatagcattaggtggcccctagcattagtataaaatggtgccttgtaaatagcttgcaatattccttagtagtgctagatactatatatatagttcgtttaagaatttcaaaagaaaatacctgaaggcgaaagccaatatgaaggtaatagcaggtaaaatgttcacaatagcggatgcaaatgttgcagaggtgtacttcattcccaaattgtacaagttttgatcaaacac

SEQ ID NO: 380696 - DNA, 1687 bp, Cannabis indica
tttttaataaataaaataaatgaggtacttctgggtttaataggctaaacaagttaacatctgactaggtgtgtagaactgtgattatatgcattcatttcacgcatttccatttaatgctttacttgctggtatttgtttttgtgtggatatgcactagatgttaaatttatacataaggagcttattttggtgagattttgtaaatgcaaatgtatttatttactgcttgtctcactcatattttttattagttcctgggaaagctacctcaataaaataaaataaagaagttaatgaactcgccccaccttgtcttttttggatgcagaacaactttgctactttatttggttagttagcaagctatagcccaagagcttagtaccactctttgcctttttgctgcaacatccagtttttctaattatcactatattgtgcttattataatgatttcttacgtaaaggttgggttaatcgtttcgctcatgctggtgatgccgccatggaagtagcaggaaccacagcattaagggtgcgtgtctcttcttcattgagataatttacaatcttttaaggcgtttgttcatgtgtgatgctcatgctgtgattttgctagtccttgtaataagtattttgtcaacgtttctaaaggctaagtagatgcatgtgcctattaaattagttaccattttgcagtgttgtccatattgcaattatcacatggtccccaccctttttctaccaatattacaaaacttggatttaataaatttgttttcctttagtttatatttcatctgtatccaatgccaatcaattgcacttgcttcatgcgaatcgtgtcttctttttattgctgtttgcagtttagacaagctaaaacagagattgtgacagcaagcaaagtggcatatcgttttctcttgggtgttaccaacaatgtggcaacacctactgaatcctctggaaattcaaacagaggttcccctagatttcaaggtacttggtttaagaacttggttacaactggcgccaaaccttcaactagttcagagatcgagaatcaagaagaggattttcatcggcaacacccgcattcagatgcagtgtcacaacagcggcaaaattcacaatctcgacatgacatttgaatgttagtttattaaacatgcttgttatatgtagctgagaccatgcaaaaattattgacgtttgctattcatttgtgtatgaatgtaaaattttcttttattgtttaactgaaatctgcttatagatgatcccaaagcttaaatgttcttatagtgcgtgcgaggatatggaacacactaccaactgttccaatttcattctaaatcagtcaatgttttgcataatttgatattgccttttactagttgtcatttaagttatgtgttcgatgctctagccttttattttcttggttaacatggtgtagttatgcaattttgtttgaaggagtagtgagtaatgatatggatgcactattttttagaacattggcatgtgatttcaattgaaccaaaagagcaggttaggaaaaacaaattgatatatagggcaagcctatggtaggacttaacaaaagtttcctatcggtaggaaattttttttgaccattgattttagaccatgtggttattataatgtaaggtgtata

SEQ ID NO: 380697 - DNA, 3670 bp, Cannabis indica
cttatgccactatttatcctatatattatgatcatatgatgtaaaattaaaaagttgagtaccagtactttgcatgtatgtgaattttggagattcatcatgaagatatctatagcctcaccagaataattagaatttttctctcctagtaaaaaaggttagtatacttttctcccttcaactttgtagaccatcatgaagctactagagacttgtaatagaaatgggagtcattcattttggaaaaaaaaaccagatgttctttgttcttggacaactgacatgaactctgtgagaatggtgaagtcaaacctggtttggattaggttaaacaagttgggactacaatactggggaaagaataatcttagtgctatcatgagtacgattggtaagctattaatgatggacaaagtgacagagtagatcaatggtataatacacaagggttttgttagatatggagatctcggattaccctcaaaaactattacttacatcaatgaataggaccaatttgttgaacaattggtatagtacgaatggcttccctccaaatattctgtgtgtgaaagttgggtcacttagtggctaattgcaacaaggagaaaggtgtgagctggaagaaaaaaatttcaattgataaaggtgagaagcttgttaagcaacaagttgattttgttatggaaaaattatctgttgaagtagttataacagagaagacagtggaatttaatgctagtattgctatagatgaaggaagttcgggtaaggatttagattcgatagaaattagtgaagaatagggcgtctctaacaggtttactgtagcttctagtaaagctaatagcattaatgggcatgcaattttgcatgaaatcggagatgaatcgattgttactaattctatccagaataattgatggatgtttataatatagtagagtggaatgtgaggggtatgaataaaaagaaaggaaaagcacaaatttattcttgatatttgtaagatgaataaggttgggtttttactaaagtgaaacacgagaaggttcaaggtatctttgagaataatttccctaattgggaacaatattctagttgtgcatttcaggtagaattttgttgatttggcaagtcaaacttaggcaggttgacattgtgtttgaagattctcaacttgttcactgtaaggttaagatttgtgaccaaaaagagttttcctttgctacagttgtttatggtagcaactctataggggagaggaaagatctttgggctaagtgagcgagtattggtcagctgactaatccttataacatttttgccgactttaatgctatgtttagcttccaagatagaaatggtgggagacaaattaaagttaaagatattacagataattaatcttgacttgccttaggtcaagtagaggaattcaagtgcttgagagcacactttacttggtctaataagcatgaggttggtgatagaattttttccaagcataatcatgtgtttatgaatgataaatggttggatgttttccaaagataaaagcttgctttaaattggatattgtgtcagaccatagctactgtttgaagtcaagagcttaacaatgtgggattcaagccttttagattttgtaattgttatccatgttttcgtaaacatgacacgtggacttcaataaaaaaaggctaaggactcgttagccggatcaactttctcaattgatactccgggaaagtaaaggcaccaacttcacaggaagaggttccgtgaagaggagttccctgactgctaaccacacggaagggatccatgaaacaaagtctcccttacctccaggaaccaacaccatgcattaccgcaaagagtggggattttcccagaagggccaagacatttcgagaatgcctcaatcccgggtatgccttcagctcgtgtcggcttcgtccacgagtgtcaagctacgaacctagtgaccaagctttttcatgtaatatgtcagaggttgtctcccacgatatgctatcatacagagaatgtgtgtccttgtgtactgagctaaataatccaacggttagggataatagaaattcaaataagagaagcccggaagtgacacgcgtctaaggcccagcctatccagtcagtacgatttgacacccttaaatgccatatggaaaatgtgccacctaccagtccaatggtaggatttcatccctacgaagatccatccaaggcagtgtatacattaagctggcctataaataccttacaaaaagcacaagagagaaggaccttctccctaggaattgaggacccattcttcgccattcaagcaaacacatgtttgtaaccgtactattaactccaaaatattcctactaagcttcctcttcttcaagaggaacaaggcaggaaagagtcttagtccatgctatctctatttgtataaacaattatcagccaaagagcctaataaaatggactcgtggactaaggataactaatgcccgaaccacgtaaaaatttattgtttattatttcactatttactatattattaccttcttaagctctaaaaatatttagttgctgagaaattcggtaaatattttggtgctttctttgagagctgaagaaaaacaatgcatggcggttactgatgcaagcgcgtcagaaagagaacctgtgcgagaaaagaagggagacctcctgatctcctactgaggtccggtcgaaggccaaaaatgggcagatcggaggcatttcccagagtagaacccgatcgctagatcctcaagagaaaaatacaaaggacaaacacatgcggtcttagaacgcttgctgcaccaatatttgcccttaaaagctcgaatctggcaagccaactccctgtaagaatgaccggccattggtatatctagacccacactttttgccgttcacgaaggtgtaaccacgcaaatacggcaaggtgtaagaggtgttggggctaggcaaagaggctacgatgcaatgcggttatgacgaataactcaagagggatcatcagatgcaaagactctatccagcttgagactccagcgtcggtgctgacgccagggtcggatctattgttcaacaactacttcctttgcctttacggtaggtagtgaagttatttggaaattgatcctgtaatggcggccgctgagaggagaccccagtaccgtcaatgtctgctaggccaccagtcaagcgtggttacggtactataggttgaggcgggcaatttttggcacagttcgctcaaggggtttctgtcgcctaatatgattccaaacctgaagttacatcagagaaagcaactcgagacattataaaccagataggaagctcctaccagtccacttcttattctacaaggagtctaagtttttgccccagaagccattagaggccttacacttcactataggaaacagactgcccaacagatcctgggatgcatgcatgcaacccctaaagcttctcagagcttgggagatgcatgggcattgcttttcgtgtatgaaagatcattggttgtgttgtacatcttcatccctctttctcgaaaggggaagactgcttgaagtctgttttacacccaatgattctttcacactttgtatct

SEQ ID NO: 380698 - DNA, 2258 bp, Cannabis indica
aaaaaactcaaaaccagataaacgaaacaatcacaatatcaaataatctgttctctgctagtgtaaattattacttactcgtgaatgaaatcgaggtatatcaaaatgcgagtgtagaggtctttaacgaaatcgggattaggtttgaagagatcgttgtcggagatggtgatgatttgagcttcggcgagaatattaacaatctccgatcgagaaagtcgtggatactcgaacttcgacattcttctcttctctctttttcttctctttgctttttttgattttcaaaatgaaatgaaatgatatgatatgaatgagtgagtgaatgaccccttcttctttcttcccgccttttaacttcaaatgtctaaattacccttttatattgttattatggctatgtagaattttcccaacttttgaaatttaacaaatcatttctcttgtatatttcggttgttaaattttttttttttttgaattattaagattattaattgtaaggatttttatttcattttactaatagaaggtcgacgtgggtaaaagttcagatgagacgattaggtatatcaaagttcgggagtataatttagtagacatcaaagttttagaatatggataatcgtgacattagtaaagttgaacagaacttgatataagtcattcattgaattcaacaatctaatagttcagggagagtttttaatagactggaaagtttaaaatttgtgatttgatacgtatcaaagtttatagggcaaaaatcgtattagccagttattatttttttaaaaaatgataactcataaaattcaacttgaacttcaagttaacactgtttggtagagtggatggagaatgatgaaggaaaggaggtaaaggagaagaggaatcatttgtttggcgaagaggaaaaaaggaaaggcgaagagagttggatggagagaaatagggctaaacttttgggcaagcgagcaggttttgggcttcgtgggacagggtttcgagtttgactgtgggaaaactctatccaaattcgctcttttactgagtttttttgtgtttaggtttggaactggactaagtatgctttgatcgagtttgtgcgggcactggtgtaagtgtcaggtatgggtcgattcatggcttgtcaagagagtcatggatacttgaacttcgacattcttttttgaagaaaaaaatatcaccgatatgtttttgagagggtcatatactgatgtagtataaaattagtgttatatcgtaataaactacatacatttttgtggtggttttagagtcttacattttcttgaatgtgtgtaagacacattacaaatgtacgatacttttttaaaaaaataccaaattttttaaaaaataataataaaaagatcaccttaaagggacactcaagtaaaaaattataccacttgtaaaaatgacttcaacttcaagcatccatcgagttgctatggagtttcatcgagcaacatcattttgtttaataaaaatattattttaagacttcatcaagttgggaacgaatactatttaatttttgcaaactttgttatttcaaatttgggaagaaaaacaaaacattatgaaaaacttggaaaatctaactttattcaccatcaatttttgcaaccaaaatatagtaacaaatcagttggagtgtccccaccctaaaataacaactagaataaaaatagaagcttgagtaaattgatgaacaattaatttattttttgatgtagtgagtaaattaatgaacaactaaattagttgatcgtataaaaaaattaaaatattttttcactcggaaaataaatttttacaatcttgaataacaataccaaataaaaaaattatagacaaaactctatataataaaaaaaaaatacataacacaatgagaacagtcatggtgatagtagatcgttttatagatattgtggtaatatttatatagaaatggtggaaagaggaattgtgaaagagatataggaaataaaaataaataaaaaacatattttgatgatttatttatgacatagaaactcaaattcaaatttcccttcaatatgcacccatgatttcaattatgaatagctcttaatttaaccaacaaattcactaaatttgtcaaataattatctagcttggcaaagaattaacacccatgtctactatttatttcacaagaattaaattgtatcttctccttagttttttttttcttttttaac

SEQ ID NO: 380699 - DNA, 3563 bp, Cannabis indica
ttttttttttttttgttaaaactcctttttgtatgtttgagtggggttatatatatcttttatatatatatatatgctattcaccaaaggaaaatgtgctagtcctatatatatagtgaataatgaatatattcactcaccaaaagagggaaatcagtgaaacaagatctcattctgatctgcaccactcacatgtatgaatcttcccatatagaactttagggcatatatataaatatctcaaatatatatatatatatatatacatatattgcccataaaagtccacattgtcataaaacatctagctagccatatctaggagctcaaatttcttctaaccctaattaattttaggcagtgccactactatttttttttttttgaacataatatgccactactattaatgtttgaagcttttcattattcattatacatgccttttagaaaaaaagaaaaaaaaaactttatctgatttgggagaatatgtaagaattatttatgattggtctggggagagggcccccaaagccaatatatattatgcttaatataatgtagagattgaaatacaaaaaagaaactcaatccaagtcaatgaaactaatcatcaagtttagcaaattaagaaaagatgctggctttttggttgtatatatctatatatatatatatgtcttttttttcaaaaaaaaaaaatatattatatattattacatataactcacaagcttagttatgacatttacttgtatttttataatattaataataagttatgagatacttgttcatatattatttgattattttatgtttggccacgtactatgctatatattaactattaagaagtgtaaaaaaaataaaaagtagaaaaggagtactgaagttgaagtttaaactatgtatattaggtgtacaagtgatttataattaaggaaaataattaattagtgatatttggttaagaattagactcttttttacttgggaatatatatatttaattacttgtcattggagcattggtccctcacaaacacttcatgtcaattaatttgtgattatgattattatttttcttctttttcaccttgcctttaaatcttggtcattattgagttttaatgatgagatatgatttaatccgccaacttatattttatattttcactttaattttctacttttgcaaactatatatccattggtaaaagatttagcaatgtaaaatagcatttgattgatttgatttgttttttccatatcttgcatgaaaatccattgatctatctctctttctgttcatatacatctttgaaaaaattagaaatatatataaataaatatgtatgggtgatataataatacatacatattgttgaaattaccttattaggccgtaaacttattttaacccaatatttatttactttgggtttggcatgcacagatttatttttaaacaactttctcaaaaaatctcatactaataagtaggtgaacactaattatattcgagaattttttcctattttctaacatatgggacttcagttgatcgatatcccgataatttttccctcaaagtaaggactacatactcctagcctctcctttagtgaaattatcttgtactgtgagtcaccaacaaaactttttgcctgaccatatatcaacattgtctagttagaagacttgatcaactcaaggcactaaatacagatttccatttggtaccaatatgatcaccaacttaattacccaattgacaagccttatagaattttaagtgtttgagaggtcaagagtgttttactaggggtagaattctacttaggacagcaggagaggattgatctagcttagaatgccatgtattgatatcatttttgtggctaattaatgtggaaagttataactagctgggaatcgtaagaacaaaaaaaaacgacattgttgatatcaaaattattacaagaggattcatcagttacatttatacgatttttatgacaatttacataacatagcagaagttgtaaagccatctctaaccgtccctttcagcaacaccctcataatttacttgttcttaataaaacaataagttttatgaaactcaaaataatcattaattattatctttgattagttggcaaacactaaataaattcttggtaatagagtgttagaatttataccctaaataaaattctaaatcaatgtaatttttattaatctatcaataataaaaaaaaaaaaagagatcattttaaactattatcaattgcatggttcacatgtttattttatgattaattctataatatataaatttagctaaatctggcccgaacatatagatattcacaattatagtgttgtcactaaagtaaaaataattgtgattatatgttttaaactatttcaatcctataatttattagtgcactagatatacactgatatgataatcaacgataaggtttactcatacttggctaagtggaatgtcttttcaaaagcattagtaaagcaaacaaggatcaaatatataggtttacattggattggactgatcttgacaatagaaaagatatcatatacttaccgttatatcttttctaatttaatatcacttagttgatcataaatctattaatctcaatcctgagatgattaagctttaagataattatattattagagttttttaatttgttcattaccatcttattacttgtcgaactagctcatacttacatattaggaacttggtagtacaattgagtgggagtgttaatcatagatatggacatctatagcttctatgattatttataagtgaaacgataattttctataagcttagctaaataagattaaatagtagagtactcatttcagtaattgtattagtttactaaaactttgtttacaagtagctaagtgtttaaatgataaaatacattgaagagtaaaacggtaattttgtctctaatcgatgtagactatctatagaagaacattgattgttttgattgtaacaatggataatttatagtgtatctataatgtaaatacatagtgttctatgtaaacaagagtgaaattccaagtctatagtagagtcatgagaaattaaaaagttggaaaatttaaggggtaaattttagattaacttatttgaagcttgatatataagcccatggttctcacaagaatatcatcttgtagaactcaattaattgatttgaaaacagtccaggttgacaacctggacgctgggcctagtgccaggtgtcaacctgggcgctggatctagtttttggccaccagatgactctgtttgatccaaggaaacacttgtcactacaaaaaactgctacttttagtgacaactttagtcacaacataaattttttgtgactaaatgtgacttttagtcacaacaaaaacttacttgtgactaaaacatagtatttagctacaagttgtcactaatttagtttgtcacaataagtattgtgactaaaaaacacatttagtcacaa

SEQ ID NO: 380700 - DNA, 3163 bp, Cannabis indica
tagtagtagtagtgtatatatatatatatatatatatatatatatatgcagataatgagcaaggggggagtacgaagagcactgagcacaggggctgtagtgaacccagagaagaaacgtatttccattgctgcatttcatggtccaaatattaaaggcaatattggccctttaccagatgtagtgaaaaagagtaaggctatgtataaaactattagctcagaggattatctcagatttattgtcaataacaagcttgatggtaagagccgacttgatcatctaaagttggagtaatagctcagatctcacaaccaaaataataagaagaaaagaagagaagaagctatctgtataattttaattattgtgacatgatcatcacattttctcttctgcttcaatgttcttagttgaatttgttaccactgaaaatctcagaaatgaataaaacaaccacctgcttatttcccagaaaaaaaaaaaacccatctgcttgattttctatcacttatttgtatcactttctacacatccctagttatcttacccttatttataacaaatataattctgtgacatttttcatcaaattttactatttaatatatggtttaattttcacttaataacttattaaaaaaacataaaaatataagaatataaaaataaatatataaaatttaataataataataatatcagttagtgcaaaagaataaattaattaaaatctaataataaaatattgaaaataaatagaaaaatgttatattacaatttaaatttgaatcactttttcttatatttgcaatcacaattataatttgcagatcttcaatggagatgctctatccttagttttgtcattctgtttatttgaaagaaaatattgaacttgatgactcaatagaaatgaataaataatgctttaatgcctgcatggaaatatggcactttctggccaaatgactaattatgggcatctttttttatttttttgctgaacaattatgtgcatcaataattatatttccctttacaaacaatttaaatgtgttacaataaaaaaacaaagatgtatatcatacaactgaactttgttttcacatctcttaattttttgggccatgtcatgcttatacacaatttttccgtgtcaatcttatcgtgcccatgcctccgtgttagtttcgtgtcaaaaaactcaacctgtattaacagtactaaaaaagccagaagtaacaaatcaaaaataacacaagctgttactaaaagggcaatcaacaagaccatgtctcttttttcacattcatcttgaatgttgttaatctaaattgtccaattatttgagaaacagttgcaaaaagttctctccccctctcttcaaaaaatagtgaggatcatcataatcaccatagagactttacagactttagtgtacataaaatgatagggaaattagagtatataacatgtcatcagccagacaattttgtactaataccatacaatgaaaaatactaaaatcatttactgtcctctccttaccctttcctaaaaactcatgtttcctgccaagaataaggactcttgactttctaacaaaatctttattcaacctatgaaacaataactaaaacaagccattccaagccagagttcattcttggcacacttcaaaaccactatgaaaaggatttaatgactatacaaaaatgttgaaaattgtagtttcccaacgtccaaatgcaacattaaaagtagacaccggatagcgaggggaacattttatatttggcttcattaaacaacatacacaaatttgatttgactcattaatgtatgcttctcaatgaaaacatgaagccaaaacttggaaaacaaaagataataaaatcaaacaatatgttacactacaaaaataatagagaattttttagtaattgtaaagagtgtgcataaaacctacaaataaagtaattgtgtagtcattaattgaaataacacaaatctcccaaatcaaccaaagttctatttttttttccatttcatatccattaacaactacacaattacatactacttataaattcaacacaccacttacaattactaatggaagagtagaattgtatgataaactcagtcccttagatgttcaattgatctgcgatcatttccgcaaaatcattacaggtctgttaagactcatcacagttaatcacacaagactcacataactttctccaacaatataccatatttagctactagcttttcatagtttctctcatagaatagaaaaaaacctaaatgaaaaagcaagtagcacctattactattgcttcaagggaacgagttcgatgggaattatgattaaaaatcatccgcaacgaccagataatgaagccttcaaatatcaaaatacaataaacttttctataagctgcccaaaactcacattaaactattcaatctcataatcaaacacagcatatgtagaatcattgtttatgtttaaaaggtgaatttttttgtgtaaataagaagaatataaagggatcagttctccaaggtgtagcatcacgattaattcagacgcaaattacccatttaaaacaagatttcatcatctgccccaaaaatcaattaataaaacaaaaaaaaaataattgtaaagggggaagtgggaagaaagcgatcggaacctgtcgagattcacaataacatcattgttatcagcaattgactattgaatttttatcgtcacctcgccttttccttcgtctccacaatttcctctgataaatcttagaaaaaaaaaatcaatactttgaaaataaaaacaaaaacaaaaaggcggagagctcagaacttcttagagggttgtgtagccatcatcggcaagagatatgcctctggcacagataattcttcctcacggctcactgctgtaatagactaaggaagaacctgaaaaatcaaatcgaaagaaattttagggttttcagagggattagggttttagatgattgaaacctaggagagaaagaaggtatttataagagaaaaacaagttaggaggcacatgcacggcacgtgaggtcatttgagattcaaaaaatctcatatatttttttaggaaaaattctacaatgca

SEQ ID NO: 380701 - DNA, 8324 bp, Cannabis indica
agaaagaaagaaagaaaaaggaatggatataatatgagcatatctcattttttttgttgcagcctttggctgtaaagacattcaaaagaaaatttatagcaagaggatacctgaaacacaaggtttactttttccttgttttctgaggtgaacatccaagggctttgtttgattccaaataagatacagcaataagaacacagaagaaagcaactcactcctgaattgaatgaaatacatggtcaaaacaacccattaacaacagtaaggattaaaactctgttatcatattaataatgacagcagaatgttcgggggaacaacactttacacatcatgaacacatgattttccctttctttttttttttacataatgctcgaaaagaacaaacaaacaaaaaaaacctccccggttgataggtcaagtgtaagcaacatccgagttaggtccttacttggcccagcattatccaccgaggtgtcttgtcttctgttggaggaatgagtgattgagctaatgagcacactgtatttcacatctgtagttggaaaagaactaagaattatcagtagattgactagttaacgactttgaaagcacggaaaattataaaaggagtgttgaaaattgcagtacctattactttgcagaggatattctgtttaatgttgggaaccagctgcttgaagaaacatctctcttttttgcattttcagatggcccttctgaattcggaaggtttcttctgttaccgaatgaagtggaagcaactggcgcattactcacaacctgaaccatagtgaattgagtatctatcaaataaatgaaagagctgagaatttttaaagcatcacccaaaacaacttttctaacttccaatggaacttgtacaaaatttatcgcctgcaagttctcgagtgaaagaaatacaaaaggacacccaaaatgaagtattcgagaattttacaaaactgaaaatcgtaatcattactgtctcttcgggtaatgtagaacaaatcccatgagtgtacgtaatagacatactttcaatgaatataattaataaccacttgaagacatgaaatcatctacatcacaatgttacttacatttttagcaatcggcttttcaacacttgagatctgggctgttggtgatctgaaatgcgtatgaacatccgggtttgcaatgttgcttgagcttcttggttctataacccaagagtaagagaatcaataagataaaataaccaggaaaattcccatacatataaaattcttagcatgctgaaagctcgggcaggaaaattcaaaactggatcttacctttatgcttatttactccaatctgctgtgctcgactgctacctacacaaattggctgtaaattccaacacaatgccgaaaggttaaataaataaacgtaacattaaaaacaaaatacggttatgtaaataaaggctgtagcctatcagaaacatctaacgagaaaaggaagaaaaagaacaaaaaatgctcatggaaatacttacagataattgagactgcgcttttgcttgttgtgattgctggtacttcatgattgtccagtcaaaaacataatcaaactcgtatcctgtgaaaatgtgtattcatcttagaacttaattccatacaagtatacaagtcaatataaggaaacatcaactatagatggatgaaaagctgcgtatcattctaaataccttcccgagtgaataaatcgcgaaacagacgctttaagaatccataatcagggcgctgatcgaatgtcaatgagtggcaataatggaagtacgatgcgaactccacgggatgtgacttacatagaacctttgaaaaacgcggtgttagttgaacttgcattttaatttcgatggtaaacaacaaatacaaaaagagctaagatagccactaaattgaaatttttattgatgcatacctcaatgggtgttgataccttcttctcgcgtatcttgtcatacttttgctttttcgtggcagcttttagaccttgccaaggaaggctaaaatcgaaaacaagtcagcaatcaagaaaaataattggtagataaatgaaattgtgcagataaaaattccaaaactaacacatcaaatttgtaccttcctcttaagaagtaaagaagaacgtaaccaagagactccaaatcgtcccgacgactttgctctgagagcataaaaaccaaaagaagttagtatgaaattacattttccatctagcaaatgtaacaaaattatacatacacatattcagcttaccgattcccaaatgagtattgcaacttgcataacgtgcagtgcctgttaagtttttattctctctgcataagttaacaaaaggcaatgaagatttaaatagttgagaaaccacataatatttgaagttcatggaatctaaatatttctcgagaaaagagcagcacgaatgccagattcaaaagtgaatatagcttctaattgggtcgcataattaacctgtaaggaatgtgtctgtttgaggcgggatcccgatatctttttgcaagaccgaaatctataatgtaaacctgatcacaaagacaaagatacatattttagagttcgaaaaaagtaaaagcagaggtttataaaagaatgcataagattgaaattaaagtggatggaaatctacatatgcatatacagaaaacaatagaaatgaaaagaaaactacctgatttgctttcctgccaagacccataaggaagttatctggtttgacatctctatgcaagaaccctttggaatgcacatactctattctagtgatctgaaattcaagtaacataaaagaggtaaattattcaaaagaaaaagattacacaattacacaaaagctttaggctattaaaagatttgcataacaattattttaccccattaaatttgaaaactacaatactttaacatctacttctgtacccttcattttagttctaaaagaaaaacatgttctcacgtaaatcgtatacaacgatgtcaaaaacattaccaaacaattaaagaaaattaccatctgatcagccaacattaagatggttttaagtgaaaagcttcttccacagtacacaaggaggtcttcaagacttggtcctaaaacatcaaggacaaggatattgtcatcgccatctacgccagaccatttagtattcgcaataccacctgaaaggttaaaaaaattataagaattagataagaatagcatagaaacttaaaatgtttttggttttttttttcaaaatcaagtagcttcaaatcgaaatatgctgcagcaattgaatccttacttccaccctgaagaattctatacaccttggcttcatagagaagttgtggatgttttgtttttccattttcctacaatgctcaaaattgagtaaaaacaatcaattactaactaaagagcatcagcaaccagcggcaacattttctaagcaatgttttatatatatgcattttctaatcatgagatggacactccctaacaagagttctgtaaaagtcaaaactttgcataatttagaatggggaagttcaaataatttcattaccaaaggtcacaatcacatacaaactttcatcagaagtttaaatattaaattcccattaaagcatatatttttttccttaaccatgcttcagttacagaaatgaatttatctcctgatattagaacaaacaaacccaattgagaataaaaataaaaaataaaaaacgagctttacaattaccagaactgtaattaaatcgataaattcattagaacaatatacatatgaaaaaaaaaaaagacaaagagtgtatcagcgctcacaattttgatcgcgacgatctcattagtttcgacatggttagctgaaaaagaaaaaaatcaataacaatatttcaccaaatcagaactgagaaaatcgaaaattggagctacaaacatcccaaaaatattatttacatcgatcaagcaattgactaaccaataaatatttcaccgaaggaaccgctgccaattttccgacccaacttatacttatctgcaactctcctctccatttcgaggttgaatgattattttacgaggctggatctaccaaagcaagacgacgaaattgggaatgaatcaaatgataaaaaagagaacttttgattagggattaatggaaatgactaagtttttctctttttcaaagctgatctcgtaaaaaccctaattacagaaagaagaagacgaaaatcgagtctgcgtgaggaaccagcagcgtaaccaaaccggtaagcttgataagaccgcgtttggctatgtcttttattatatgtatttaataaaaacctaatttttcaaaccagacatttttgtcttattacaaagttttgttttttttaaaaaaaaaattaagattaaaaattaataatattctgtcattgattgcattaagaatattatttatttattcttattattttcaaaaaaaaaaaaaaaactaaatgagaaagaagagggttttggtacgtataatgaaagttacaataattattattattataattaatgtaattaattaaacccaaatgatggtttccaaaagcaaaaatttgaataactaattgcttattaatattgtaatttgttaagaaaaaaattgaaaaaacatatagacaaaaaaggaaaaatgaattactacatcatcatcaagatttagttacatatttcaccttcatggcaatgactcgttgaaccccaaaattaaaaccccctaatttctcaagagcttcaagatgatattcttgaaaagcttcttctagcacaaatgctcttctttctgttttcagctgctgttgttgttggaccattcatgggtgaccgaagtcgaagactcttcgtcttttcgagtggttttgagcttttctaagaaggttattggcattcgttcacgggtacacaccggctgctggtgcttgcatcgccgattgaaacagtggcgagggatttcgaagcccaagctttggcattcatggctccttcctgtaaattgcttctcttacaaggctcctttaaggaatttgataactgtaccgctctcttaagataagcgatgggatgctccaacaaggtgtcgaatctcatgtttcggatgtaccttctccaaacacattgggaaaatacaagcaaagtgggaaaaattaggtagagcaatctcagtaccacaaatgcggtggctagcgccaaatatgtttcttgacggagtaagttttctggagaccttgcccatgagaatgggcagctttcctgctcagagttgccattcttctcgtgatttgatgagcttccaatttcgttcagtgaggcttcatcatgtgatgcagtcataatgcctacattataattcaacattcccaataaaatcacttgaaaatgacaccagaaagtaataaaagagagaacttttcactcaagagttttcttttcttaccagtaacatcactgtagaaagcaataacagaagcaggggttcgagagccatgatatcgaacacgcattgtagaattcaaaatgaagagagtaggaaatccatgaactccatactttgatagaatactgcagaaacttcaacaattttatactcaaaaaccaaataacacaatgaaattaacaattttaaataccccaccaaaaaaataaagcatattaagcaagtaattcctcattgtatcatttgcaaaccttggcctgatagctgattcttcaatggcgaaatgtggtatggaaggataaagagaagacaggatagagaaagttcgcctaaaagtcctcgaaaaaggacaccaagaggcatagaaaagtacagcaacataatcataactattcttgtgaaccatattcaaggccctttgcaatgaaacctcatctccctacacataattataaagacaaaagtcctttaaaacatgtaacacttctgcaattctcaagttcaacaactaaactaaactaactatagataagaaacaataacaacaacaagctttgaaagcactttcatatgttaaaatagaataacacatcatcagattaacctcaaatagtttaattagacataactcaacaaatgatagctaatttcaaatgcaatgtaagtattttcaaaactttccaatttgaagtattaaacaaatttaaagaaaaacccaattagcttcaacaatccccaaatcccaaattcaaaatttcaagcccacctccaaaagaaaatcaactcaacaaataaaaaaagataacaaaagagaaaaaaacaaagtacctctgtgacaccattgaaaccaaatgaaagggaatcaggataaagagggcagttggattctcgtaactctaagatcgaatcagcaacagaaattgaagagcaaaggccgggttcggcagaagaagcgagggtttccccataagagcatcataaggatcccactcatccaaaccctaacccccattacagaagaaatcgacgacgctagaaatcaccaaaccaaaattgaatgagaaaaaccctaagaggtgaaagttaaggagataagaattggggggaaagagagagtggaggagataagagtcggaggtgggtgggtgggtggccggcgaagactagcgtcgaagctctgaagggttgaattgaagataaagaaaagagagagaaatcaaaagagaataatattaatatatttatatatttattattttatttttgttggtggaataatatgattggctatttttttttgttgggtagaataagagctttgaatattaaatattataatattattatttgtgtaattgtaatattgtaatattataataatgttatttgtgtaattaaatattgaatcttatataagttaatgtaataaatatcgaaacatttatggtgtttggtacccttgtgatatgtaagaaatttaataaaaattatagaaaatagctaattaattataaagtgtaaagtgtactgctgcattttcatctaatttagaatttaggataattttttaatctaattaatttcataatcatgaatattataattatttaagatatcttacaaaattataagaaattataaataatctataaaataaaaaataatactagtattaaaatagtctatttcccatgctattttataacatatagaataaaagaatcctacctaatatttgatgttgttttaaacatatttaatttttttttttacattttttctaaattttatctaatatcttaaataattaccatatataaatttattaaaataaaatattcttccaaatactcaaattgtggtgcatttattttagaattttcattttctaattatttaattgggaatggttggataaaattggaaattgagaacagcattgaattgtattgtcagagacacgtggcgtttcagaactacacaatctaatgaattctatctctttttagtaaaaaaaaaacagtttttggatttatcaaaatataaagatttgttgttttttattattatttagatctaaatcaaaatccaaagattatgacttatgattgtagtgtagagtttggtattagagattttgttttgggaattatgtttctggatttagataataactcccaacagttctgttattttcatatttgactttttagaaactaaaatagaaaaaaccttttttacaaaaaaaaaccttaatttctttttcaaaaattgtaaaactaaaatccaaacccaattattcattactgatattttgtgatgagtagttatgatgaggaagaaaaaaaattccaaattccaataaaatataatagtgttattacctcattatgtcatacaataataattgatacaatctaataaaatatgtgaaatcttatataaaatctaacgatgtgatgtgacctattaaaatgtcataaaactaaacgtcaataaagaaccttacaaaaaaaacgtcaattaagaaaatcgctaattacaatttctattacaacactttaatcaatttattttacatctaaaataaacattttttttatcattacaattataatattagggcaagactatggtaggacctagcaaaaattccctaccgtactttttttgaccattgattttagatcatgtggttattatgatgtaaggtgtatactcttacgataggactgcttgtatacgattaaaactttatacatattataataatatttaattatatttatttttttaaaaa

SEQ ID NO: 380702 - DNA, 1192 bp, Cannabis indica
atatatatatatgtgtgtgtatcatacaatcacaatctgtctactaatgttaattgagttacaaagatcaaattattattccatccaaccttgctttgtcagaaaatgtctaattctgctcaataattttatcgtttacagaactttttgcctacttgcatcaccatagccaaaaccaatatatatgtttaaagcaaaatgctataagtgggcagtttggtttttaccataaatgttatgagttggtgggcattgatattacttacactaaggcaaccaaatttggtttgaaggattgaaaatataggaggagaaatgagaatgagaataaaaattataagaatggaatggaatcaaatttacaatgcataaaaaaaattgataaaaatattattaaaatttttctcatatattggaatagtctgtccttctattttaaaatagaatactcattctaccaaaattgtagaaaggccgttcaattagaatgacattatattattttaatatgcaaccaaacaaaggaatggaacgaaaattgttttctttccatttcattctattgcattacctccaacccaacaccactaaagaaaatatagatacatcataagagagtgagaatgaatgatccttagccttcgaattcagttacgtttgtgggttgtggagtgaccagtcacactagcaaataatatatattatgcgccaaaccttgtatagttagttttattttaggttatgacatataataaatttatctaaactattttcaattttatggtttatgttttcaatcttaagttatgactatttcagcatataaattattattacgtgcaagaggtatgttaagaatttgctcactaatcattcacttaattatctttgtaatgtgttagttaaagtttgctttagcttaatgtggtccttaatgtatatggacaaattctgttattggttttcctttgcttatggtcctggcgtgcgtgaatgcaagtgacaagtgatcatcattgtaattgtattgcttcacattttgctattgaaagccaatacagtacctaagcataattaagccgagtttttccttttctataaaagggcactttttttacttggtatcagagctcttttgtgttggaatttattttaccaggatcttagatctactcacaagtatgttgtttaa

SEQ ID NO: 380703 - DNA, 5081 bp, Cannabis indica
atataaatatgcagtaagcttctaatcacaaataagacaattaatacaaatcaattctttgatctttttcttcttcatttttctctcaatatacttctacatatgcgtctgtacatattattgccgtaattaagccttgagatcctgactagtttggctctttgcaagaggcttggttttacttatttatgttattgtgtggagactgattaaatacttagttgtaaactaaattgttttgaaaaggtcgatcggttgttcaatcttattttggttatattattaacgattgttgctactaatgactttgctgttatttcaatttctttttgtcttagagaagtggatatatatatatacatatatatatgctttgggtaaatttgcaatctttatggatgattattatgttaagtggaattggctacccgctttctatcagtaccttttttgaggctaatttttctaaataatatatttatggcactcttccactgacaagaccattttctcactaaaaagaggaaaattaaaagtgtaacagtagagttgaataattttttttcccaatgccattatcgggatgctgctgttgcatggttatccagtagtgaatattatattatttcccatcttaattatgagttgacttagttaaatatatgtacattctctgtagctagctagtatagctagtgttatatatggtggaccaaaattaattggatgccctagcttaatggtcgaaggtgtgttttctacacgtgggttgctatttctgaactttttattgggtagaagagaatgaagttatttaaattagaatggggcatatgatcgatttgaaagaaacagaagcaacacgtacatataaaattatgtcggccatcaaagattttagttggtaaaatccaactacaggttatttgtggattaagctagaacaactataaagtgcctatatgattcccttgctttaaactccaagaacttgtggaagaaagcagagaagctccgaatgtttgccccttgtctctaaactctgtttagtgctattctatcaaacattattagtaatttacacaatgacaatcattgtatatttttatagatgtatatattaattggtgcgaacaaaaattgtatagtaaacaccactaatgtaacacatttgacattcctataaatactgaattatcatgaccaattgtaaagtgagcttgggaacagagtgttatcattatcatcgagttgtttttatctttttcaattggataaatatatatattctacaaaattgaagggggtggtatagtagaatggaaattacacgtttgattaattcccagtggatatagtaatggtattggtggaaatctactcgacaatgtatacatataataacattattggcggtgccttgtggtgaaattcattgtatttaatatggtttgaccaagtgtaacctttcatgcacaaaaccgaaagtaaatgaagttgtgtaagcctaaagttctctactataaatactattgtgtgtgttgggctctctctttctattggtatatatttatatacacaaaaatgtgtgtcatagcatggttaaaagtagataggacaagctatatctatgtatatatgtgtgtgtgtctatatatcaatatgcatattgttgtttacagaattaggatagctagccaaattaatataaataagcttagtaaataaactaaaacgagagaaagatcaaaaattagagttgattgtatattggatcacgtatcaagatcttaaaagattatgatgatatatggaacggtgagatttaaaggatcttgagtgacaaaatattttaggactatgaaatttattaattatgaatattaattggaccacaaaaaatattgaacgttgaccgttaaactaagtagtttttagttaatggtcattttccagatgatatgggcggccaaaatctgaaaaacaatttgaaatttgaatatatgatagcagttgatattgagagaattagaagaaaattaacacatgaacagtactaaaaataattttaaataaaatattagagcaaaagtcaaccaaataaaagttgactaacataattaatgtactacttaatttttttaattattcaaaagattttgtctaacatttttagtcagctcatacattattggtttggggctgaaccttgcatacaaatctatgttacgaatatcatgagcaaaaagaatctatgcatacatcattagatgattaacattaattttcagaaaaaaaaccttaaataaataatggaatcttctcgatctgttgtataaatattattataattttattgaaaatctctgttatattataaatataaacaaatatagcaaagcatgaaatgtttcgtttgctctctataatattaattgctgatgcgtatgaatctctatatgctgtcaccatatatacattaattatttacacataaatatatacttggtatatagactttatcaggatttagtgatgagtagtgactcatcagttctgatcttgacttgaaaaaaaatatgtaagtaaattaatgccgtattaatatgtatatttatataagtcaagtcaattacattttttataatttacaaaaatatgtaaggtgaagttttttttgcttcaactactaaggtgattttggttgaatttcgtatgaaacgattgcgtatctattggaaaagcacgcatgcaaaattaatacaagcatttcgaaagtctttgtactcttgcgtaatttgggaaaaaaggcgtacacgtttgaaaacatagaaaggtatttacttctcaaaatcctaattaataattttcatttcaaatttcatatctatatatagatatatatctctcttatactcttacccaaagtgaatataatattaaaagaaaaaaataaaatataaatgaaaagaaaactaccatattaaattattaattaatatacaatttatctccttctctctatatatatgtccgtaactccactcctttttttccataccatttccacacatattcttctctatatctcatctttctctctctcataaaaatcagaaaattgtcagagaataaaatgaacacgtttttaatagtactcgctttctgtgttgtactctccaccactactactactactgcgttttcattctttgatgataatatcctaaacgggttaatattgcaaaacgacaccgtaaccatcgacttagcctcaatagactacggccacatagtaaaagtaaacccagaagccgttttatccccaacttccctaaacgacatccaatccttaataaaagccgtaaacgacaacaactcatcatccacattgagtagtgctcctaagactgtagccgccagagggcaagggcactcggtccgtggtcagtccacggctgagaagggcattgtggtaaatatgacatctttgggtagtcttggaaggaggattgtagttgttccaaacagtcttttgggtccgtatgctgacgtgggaggtgaacagatttggattaatgttttggttgaaaccctaaagcatgggctgtcgcccatctcgtggaccgattatttgggtctaagcgttggcggaactctctcaaatgctgggattagtggccaggctttccgagttggtcctcaaatcgccaatgtatacgagttggatgttattacaggttcgtaataattaattagtttgtttaattttctttttgtttttgtttctcggagggtagaattgactttttaataataaagaaagaaatattatagggataaaaagacgtatgagactagctagatattgtagatcacgcaaagagagcctttaacacgccgttatagttatagagatttgaaaacagaaaaattacaagacaaccaaacaaaattctcctaagtttataatatataaaagggactcgaaaaaaacaaggaaaccactattaatttcttagagatttgtagtattaattaacaaattccattcacagtatttatatattaatattacacaaaaatggcatatatattttaaaaagccgccccattattattaatattattgttccaaaatttataaaactaaatatggcgatatattgacatggacgattatcaatcatgttggtcgacaacatcatgatatatctttctttctttcttattttaattactactatagccatgtagacattccttatatagagccttataagtcaaaattttctttttaagaaaaataaatgggacaaattaaataaaatggagtatgtggccttttcttttcctttgatttggtttggtgtgtatggccttttagtatataaagtcactcactaaaataatgggacgccccgtaatcaagaaaacccattgatatatatgtaagctctctttttggcagctttgggagttaaattcgtttcaaatctagtatatagtagtagatgttagctatacatataaaagtataggctatgagtgattataacctatagctaggattttgtccaccgtccaaacaccatgtgcaccgtgtacatactagttagctagttgcatgtcccaaccacacatacatttttattatactatatataactacattacatatgtaaaagtatatatatatccaccacatgcgttattagtgagattatgagtagtactattttggtatacagtatattggtgccgggataataaagttacatactatcatttgattaagacccaataaagtcattaagtttggatattacaattaaaatattatgaggaaatggaaaaagtatttaatataaacaacggccatacgtatttttttaaaagggttcaaaggctatacgttttggaaaggttaataatttttcaaattaattatatatatttatagtagatcgatatttttagcttaatttccatttatcttatatacacatggtattaaaattttgttggattatctgttagtattttttctttttttatttatcgatctttatgtctcaact

SEQ ID NO: 380704 - DNA, 1254 bp, Cannabis indica
actaagcggtctttacatataacctaatatatgctaacttaatgcacaagattaaaacacctaatatagaatattacaaaattacaaagttaatgtacagaatctatcacaccccgcagtcaaagcgaaatgttctcatacattgagtctgttcctgacatcttgaaataacacaaaagaaagtcttttggtgaatttttttgcaatctgatagtgtgagggaacatgtaagacacgtacttgtccacgagcaactttttcgtgcacaaaatgaatattcattttgatgtgtttagtgcgttgatgctgaactagattaccagaaaggtatatcgcactaatagtatcacagtatatcaattgtagccttatgaataggaaaacatagctgcagaagaagattacatatccaacatgactcaaaaatcacattggcaatgcctcggtattcagcatctgcactggagtgagataatgtggcttggaatttagatgaccaagagagtaggttatcgccaagaaacacacagtaactagaagtggattgtctggtgtccgtgcatccaccctaatctgcatgtgtgtatgaaatcaaagaagatattgaagaaggattaagatgcaatccatgatgaagtgttccttgaatataacgtagaatgtgcttgagagcatgcatatgttcatccatcggattaggcataaagaggtagatctgttgcaccgcataagaaatgtcaggtctcatgaatatgagatattgaattgctcctgcaaggctacagtagtgagagggatcctcatatggagtgtgtaacgtcctacttgattaggactgctacagtgattttctaattattgtgcacacctttgctaaccaaatgatttttttgaaaattgtgccaaatttgaaacttctaataaactttaaacttttaaaaataagcaacaatacataaaatctaggatcccatcttaaataattcataacattactcaaaatacatcttacaaaagtgtcgctccgtgacacaaaatgaaggcctaagtcgtcctgaggtcgaacacttaggtctaaccatcttgatatgtacaactatcttcaaaccctggactcactgatgctttgctttcatctttcctttacctacaatgtaaacaatatctgtgagtcaatagactcgggtaagagaagcataaaacatataaacatgcaatcgacttgcatctaggcgctcatacacctatctataa

SEQ ID NO: 380705 - DNA, 2826 bp, Cannabis indica
ttttttttttttttcagttttgatttatgagttaggtactttggttggatcaataacctgatgcaatcattgtttatgaaaaagggaagaaagaaaatatgactgtttaatattgccttgtattttcgtaaagtcatttcagttttttagtcccacatcgattgtgaagtacagtgagcttagttctaatactataaaaagcaagcctctttaccaattatacttacgcagccacgcggtgagcacaaagcgaactattctttcgccttttactaaagaataccgtgtgctcgccgcttacagtggcatacgccaatttttggaggactttcttcggagagtccacacaagtctagtcaaatattttagtttatttcatttgattttaactttacttaatatgaatttgtgatgacaattttagagtcaaaagattaatttctgagaaattcatgctattttccaaatgaaagtactcttcttttatgtcaattttgatgatgaaacattattattgaagagcaaaaaatgattgaattgacttctgaatctaaaaattcagacctctgtcaacttttttattcgataaaaatagtaaaatggcctctatgaagttgaaaaaccaacttaagctctcaatgtttggcaagtgaagaaaaataaagttttgtggtaaaaagagaattaaaacaatcccatttcaattgagtcttcgacttgtaatcctttaagagagagccttcagtacttcagtggtgacctcttttggaggtttttctgcatgcagttgggcaaggacacctttcttggcataataattaataacctgtgcaatagaaaaggaacaaaggtgagagccagggtttataaaaattccaatcatctactacactcttatttcaaatcaaatttaatgaagaaaaaataaatgatcttttaagatgatgcaaaatttgcatgaaagttcaacaccttttgaatattgatactgctatactcactttaaaatacatgtaatgcaggatttttagattgaaaaaaaggcttaccggttctgtttgcttgtgaaatgcatctagccttgacttaagaacttctgcagtgtcatcttttctttgaatcagaggttctccagtgacctttaattcacagcatgccccaaaatgcattttcagtagttattaatggaacgggtaaaaagaaaacaaataagatttattcattattattgaaccatatgtgatcttgaaggggctaagtttcatataaaagcttcaaattttccttggtaagattttgagaaacagcaaaaactaaagaaattagtaatggttttgcttgactaatcaaagataatagaaaatttagcttacatcatcaacaccagaaacttttggaggtgcgaatttggtgtggtaagagcgaccactcgaagggtgtatccatcgaccggtgatcctctcctccaatatggagtcatcaattgcaaagtcgagaaccttgtcgattttggctccctgcttttcaagcatctcatctagctgttaaacataacatatgacagacatgttaaacttcaagtagagcaatagagaacaatgctatgctgtggcaattggcaacatgaacaaaaggaagagcagagaaactaggacttggctatagacatcgcagtctctactcgctatggagaaaccatgaagatttttgtagtgtctttgaaaacattcattgaccagtcagttgaaattatacttttagactcaataatgattcatgaaccgcatcattgagtttctttatctgggccaatagaggctgttaacaagttagttctcatttctggttattatacttttgtttattaaatcacaagagtttcagaaaattaggtaagagcgaaagctgaaaaatgaagcaatgaaaacttaggcacattagcatgaattaagagaaaagagagtgaaaccttttgagcttgaacaacagtcctgggaaagccatctagaataaaacccttttggcatgatggttttttcatggcttcatcaattataccaacaaccaagtcatcagatacaagttctccctgccaaaccacaattccatcacatatacacatatatctatagtcaccaaaacatggttatttgataagaattatgaagtaaaattaggaaaaaaaaaaaaaagtaccttattcatggcttctttagccttaattccaagaggagttttagcagcaacagcagctctcaacatatcaccagtggctaaatggcataagcaaaattcatcctttataataggtgactgtgtaccttttccagatccaggaggacctgccattgatataaaatcgcataagatgcaaataaaagtaacccatttttctttttcttaattcaaattcagtttcagctcccccaaaaaaaatgcgtgagtgtcagttccctgcccaaattggattttccattttgaggctgaaattgaaagcaatataacaaactaaccagtaaccaagaatgaataaacacacaaactaatctgataattttccattacaaaatagtgaagaattggtaaataccaacaagaatgaggcgtttgtcgggcttggaggaacacttgagacggcggaggagttcggtcatcatgtcaagggaaggtatgtcatccaatgcaattccagagcttcccattttctctttctctcacaaaaaaagggtcttttaagttataattgttgtgttgtgtgtataatcagaggagattcaaaggcaagaaatgaaaggaaagcaagggtggtggtaggtcagtcttgta

SEQ ID NO: 380706 - DNA, 1582 bp, Cannabis indica
accttacctagtaattacacagtattttcaaacgcacccttatataattatccctttaaaaaaatccataaaaaagtaaataaaacacaaaagtcatataccaaaagcactatttgattatgccaaaacagtaaacaataaaaaaatactatatttgatgtaatttttactttattgtgctaggattttactctttcgcccacgtagattaacatgcttttctagccacatcaatagattgaatggtttaggccttaagaattaagatttaaaatttaaatcataaatgacaatcaaagcactatttgtatgtttctttttttggcatgcaacgtatgtactaaaagtaatcttttttggcaaaaacgcatcaaaaaaattcttgacataatacattcccgacccttataagtattttgatttggttacatctccaagaaatcctcattcatatctttgtttatcaatttgttaaagcaatatgcactcaaatagagccacaagagaagaatcttcttaagaacagagcatatcaatggggaaaaaatggaaagatgaggaggaaaatcagaggattgtcaaggaaacaacaatggtacccaacagaacaaacgaagtcataatcacagtattcatcgaaaaaccatggccatggcctcataagagagctggtgctaaatcaaaaatgatttttccaccaaaccaacaaaaaacaaaaacacgaagctttgatcgccgggctcaactccttgcttatgcgcagcaacttagaaaatctgattcagaacagctacaacggcctaaaaatggttccaagccaaagtacaaggtgagtagaatagcattttatgtcttgttttcgttgatctgtttcttatgttataatgtatgaagactggtatgaattcttgaatctgaattccgtgttacgcagatgaacgttcgggtaggattgcagagaataagaacccgaaagcaatatcagcgattagtgccagaggtagacatatcatgtaaaccaaaatctgtaatttgcagaaagaagaaagccagcaacaaacacacggattcaccctttgtaataaatcccacttcctgtttaaatcttttattttctctttccaattcacttctacagttctactcaagtgtgattaggtatctcgttgcccccattttttatttctttcttttttgcagggaaaagtcagaggaattttgagagggttttgtagagattgaaataagattgatggaaaattttatgtcagtataaaatttgtttggatgccatgtgtttgggaacaggtctagtgcatctgacccacttttttaatacaatttttgttaaggaggtgagtttgagatccaatttcatcccatttatttgttatgccgagtcaaatttatgtaagacattgtttctgtgttagaatgtgaaagtgtacagttcaagtagtagaataggtgagtgcatgataagatgcatgaagttccatctcaaaatcaattggtaataagaggagtagcgcatgcatcttatatatatggtatttagttttaacatattatcaatgtggga

SEQ ID NO: 380707 - DNA, 3294 bp, Cannabis indica
tatattgtgtatctgtagagtcctcactcccttataacttatgaccattcgaagaatgtattggaatcacagctaaaatgataatagaaaatgtttcattcatagtaatatatatctagataacttaccaagtaagtcactctaatactaaaaaaatatagaggaaatgtaataacttaaactgcaattgaaatcgatcctatttaaacgatccgacacaaaatcttgcataggtcatcttttgtgatcactatatatatgctaccatcactagtggtttctagaggcggcatatgtgtatataaataaatatggtatacacgttataattactctcataacaaatgaaggtttgtatgatatgatattatattaatctcatgaaatgaaacaaattatgatggaatgatatgtagaatatagatatgaattaatgtattgcagagtagtcagcagtcttgaatgggaagtagagatagtttgcccccgtaaatctccggaagttgatcctcagcgatgtcgtttagcagagtatcttttagcttcttgttatccacaaatactatctgcccaatcaattaacatcatgcattgcatatatatcaacttaattaatgaatctctttatatgggttataattatgtaccttctttctggtgtttttgtcaatgaatgggtaaactatcttccaagcagtcatgaaaatgtagggtacatggactatgaataacttgccaagcctctccgggtaaaaatcctttatattaatgtatatacatatgttaatatgaaaataaacagaacttttcttttgaattatgattattataaagttttgtcatctcatttttttttaattttattttttagaatagagtctccttcaactatacatatcattgtaaacgtctatttcatttacattttgttcattttctcaaatgcttatgtttcatttaccacaagtattgttccgatatgtacctttatttaatttgattaagctagctgatatctagtttaccgacactaaatatgtaaatattaactctaacaatgtcagatatatttatagatataaatattaagctagctgatatatattaaatcgttatttatagatatatttttttgcttgaactcatgcactatgtcgattgccatcacattagttgtgtatcaacaaactgtttagaaaaaaaaagctcaatacaattaaaggggtgaattttggatagttttgatggttagggaaaaactttaattaagctttacataatatgatatttcagagaaaaaaaattccaagactaataattatatagtatcaataatgtacatacacatctataatggaaaattattgggtagtaattatttttaatcatctacaagtatttttattcatatataattacaactctatttttataatatgatagtgtataatgtagtaacataaaatcctttggtgtgattttattaaaaaaaaaattgtgtatgcatttgtcctacattgttcatattgctagtaatttataatatttatattacactagtaattacaaaactttaacctcataagattttagtaattagataaatactatatttggtgtaattttattaaaaaaaaagaaaacctttctcaaattttcagataagttagaatgcaagatttaatagagcttcatgaacgagtgtttattttgatatatacacacacacacttatatctttgtaactaataattaatggtacctaataataaataatgattgaatgaaatatgtaacctgcagaatggatagagctgctaggtatccacgaatgtcacaattggcatatccccatccttgaagatctccaatggctacaaacttctcatgccctcttggcattctgacacaataattcatttaattaattatataattattattagcttccttcgaaagaaattaaatggattaaaggatatatatacagtatagttttgctcaaaagacaagattaacatttgtccacatatcttgggatactgtctattcatgtcaatttttacttcttttcttttcttattcacaaaattaaccaagagagatgggagagatacgatataggacctaccttgcacatactttatcaaggacatagacaacaaaacctgatgatgatcataaaattaatttattaagaataaattatcataataattagtctgtaattaattaaaggttcaggaatactataatataatattattaggtatgtacgtttgaactcatcgaggtcattctgtttatgcctgccaccaaagacgagggcaatagggcgtccttgtttgtcatggcctggcataaagaatttgttctgagcaatctcattgggaaaatctgagtgtgtgaagcacccaccattgggtggcatgaaagattgtctccagcttaagtacttgaggaacatgtgcgaggctttctcaacatccatgtctcgagctctaaggaatctccttagcatcacatcatcactcacttccttcgagttccaacgatcttgtgtgtggaccagagccctcataatggtcactttgctcttctcaatttcactcatttcaactacttttattaccaattctttttcttcttcttcattcccacttgtagtacttgcagtgctagtaccagtactaattataccagttattgtctgatgggtgtgctcctgattatttgttgagttcaaatcggccatatatgttgatttcttttggttaaggatatcggttcataaagattggaagaaaaaaacaattatattataattaaattaaattgaattgaataagaagtgtgtggtaggtattaatgagatgggtaaatattgagttaaactgctgaatttatagagaaaattaggcagtggcagttgagctgaatttaataaagcttagctgtatccattgatattaaataaagtccaaccacctagctcctatcatttcttattttttatgggtcttagcaaggatctacttcagaatcctcaatgcagacgtacggtgacattttgtttatagaatcataatttatttatttaataatttggtgtatacatatttaagtttaatttctaattgtaaaatgaatatttaaatttaatttttatcggtaataatatataagttatattttagaacttcgtaggtacgttaaatgttaagtcattattcacgtgttatttttttattcgtatatttaaagagttaggggtgttcataaaatatccaatct

SEQ ID NO: 380708 - DNA, 4050 bp, Cannabis indica
ttttttttttttttttgggaagagatttgttcttcttttatttatttaatttttatttttcgggcagaaagtggtagagactagtttagcctttacctgttgtcttctttttctttagtggggggggatagataggggagagaagaagattgatggatggtaatgaaaaatgacacttttcagcatctacatcattataatctgtataatacctataaaagaaaaagacccacgaggattttgcttctttgcatgtgatagcactagtgatgttcttttttctttttcttcttttctttttttttcaggaaaaaataaaaaattctaatatgctctttaataaattaagaacaacacataacaaatgtacatttgtaacgaatatttatgatacataacattgctctaaaacaaaaccctctatcaaatttaaatgctattttagattatttgaaaaaatattgtggtcttttttgacctttataagcatcctcaaaagagttcattcatccaatctaactggataaacctattttcaaccacagaagatgaattcttcgttggtcattttcgattaaaaatggtggtgccgactatgtccttgtatatcatgcttctgttctacctttatgagacctgagaattatctgccaaagatgtcaacttagcttgacatgtttagctacatgctcaagttggctattcaaatagaacttgggccatcaaatttaatttcatgcttcatatttcattacaatgattgtccaacttgcctacttggtattcaatttcatttcaaaagtaattcctaatggtttatgagcatccaatggtaagaaagcataattgttaagagggaaaaacacaaaatttaaaaaatataccaactttgactctctcacttaatctacttctgagaaaatcctaaacttgcattgccctcgttaattggagtgttgtcgacgtgtggtagtgcgtcggtggtgctttggccgagtgcctcctatattagtcattattggtttgtggcgctcactaatctggttttgggtctagctaagtggcttgttggcttttttggcatgaccagatttccatggtgactaaaagtggctagtttcgctagtcgttaaattgcactcagattttgggcaacgatgtttcccaataggttattgtgtgttccctcgacctccttttagtcagtggtgatctctcggaaggtggatgttgatggtgtcgtgttccccttagcttgtctttgcctgttcaggtcgattaggttgtcaatgctttagtaattttgttgccttctcatttcctcttttggtttgttattttactcttgcgtttagagagtttggatttgttgaggactttggcataggccattttttgatctaatatttccattgtactcgcaagtgtcttaccttctcggtttgccgattcaactaattttgctttgatctttgaaaggaaggtcactaagtaataagtattacttgtgtagagattagattagtaccttctaaagtgttatacctcttgttgtcctactttgtaaacggcttgattcaccattgttagtcatctcctagttatgtgtattggctttttgaaaatttcatacctagattggacttcgctccatgttaatggaattcttcttttccacttaaaaaaaacgagagaatatgatggggataccaacaagagaaatacatgcataaaccttgagctccctaattaacctctccaaaattatgtcttatattcttaattctatagataaagccactactgcaaaaaggcctcccaatgtcaaaccaagggggctcaggtagaaatggagatatcaaaatattagctgtaacaatggccacttgattatgaagactagaaataagaagaaagtatgaagactttagaaagcaaaaccagatttcaaatgaagttcaaaaacaattgctgggaggatttacatcggcatgcaaagtgatggcaaattcagaaatacccggatcaaattatgggaactgtgaaaccaagacctcgtaatcaagaaggcaaagatcaactctcaatcattggttccgggccagatggctctgcgcctgacgacttgttggattggcgaacagagttgaacaagatgtccttgatgacctgaaggaaaatggaaccgcatagttcagtagagtcacagtagactctttgtgggtaggataaatttcaaaacaagaaaaaagatatccagacacactgaacagaaagtacctgtgacattagaccatgcacctgctcaacagttatttttgcactatcccgagtaatttttgctaattgtgattcttcctgctatcattaaggcattgaaattaataaacagtaaaaaaaaagtatgagagaggtggtgtggtgatgcaactgatggctggactattatttgaggaaaacacaatcatagtatacagatgcattcctgtggataacatcaaaacttcaaaaaagctaattgatgaactataaactaaaccaactaatattgagcacactatgttaagagctgtctctctcaatacaacctacaatacattatcttcctatcacataattccaatggaaactaatgtgggaaacaaagacatcacagaaacagatgaccaatcagcaaatgaaaataaatttaaaaaaccaaccaaagacaagatctcaaattatggaatagctgcataaataactcttctctggatgcaaaacagcacataaaagtcatgaaacacattcagaaaaaaaaaaattacatcaaatcttacaaaaaagccttagacttaatgaagaagactatggcagacattaacagctgtttcactgcagtctgcagtctcggtacctagtgttgatatgtaacaaaaaatttatcattgactatggttcctcttaaattcaaaatgcagcatattcaacaacatccctaaattagctaagaatgttaatgtcaagactttgctcacatttataacattttaataatagatcaaatcatccctaaatctacttgtgaaatgtcgttacgacttgacaaggcaactgcgtgagaagtttgatcttctcttttccttttttctactcccggaggcagatggggacgacgaaattgttctcagcaacacactagatctcctcactaaggtgagataagaagatatgaacctcagcgcaaacgtggaagaagttgtggacccccattcctctttctaacattagagaagcaattcaacaccacttggcagaggccgaagaagagcgcttgttacagccacaactaacgaagaaattcactccaaataatgctgccacaagaaacgataatgatgatattgtcaagtttgatgtcgtttgttctagttccttcactcagattgtggatcccttgcaggctaaactttatgagaaagtgatgttgtggctttctgaacgtagatatgagatcggtggaatgacaaatgagcactttaaattagttctccaactgaatcatcaaagattgaggctcgaacaacctcccctaatggcaacatgcttgttcagacacaggatatagtgcaaagaattcaagggcatttaatttaatgcgattggaagcagtgttactggaatggtcctttgacgttggatacagcaagggcatttggggatgaattatcttgtccaccttgtggacaatttgaaacttggggcaataggtatttgataggaattcagtaaagagtaggcaattggcagtgcaaataatagaggggtttatttgtgttactaattagtggagttggtccagtggtgcttttgctagttatgttataggagtgaatgaggagacaaaatgtgttatttcatagtgagctattgctcattgggagagagccaagctctcaaaacttggtatttgggtttgtaatgcttcattttgctttggtttgttacattcctagtgcgcaaatatatatcattaagggctcgtttggaacgccgtattaggtcgtattg

SEQ ID NO: 380709 - DNA, 2237 bp, Cannabis indica
acaccaaactaaaaaataaaattatattagaatgacaatttttaaaataaaaaattagattacgatttgaattgttatattgattatggtttaaattaggttgccatttatgttattggtgatttgtagagtatattttaaaaaatgtataaataaaaaaccgatattatttaatttattttttcaaaaaataaagaaagggaaaaatggtagtgtagctacttttgggtttgggatataaaaaaggtctgtaaacccaacccagtgaagccccagagattttgcagatcaattcgtctctgagtaacgccggagatggatcggcaagcacacgattacgccgccgcctctgccatggcttatgcccagcagcagcgtggggtaaatccacagcagcaacagcaagggtttggataccctcctcctcctcagcagcagcagcaacaacaacagcagcagttccctcctttcattcccccgcacccgtcgatgcagcaattcccttaccaagtccatccccaccttcatcatctccaacagcagcccccgtccgcttatccctccctcatgggccctccgcttgtgcctccgcctttccacgcttcttacgatgccggggcgggtgcaccgcctccaccattaccagctgctcctccttcggacccagagcttcataagcgaatcgataaattggctgagtatgctgcgaagaatgggcctgaatttgaagccatgatacgggaaaagcagcaagataatcctgattacggtttcctgtttggcggggatggccatggttactaccgttataagctttggctatgtacaagaggcgcaggtggtgggtcattcaatccgccgtttcctccttcgtctatacatatgatgcgtcctcctccgaatcccatgttgagcccgtctcacttgagtgcacctcctccaataatgggtggtccccaaatgcatcaaccaccgtatttctatgagcatcaacatcctcagccttttggctcttacggtagaccagactatgatcagtcttccaagccttttaaagggctttcgggtccgctaccctccgatgttgcggtggagttaagtaatgtgcttattactctcaatggcaccaaagagtctatcaaaggtgccaagttttggttcatgcagaggtctatatttgcaccggctttggctgaggcacttagagacagagtattctctgtggacgattccgaaaggcaactccatataatttaccttgctaatgacattcttttcgaaaggtacaatctttaaatcactcttcttctaatactattccgatgttattcaactgggcaaaacttataaatctgaatgctactatgtggttgttccttgaaactttgtttgtcattattatgttaatttgtctatgtctctttattccttttgctgatacagtcatctgtttttcattttttagcacttaattgggtgaattctttgagattgaaaatagttttgctagttaatacgtacttgtttctcttgcattatactatataccatctcttcaaagtgtgctactacaagacactaaaaaattgttactagttgattcaagaatagatagtttgagctttggtgtgttgataggagcagagtagtatcaaggatattatggtcaagggaccaactaacaatgacaaaacggggctttactgctagtactcaagctcaactttctagagctagtacagtttgattcccttttttccccatttcagatgccccattattttcctcattcatttgcagttagcttgcttctaacctaaaatttatttttataacctctgaagagaaacctacatgattttctgatatttagtttttggggaagggggttagggttagtttagaagaactctctctctggaagtattttttagaccattggaaagtcttagcctaagttgtaagtagaaattcatatgcattataaagctatctgcaatgccgcactatatttctctaaggtatttgaatttgtgtagtgtgctacagttgtttcgcttagatgtgcaaacccgtcttaatcttttacttttattatccacgccacccatcaactgattaatacttgtttccgtcaaccctgctgtatgtattctttgatgtttagacttacagtaccaattcttctgttgatcaatgcagccgttttcaaattgatattcaatttaaacatgtta

SEQ ID NO: 380710 - DNA, 1798 bp, Cannabis indica
gagcagctatgaatgatttataatatcaaaaaaagaatgagaattggtgcactctagcaaacctggcaaagttactattactccactttcagcaaatagcttaacctgaaacttctgaactgcacttttcacttcttggtgtacctctgcctagggaaccgccctcacaatttcgctcgaactgcaacttcaatcttttgcgaaagaaaaactaatcgctcccccataatcatcgaacgaaattggtgacttattaagcccaatgcccctgaacttatacgactcaaccttgttctgttggtaagcataaactctatctccaaaatcatcgtcttgacctaaatcatataaggataatcagattatcaattagaatcaagggattgattgatacagagctatgtcatggaaataaaaatattccataacctccataagaaagtttgggtttgtgaaacagatttaccaacaaatttaccaaaactattgagactcaaaactaaataatagacatttagcatttgtacccagatttcttctctagtgttcaatcaacttacctcaattttatttcaaactccattaaaattaaaaaccaaataatagacattcaacatttacaaaataattattaaattataataagatattcatatatatttaggtccaaatgctgtaatagtttgcaatgcatgaaaaaattgtatttgttgttactaacatcttctcttctttaatcttgaaatcattaacaagagaagtgtgtctgagttagattgacaagggaaactaattttagaaaattaaataaaaattgagaaagcgaccgtaccaagtagaatctgatagcagtgtaatagaaatctcaaaatgaattagattatcctttactatggattaagaaccactttcaattaacctaatttatccactggtacggacatgttactcaaatacataaaataatttctaagttctctttaccttgaaaaccttcattgacaatggaagaaacgggaatggtatccaacctcttctccaaggtcaattgaatatttcttttctttttatttccccccaagtttctttccatattttgaaccgagaaaactgataatctccttgttccctagtactttcagttttgcgatgcatccatgaccaaaatttgtcgttgtatcgattggttattaacccattttgtaggtagaaaattcgtaataataagagaaaacatgacatagagtgctcaaactgagtatttctcccattgaaatttcgtggctcaggtgtgaagggagtgggagtgaaattataaggtcattttaaatgatgtggagaaaggtatatcagtcgatggttaacgtcaaagtttaagggatttttacacttatgctctttttttacctttttttatttttatatttttatttattctcggttatttaaaatttttttactattttttatttttaattttatttttttaaaagttctaataattacaaatatacttttaccatgtatatgtcatgtttatccattctaacacccacctcctccataattgccctattcttcttctttttttttctctatttctctttcctccattcttcaacctccatagcccacgatcactcagtcgaagcccttacccacgttttttctcaacctcccatctatgccactatctccattttgttcgataatctctgtaagttcttcctcccctattgtgttctcttcttctataatcgaccaccactagaagtggttcgaaatccccatctccaga

SEQ ID NO: 380711 - DNA, 4671 bp, Cannabis indica
gtatgaaaataattggagaggcggtggttattttagaattgaatatactaaaaggaatgattggaaatactatgcttcaattcttagtgttaaaataatcttttactaagtaaaataactaattagttgtatctttctctaaattccatttcagcatatatatatatattatgagttcagtgttatctatcatttactattatattaaattttggtattggatgaattatatattaagtttttgtaatagaatgagttgctaacaacatgtcttttacttgaatacaacccattccattacaaaaatttaatatataattcatataatactaaaatttaatataataataaatgatagactacactgaaaaaataatataaatacattatatatacatatattgtaacgcaattctgagagaaggatgcagttgattggtaaatttacttagcaaaaaattgttttatcactaagaattagaacatagtattcttaatcattttttttagtatattcaattctaaaataaccattggctccccaatcgtttccatacgaatttttaacgatccaatatatttttttttttttcatgttcattaatttcatacccaaatcctacaataagtagtacatgcgtaactactttattatgaggagaatgatcatatattttctacaacaatggaacaatatataatattattgttagaaaatatctttgtaaatattaaattatatttaaaatacacaaaattaatcatagtacatacagttagattcaagtattgatagaatttatttattttaactcccgctattactgtgtctcctctcctcatcataatagtttatatctcctcaattgtgtctagttctttatatccctttaagagatgcactcgtcgatactaaaatgaataaaataattaatatgctcttttctttaatcaaatttataataataacattatacatacataccattggagttagatatgacttgtctattttgcattcaagtatattttgatcttcacccgcaaaagaatggtccatgttaaatcgtatgtcatgatttgtaatataatctagcgcattaataatgctagatacacccgcacccttatccctatctccatcctcatttttattcttaatataacataaatcaattaattcttgaaccgaaagctttatctccaactttctttgctttcttaaatatatttttacacatcccacggtgacaaaagcccaatacgttgttaaatatttacatagtaacaaactaaacaataagtaattctcaataattaaatccaaatatatgtaatctattttgaatttacttaccaatggttccctgattatcaattttactctgaaaattagaacaccatacttctaataaatacataagatatttaattgccaataattgttaaaataaagttcataggtaaataataaaaaaacacaaaataacatttcattaaaaagaatgatgattacgagaatgatattggcaggggattttagagtagttagatcaataagtgagtcaagtacaagaatattgttttgggtgagaatatatgtttcaacttctgaattagatgacaaactagtaattaaaatatttaaatttattagaaatttaatttactaataaataaattatcatcactaataacatcaaaatcatgataatactttttattttcaacaacactagcttaatcatcatcattatcatgagaatatgattcaccgtaattgtgttatagttcatccaaataaaaagattctcaaaattattttggtcatggaaagttagatgaatttcggaaagacattctcagaagtctaagttgtctatctggaagaagtctcgtaaaataataggtgtcatcgagaagggcgttcccagatatctgtcacgtccacttgaaaggagtcttcaacaatgctagtctttcccgaaaaaggagtttcaaacaactagttattcctcctggaaggaagttccggatagtcgactccagctgttgtctttcttatccaggaagtccctttagcgtacactttagtcttttttcccaaaagcgtatgtctcgtccaaaatcactttgtcttatgctggcgtagaaatattgttacgaggagtttgctaagtttgtcaagtcttaactaacttaacacttgtagcctctgacttaaaatctttatcctgagcctatatataccattaacaattatcattttgagcatgctagattgacgaattttgaaaggagatttcgagattaatattgtagtcgacaagccaccatttctactaatttcagttcccacttatccttaattatctaatctcaccatttctgtcaaaaatgagaataaaatataatttttatttttcataatttttgatgtgaattgtatttttaatatataataaataatattcatactaacttacattataatatttaagtgtcggttaaaatagattttatttttgaactatttttatataatatgctatccacatctctatatttctatatttaaatataaataaacttaactttttagcatatttttttttcctaaatattaatttataacttaaataaatagcaatagaatgaaagatgagtgggttcttttgcatgagagatgaatgacaataaataacacacaaattattccaagtagagaatgaaaccccaaaatctctgtgtagaatgagtttataatattacaactttttggggcatggagtaattaatatgcatgtatttctttaaatttcaaatatgtttcatatcttttcccagtgatcatcattccattttttctttttattgatttttaattggcccatgtatatattcacaaacttaattagctaatattttagtagggaatatttctactgctaaattatttagtaggcaaatattttgactgaaattgtacttgttgttccttcatccataagaaagaaggtcgagatttggtttccaagaattagaaacagcactcttaaccaatttaatacataatcatcatcataatactaatagaccattggatagtggcgagcatacctacagaagtgaagtgttttagtgggaacacagcgaccaggagaaatgaatttagtgtgatatgaaattttagcttcataataacgatgccaagctcctaacacacccactgttacatagtacttacgactaggagattgtgtagttttattcactctcacaatcctctgaaattcaagcttctcaccctgcattaattaattattccattcatattaattataacaaataaataaatttataattcaaataaagaatgaaagaaattaattaaccttgtcgttctcagcgttatattgttggattgcccattttgcaagctcttggattaggggatcatctaccgagactggtttgagaagatgaggcttgagttttagtagttcttctggaagagggtctaacgtaaaacccctaccattaaacaaaaaaaccacacaattattataattagttacttctgatcatctaataattaaattgttgtaactaacataatagattaattactatactatatatctcttatatatatacctcataaaactcctcttggcggtagtgtttctccagtacatccctaagatgagggggcgtgtaaaaactaacatatataatcagacatgtacaactaattaatacataataattaaagaaagaattacacatacatacatataatgatgagtagtagaatagatcaaagaacatagaggacaatgatggatatgcattagaattagtagtacataacataacatacccggtgtcaatgtatttgacttgtatctctggtgtaggattaggattaggattaggatatctagcgtgcataataatcaccggacttagtgatctcctcctcttcttattcttcttctttttcttcttctcctcctcatgtgtaattgttgtttcagtagaagacttgtcatagtctcattgttggtgatcattaaatcatcatgatcattatcattatcatgatgaggaggcttagtaatagcagtagttgatatagcaatccttttctccttcttcttcttcttcttattataattattattagtaagagtagagagtactgataatgatgatgatgatgaggccaaactacttctcaagaaaaaagtcatcttaacacgaaattgatatattatttgttaaaattctttccaaaaccccaaaatatataaacatatatgaaaattgagaataatattacacaatatcatatatctcaaatcatgatggatgagatcgattgcgatactcaataaaataaaacagaaataatatggtaatattcatacctgtgaatattaattaatgtgatggttgagtgacctaaacggacttattcctcttattagagatctgagtatgctgatcaaaagattatggtatggtatgatcgtatgcagattgtgtttgggaaattataatattcccttttaaatttcatatcaatcaattttcaagtatccttaatttaagccatctttttagggatcaccattcccattacttattatttttttttttaatttt

SEQ ID NO: 380712 - DNA, 5412 bp, Cannabis indica
ttccaaaataagagttccatctcaggtttgaggtacaaagttactcatctttgaaatattgtaacttctctctcataaaaatgtatacaataattgataaagaatttgacagttagagaaaaaagtaaaatatgttttgttttggtagtttctttggagttcgccagttcccctttactagtagcataagtcaactgtctcctttctaatcttggagttattagttgatcccaaaatgcttaatgcaaacgtttgcttcattatcaagtcccaccacctttggattggctaatgtaattgtagtgacagaaacttgcaaatttgaatacacttaggaggaaaaattatacccaaccctaatcacccgtaatataatttttatcagcaaaaatttcataccaaaaagaatttttaagaatgataactgttgtttactggtcacttgataaccatccatttgagatttgaggtactaataatgagttacagggcattgatatcgagcatatatgacataacagttacaaaaaaaaattcatctttctttgcatcttgtacattatctcacgtgaattttctgtgccagtgtccatttaattacttactacaaagaaatgtcctgatttactagttagaagtctggaaaactcagctatgtatgctcaaactgctctgtgatgagttcttgttcttgatttcattgaatgtatttttcttccaactacgggtgtttagaaattggaatccacacttgccttcttcttcttctttattattttattttgaggtgatccagagtcatccttgaatgtcatttcttaatggcattacctgtctatatcttttagtgaatatgtaaaatccatctctctgatatattacaaaatatttgttctaaggttttgttagctttttttccaaggataggtgtgttcaaaacttcaaagttctttacagtttaaactttgcatgtactttattgtttaaccttttgaacaacataaaaataatgctaattcctctgtaactattaaatttggcaggggacgagccagaagcgagccaaaactgccaagaaagttgatccagctaaggttgttaaaccttcacagaaaaagaataatgagaaggtaacggatcatgttttcagtggatcagaaagatggtgcttttaatagattcttgtaggttattacttcttgatgaaattaaatagcaataagcaaaaagaaagccaaattagagtggttaacttagctatcaaatgaatatcataattcgcatgtttctcaagtagtgttttagatagaaggtaattatattgccattttcatgtatactgactgggtactgaagtatacaaatattacttttgcagaaattgagttcaaagatcaattacgatatgttgaataaacttgagcaggtacgtacctctaacactgaaaactagggaacctcttttatacgtcaccaatgtcttattatacttaaaaaggtacacagttttggaaggggaaaggtgtccttacaaaacataaaatgaattcttattttttcttttaatagagattggatttaaaaggtgtatctgggcatagtttatggctgaatatgttttatagaaattacaatgattctgtagtaatttgatgtaggatactctaaattcagctgttaaattttttagttatatatcatattgtcaaatgtcatataggatcacgttcaagaaataggatttggagaaggcgggagaacgctggacaatgaaaaattcaactctgaagcttatagttcaggagagacaaataataatgacttcgaacatgaaaaactgggcagtgaagaagaaggcgatgccattcaagattactatgctattacagattatggaatggatgatgatggctatggtcattatgaagagcatgattatgaagaatactagtttgatttttttgtttcaaatgaatgcttatctgaattttataattttgtagtttttcttttcctgatggaactgcatcttggggtttttttttgttgactgaactgacctttcagttcaacaagggagctgcactgatgaaactgcagaaactccattggagcatgattagtttgggtttttagattttttgatattcctacattaaatatatagtaaatatagatgtataccgtttggttggttggataccgttggacacaccttgtaacaagttccacattatgtatgcaccaaagagactgatgttttgtcttaagattttttaacatgaacaattgtgaggtccttcaaaagattttggcctgttgttggtgaagtggacaaatgttgtatatctactagtcgtgtttttcttactaagtaaatatgattaacttttttataacagattctgcagatagagctggtagttctagtaaagttttaattacatcgaatgttcatgaaatttatacttaaaagacatttctacatattagcatatctaccacaatgactcgtcaatgtcatttgtaaagctaaattgacagtaacatgggaacgaacatttatcttacgacccatacactcaacacgttatacttcgattggcacgagacacttccaaatcaatgtgtgacccttgaatagtttagtcaattattagagtcatccattatgcttctaacggtaggacaaaacaagctgatcaatcaaccctccacattttgtccttcctagttagttctttgagttgctaaaaggcagtagtagcatgactggcatatcaccaacattaattaatagattggtaacacaatgagaaacaaggtaccaaattatcataggaagggccaactgacataatagtttttgttttcccttgaatgggttgaatattcaatataaatcaattcttccctcctctacaaacttctttatcggcttgtaacgaacaaagtacaacacattgggctccatttcaaaaggttcctctaacggtctctgatttccactaccaaaagcaaaactccagccagtaagtagaagtaataataagagccagagaaaaaaaggggaaaacgagctttagcacatatgagagatatatatgataactacctgtgatctggattcccatcatccatatcctcaagctgaatgtgtccaagataatacttggtcttacagacgacaaacacgtccaactgcggttttgggactgaaatttatataaaacaaatatgaaaataattaccatttgttttctgtaccaaaagtcatgttaggaaggtgatagatggacctcatggtaaagaactaactctgatatataccacatttctgttttgacatttataagataaagaaggcaccaaaatataacatccacagtcaggtactctccttttaacaaatttcccttcagatgatactatgatccaggcactagcaaatggcatagctgggataaagcatctcattatgctagcaaaacaatgtcatctgaacaatcactacagaaatgatggatcattttcagcatctaaaaagaatgagaattgtactgatgtaaactccattagcagattgagccactaagaggaaggctgtcagtaattgttctcaaagatgttactaaaatgagtgcagatattacatttatgtagataataaatcaggactgtaatataggagcctctctcaactatggaagaccaaatgttcctacatttgtagacataacaggcataggcaaacaggcgtatacaccaacaaaaaaaagataatatggcatcaataaagagtaaaaagaaatgaaattttttttattacccatgtcagtctcttcacttattattgattgttggagtatagactgataattttcgggtaaccttgagagaatactctcttcaagatgcatcttcaaatcatcacaacacctgcgaccgcaaaaatactttaaacatcaaaacaaatacttttctcactaaaagactttgaaagcttttacctttcagcaaatgatttctcttgttttgaaagacgattgaagaggtcagttgacttcacgatgtggaacatgtatttctcaatctgcattttttgaagaacttagtccatggaacaattaactgatccaaacctttttgcttcactatctatataatcggatatcgtcaaatttagcagggtactaatatgtcttacacacattttttttctttttctttaataaatactacattttttttttcttggaggcacaaatatggacttaaatccaacccaggataaataaatacatgaataagcaacgactaccttttggagacgaatacgaaggtatgacctcaacaagaattgagttctgtccaaatccatctggtagagagatactgtcagcggatcgactccactctccacaaattcatctacagtctcttcctaaataacaagtataacattgaatgaagtaaagactggtttctgtttcaaaacccacaacactaagatcccccaattatttgcatagttactaaattacaatcaatatccggctaaatcaaccaaaatattatatatttatatatatgaagaaaaaagatgaaaaattgagagctagggtttaccatcaactggatttgttctctgattcgatcaatcaaagcagtctcgaactgaaaaatctccggagccgctttttcccgtcgccaaatcctcttcagatggtccacatccgtcatcgaaactaacgattcgtagtcgtcagtttctggaatacccgaacccgatccagaacccgacgccattgatagttaagaaccgaaatatttcttggttgttttcaaattttaataattaaatgtattcttctcttctactgaagtctgaactctacagagagagggcaggtgtttcagtttcgcgccaaaagtagagaaaaagggagacgggaatgtcatgattgcgcgcgcaaacaatgggatattaggacaaaaatgcccctcatttattgcacttacagatttttgtcccctaaattattttgtttggttatcggaaactataaaagactacactgaattctcttaaaagggatgtactgatgtaccttttcaacattcagaagaattttttagtctattttttttttcatattcatgtacgttatagagtctattttacacgcgtataaaataaaatagtcacgcgtgcaacacactgtttgaacgtatttttcagcgtgttaaatttttccaaatttcttaaaattttgcaggatgtcttaaataactataacgtacatgaccatgagaaaaaatttgactaaaaaattatttcaagtgctaaaatagataagggtacatcaatgtatctattttaagggagtgcattgtaaaattttcctaaaa

SEQ ID NO: 380713 - DNA, 2590 bp, Cannabis indica
tatggacttaattttgaattatatgtgaatttcttgaatatatagatatgtataattgttgttggtgacaacaaataatggatctcacttgtgacatgcataaacgtacattatatatatttacttgtctaaaaagaaaataagggagatttgtcactactcatcaaccaaaaatgagagatgagagagagagagaatcagatgacagtgtgggaggtgaaaagagacctacccaacatcaacatcaatagacatcgtcatcgacctcatcattcttgttttgaaactcaaaacacattcgtagtcctccccaccacattaattttaacttcctaatattaacctttccttccttccttccaccaaacaacaatatacaataacccttttctctctctctctctctctctcaaagatgacacacacattatcacgtggcatacacaaggtgtcagcattattatcatttttcgatatgaaaataataaacacagcctttcatattccatatattttcaaatcattaattatcatcatatatcccttatttttccatatatatcagtagagagatcacgtgttacctagctgtagagaatcaaagaaatacatatatttatatatacaaaatacatgtatattttacatggataatgattagtaacaattatatacaaatatatattacgtacttgcttaacatcccaaatatatatatattaattatgtataaactagttaatactatcctttatataacatacatacataataaaacaaagtattgtttacctaatttaatttcttaaaacactatgataatgcaaatcaaacccaaataataagtaaaccctactgtcatattatataatattagggagtgactagttaatgggaagggttgtttgttgtatagtctttagctgcaccaactagcatgattggtgctcctttatccaaaaaaaaaagttaaaaacgcaataatattaagtgaagtttgaagccttattacgtgagggtagagcagacccacttgaaccccaataccaatagctcacaatcatgaaaaagagtggattccatgcatcgagctttgcaatttctaggtcatgcctcttctaggctttgccctctgtttaatgctattttaccttttcaaaatcacacccacacctctactggtcaacctaaaccctatttatatatttatctttcctcttaacctgtattgacctaattattattactattataataatgatttgtacattatatatcaacatatattgataaattcgtaccctatacaattgacctttatttcaaaatgcaagcactgtaattttcaaacatacattaaaaataataaaataattaatattttttcctaaactttttataaattaactcttctaaataacttttatattaatttaatccttaattctattatattttttttttgggtaaaatgagcgatataatggattaaaactgataaatacatttaaattatggattttttatttttatacattaaaataatattttttgcatttttataaaatttcacataaaaaaatttcacagcaactaacggaacaacctaaatcgcaacaaaaattcacatagtaacccacataaaaattaccggagtaacccaaaccgtaaattaaaaatatatatatatagagtaattttcttttaaattatagtatatcttagagagcaataatacaaaaacaatttaaaaacaaaaatactaattattcaaaataattaaaaaaaaaaattgtccccaccatagcaccatccttgtatatatctatatattctgaaaagcttttacaaaaagaaaataaatgaagagaagaaaggatataaaaaaagttgatacagagttgcatagagagagggaacaatcaaacaaagggcatagacttttttcaaagccttagatttattagacatttaaacaaaaagaataatgaaaaagcttctcatgtcaaacgtaactttattaattttgcatgttagactttattatatatgtttgaattagattatagttttttcacctttgtgcagacctttttttatgttatcagaagcattagaatggcatgaggtcaaatatatatatatatatatacgagcttatagtatatataaatatgtaattatgtgttgtttaaaaaagtcatattaattcacgtatgttaaaacggtgtttgatatgattgctctcagtactgtaattatttgtagcactagctataactcatattaggagcacgcttttaccatattaatcaaatcttttattttactattaattttcactcaaaaaccttaaaaaggaaaaggaagaataaaataactagtttatacatgtagttacattacatataataataggatcctttaaaaataatcattcaataaaagtccaaattttaaaataaaaaaaaaataaccctatatactatttttattttttattttttttaaatttacggtttagattgttccgataatttctatgtgggttgttatataaattttgattgtgatttaagttgttttgtta

SEQ ID NO: 380714 - DNA, 1706 bp, Cannabis indica
aaatttacaagtgatcttaaatatctataacggatactaaaataatatagacttaatataaaaatattttgatactttttgaagtattagatatacatctatagttaacttgtatatatattaatattgcatgtagtttcatgttaactccataaatttaattccattagtttttcagtgttattttttatatatattttgtgtaaattcatgttatgtatggctgtcaataataataattaattaatataatataagcatattatggaatcatatctgcttggaaatgataatagttataatgttaattagtattaaattacaatttaaaataaccataaataatttattttaaaaaataaggttcataattgctgtgacaactaccatggataacaaccacatatatttatttatttatatatattttatgtttttgtttcaaaaaaaattctaaagtttgagattaggtaagagaaatacagataagttcatctctggcagaattttgtcagattaataacaattgtgacaacactatatatatttttatatatatccctacatattaattattattattataattattgttataattattattataattattacttgtgaattgagattactatttaaatgttaataattatacgtacttttgtagataacataagataataataatggctatatatatatagactatagatatatatactaatactactctaagttaattgaatttctttgttttgaattcatttataattttaaaaaaataaagaatatataaacgtagtaatcaaataataaatatttgtgaatgaaatcttataatcttctcttctttttaggtcaatgattatcatcaacaaattgtgcccacacacactgcacatgtattatacttatattgatttggacccaacccaaaattgatgttggattaattaacactaattcattattagggttttgttatcattattaggtttctttctacacaaaatttctcattaaaactatctttttttatgagcacaattatctttgtacatgcatgctttcagaacaaaatacaagttcaatatttttacatgaaattttttacggatttactaaatgtttttggacatcttttttttgttataatttagaatgctcaaaatacgtctgaagaaaatactacagtttaggtagtgatacattgatactggaagtttgaaagtctatgctcgataatgtcaaaacttcatttgagttcgaattttactgagaggtccactagagatcaacaactaagaataagaagttctttttgcctttccagactattgaaaaaaaaatataattaatatgttaagataattacatatttataataccgtcttaatttaaaattttatgttatacaaaaaataaaaataaaattataaaaaaatactataatacaataagtgcactactatagtgtccatcttttcggatgtaaataatattattagtattattagggtttttccaaatgaaaaagataaaagaaagaaaaggagtgcaatgcaatggggtcctaataaatatatggctaattagtaacttttcccccgtgaactttgacatgtactaaattataccccctgaactttttttgccgttaaaaattccccctgaactattaagattgttaaatttaaggactt

SEQ ID NO: 380715 - DNA, 3333 bp, Cannabis indica
aagaataaaaaaaaaaaatagaatggagtggaattaaatttaatgagtaaaaaaattaatcgagaaattattaaattgtttttatttgtgcattggaatgacttttggatagaattgccattccatcaaaatgataacataatcattccattagaatgtcattccaatgttttataaagcaaccaaacaaagaaataaaataaaaatagtttttattccattcatttccattctattaccccaaccaaatgccccttacaacccaagttttttgtgaatgcttggaaactctacagagaagcccaacaattataatagtcttctcctaatgccaagacttattatgtataggctatgactaacaaccccaactaactagctcaccaataggaatcaagtaaactaacaaaacataaaagtagaaatcattagacaatgatcttgttaactgaggtggaaaaataattctttcccattagttttattggaaagagtggtatatttatatgcaaaactaagtacctatcttaggatttatacataattgggaaactagaataaaactaattgattatatataacttaccacacccaagagggttagctcaaatggtcaggcatttggtttgctcccacaagttttgaggttcaagtccctcttaagcacctatataacaattgctaaggttttcaggtccccaaatattgtaggattaggcagagatcctagttttaaaaaaaaatatttactttatagctaatgctctttggttggagcattaatattaatcatgcacaacttattacaaagataataaactcgaaccacatttaaactttcttgaagatgtcccctagttattttctagccttcacatatcctatagaaatcaacttgaacaattcactttcaatgttcttcgtttgctcatgaaaaataggattagatgcaatatgaagaacaacctcgttttcacactcacaccacaatttttctagttttgttataagtcccaattcaatcaagagttgatatatccttattatctcacacaaactgtgccattgccttatattctaactttgcattacattgtctcacaacattttacttctcacttttccatgagaccgaattctctccaacaaatacataataaccttaagtgaatcatctatctattttagaacctgccaatctgcatatgaaaaaaactcaatgtaatagtatccatgattcacatatatagtacgatgtccacgtgcacctttcaagtacatcataatactcttctctctcttctttctgagaagttcccatgcacgttagggggttccacgacccttctggtcgtggaattcaacaaaaccccactggttttgggaagaaaactggctgttatcccactagttttggtttgaaaaaatcgcctggtacgcaatctgattaggataaccatatatattggagttttcgaacatcacataaggtgtttatcaaagttatggaagaaatgtagaaaaaggaggctgtaatgagagcaattttcaagagatcgtttcttaatagttcgatcaattgttttttagagagtttaaaaaacaagagggattgtttacctagctgtttcttctaaaaaacaataggatatatatggtgattattccgaagaaaaaggcaggcgaggggttggaaggaactagtacgatgtctttctagtatagttaggaggaatttagggttgtcttatgacaagtagaaggagcgagtggaggaggttacgggggtgataattccagatcatgggtgaatgtgatgaaacaaatgacgagaccaaatgcagaacaacaaaatggaagaaccaatgccctaggtcacgctagaagtaatacaatgaaacgaaatcctcttgcgagttgtcaaaataagaactcaagtagactgggatgttgggaatttttatcgaaggttaactctagctttaggcctaaggagatctatctgaataagagaatgcagcaaccaaaattccatgaatacttacaagctaaacaatgtacatgtttagagataacagcaaaatggcttggatgccattttatataatccttgactctaacaaaagatgtaggctcaattaggatttgtgagagaccacgctgtcaggctcaatcgatgctccatggagaaattactgtcgtggctcttagattccatggaggagttgcaacaaactgaggagcaataaagacaaaatatttgagtgtttcttcaaaaacaactcaccagaggaatttttctgaaactatttgtattgagaataactttacaaagaatatgattataccagagaaagggcaagctgcgccgtggaaaggaatgattgagtgcctaagtggcctcatgggaagaaagaaaagcaaagcagtggttgattaatctggcgacaaggcagaggctgctcaaccgggtgagaggagggccattagcttacagacctggggaagcgtggtgaaggcattagggccatcaggcacaacaatggagagtgggagcatttcaactttggacccctcaagatcaatagaaaatttcacaatttaggaataaaagcttatcttgaagcaagcaacaataacattggagctaagtcgcgctaatgtttagattggatatccacatcccatggcaagtcatacaatattggataaaagggaaagtgaaaagaactatgagaccattcctttatttgattatagagtttttttacggagagcaataacgagggggagaggagattggaacgttaaaatggatgccagtaaccatggtgagattggctccatggactattgaaaattgaatggtgaatgagtgcttggagggccagtgtgagtggataggagaggaatgtattctcttgaacttgcggagcatgaaagtgcttggaaagattggttccatatgtggtggactcatcaacatgaacaaagataccgttgatatgaattttctcacctatgcttaactaatgctatgtggagatgaaaatgggactagtgtggagtcaacaggagtttgggagtaaacaaatgttaaaagaaaactttaaatagaaaattgtctttgttggatagaatggaggaaaggggcaactagaattcacaaacggaaataagcaaatttaagaaagaatgacaacaaatggtatttgaggaggagagggatatgatagtgttagagaattagctgtatattaggtgtaaaagaattagggtaacttgtatttagtagtttcctattttgttggtagtttcctatttcctagtctc

SEQ ID NO: 380716 - DNA, 2197 bp, Cannabis indica
atgcatataataaattcatttgcagataattaaaagtcagttacatgatatgtatattatatatattttatctccaaatcaatttatattaataaaatcgctcaagagtcattttcaaacaaatgtataaacagtatagtgtcatttgaacagttcatttttaacggtctctcgtcttgtagtgaatacattatataaacataaatagattggatacgacgggtttgtagctccccccgtaacatggaatgcataatattcctttctcggaaaatcagtttcctgcttgccaaacagaagctttaaagagagaagtagtatacatggggtcacaattatgctgggtggggttccaatcatcaaaagcaaaggggggtcaggctgccaacccatgtggattgtctttaggtaaaagaaacccatgagctttctggtgactccatgtgagcctagatagctctgagtggacatggctactatacaaacctataaagctattacttctcatcatccccacctatacatctatctatatatctttatataacccaacatctctttcttttgtctcctacaccaataattatcttctaaacattctccattaattaaaaattaaaccatatattcacataggagaccccagctatacaattttagtccaatcacattttaattatataagagtattaaaaaaagtgtttaaaaaaaaaaagtttatatgatggtctacgagagatctagtgagagagagagaatggttagtgaaaaaagcatacacaacttttttttttaatcttaccatctctctcttgttttcatttttaatcaattaaaccacatgcatttcagatctagtaaaccccacatcttcaactctattcataaatacatttctttttctcataccatatgtatatctgatctgaccactaactgtaaaagaaaacagatatgatattgaaagattaaaataggtacttcttttgtaagtgtatcgatataatttatcactctctcttttgggttaagtggagtggaccctaaatagtcctcaagttccaatgctgtgtatatggttacatgaatttggtaaaggattagtctatagcacagtttccaaacctaaactcccatgttctctctcccaccgagtcaccgacccacctcttctgcccacattctttaatagcctaatgggttaaacccccactgtatatcacattcctttgcttcctataaattaaaccaaataatagaatgggaaagaaaaagactagaatgaaaccactatttttgggggcacaccacacccttattatacgactcttatctatataagaggggtctaaaatgtcacttacacctagcccttgtttggtccaatcaaaaaaaaaattatatataaatgtaaggtaagatgaatcaggaaaattgttgtagtttcccatctactattattttagaaatgaaaaattagaagtattaaatgtgcactgactgaccaaccaatgacattgtaccgttaatttctatgcaaacaaacacacccttagtaaagataagaattacaaaaacagaatggaaatagaaatagaattgaatcatgtaaaaaaaaattaaattaaaagttattaaatttttctgctcttatattgaaattaatttttcttttattttaaaataaaataatcttttaattaaaaccataaaaaaatcattccatttaaaataaaataattttttttattctattttatttgattatctcccacaaacaaccaaagactacctaactatactacaattttatattcttgatggattgagttgattggaggaatggatatgggagtgccaaaatcaatcatgaatgatttgagtttcttattcttctgcctatggtttactagctgcctctctacttggattcttatttatttttattgtatagactagaaactagatacagtagctgaatttttcttttatgattcatctccaactttctattttagtccgtcagagcatggaatcccacttattttatttatatgattataaaaaattatgaagagtatttttaaccaaaaactaaaataacttagagcatctccaaagagacaccaaatttggtgttacactatcaccaaatttggtgtcaaaaattatttctactccaaccacaacaccaaaa

SEQ ID NO: 380717 - DNA, 2435 bp, Cannabis indica
taatgcgaataagaaatcacttgaaattgatgttataaaaatatggtgataaggggagtgcacaaaaactcactttaaaacatgagatgccatgagcaattcaggctctccaccccatacataaggttgttgaatatttttcacataagcatcaaaatccccttcaatgaacctgaaaaaacaacattataaatcgaccaacagttatagcataccatctaaaaaccaaatggcacttccaacccaatttccaaatcacattagcttaccattctgactcctctcgcctctttaaaagctcattcacaacctatagcagtaagttgcaatccatcaaaatacaaagcattttagtaacagtctcaattcaaaaaaatgaattaaacagtaagaaaatcttcatgttttctcaaataaaagaaatggcataaagaattacttgagctcttaaatcatcagcaagttctctttgacgaatttcgtcaggagcttcttctccattccttaagcaggccacatgagctatggctctaaacaagcaccgaccatcagcaagaacccctgtagtattcaatgcttttatcttatcaatatacaaaaaatttcaacagaaaagcacataatatacaaaattacactaacaaaagagcaaggaaatcaaacaaactgaaggttccagtagaacatctacatataatccaaggattagagttagacaaatataaagcttcacatactatacaccacacgtggggtccaatttgaaaagttgatagctaaattcaaaaagttcaattcatcggtaattttgtcgaacagataatgatcactatttcactactaacatatgaaatcagaaagaaagagaaaaattaaagaaacgcacagagacacatatgatatacattataaatcttatatacgaatatgaagatttttccaagacatatatacgtgtatagacgtagcagacgagacgattatactaatataatttcaaaaataaacctgtaatcctgtaatcggcggagctatcgatgttctcatcagaaacgacaagcttctgctccgaaactggcgcttcggcgctcgcgtcggcgcagcaatcgacgactggagcgaggcaagcgcagacgccgaagagaagccaagccgagtcggcacggtggagccagcgcgcaggccgcgcgtcaagagcagcgttccacgagccctcgcctctcaggtcgaaatgaatcgcgggacggcgtcgatcgaaccttcgaccaccggaagacggcaagatggcgtgccagatagaagcagctccaccacaagacgcgccgagctggcaagcactggagtggtggcgacgccggtggtcatggccggcgtgaccaaccactaagtcagagaattgaaccggaccgggaccggagacggtgcccggaccatgaacgaagcgagcgtagtggtaattgttgtaggattgatgatgaagatgatgatgaactgctgagccgtgagagaaagaggagaggaaagcgctgaggatcctaggcttggagcgagagcagagtacagcaagcatcaccgaggagaacgacgatggtggagttttttgttggacgatgctatcgtgtgccgcctaaacccagtgtcacactacaaactctttaatcctacgcacccatcttcagatgaccattttcgtctttttaaattttaattggttaaggtgtgatgacggcgaaccattttatggaagggaaaagaggatgtggggaccactgctctaaaaagttatatataaatatttatttaatttgggtgcaaaatatggaaaataggtatatgctacgaaaagattccaaatagttcgtctatgaccacgggtggttgcttgaatttcttccaaaataggaatgaaatgacgataatgggtatgtttgtaattgtgaaaaaggaaaaggggtttggtggagaagggtagaattgtcaaaaaggtgaaataattgtgttgtgttgaaagaaatgggaatgaggtggtgtgtgacacgtgagacgggtgggttgaggagccaatagggtgaggtgcatgcctggagaattggaatttcaagattgttttcattttctcaatgtcttttaaaactgtttttaggctgacacttgcttttaacaaaatattttcccactccaataaatgtggatatttacttttaacaaaatatttttacaaacttggtaataatattcaaaattaatagctctagtttttacaaacaaaaacaccatatatttcctcttaaaataataaatcttagctgtataaattaattggctgaaaaaaatgctattttttaattattcggttgaaaaatatgttttagttagctaattcaccacaacagctttttataaggtattattttacgaaaacataaaaacaacaa

SEQ ID NO: 380718 - DNA, 1505 bp, Cannabis indica
tagttattgaatggaccaccctatcttctataatcataacctcatcaaagtatgtaaatattcttcttttgcatgtgctcttccgcccacttttctttttcctactactactattcactcagtggacacaacacctttatatctatttttgtatcttctcgtgtatatgtctatataaacccttaaactatttctaacattcttcaaactcattcatttatttgttacaccatggctaataataataaccataccaacactcgctttctctttctctttctagctttaggtatttgctccgctactagactcttgctcacttatgagcccaatgttggtggctatggttctggtggaggacatggcggtggagaaggctatgccggtgctggtagttatggcggtggtggtggtggaggtgcaggcagtggtggagggtatgtagcagtaggagaccatggtggtggtggggctgctggctatggaggtggtggaggagaaggtggcggtgctggatatggcggtgcaattggacatggcggtggtggaggcggtggtagtggtggtggtggtggtgcagctggatatggtggtgttggtgcttatggaggtggaggtggtggaggagaaggaggtggtgctgggtatggtgcaggtggggctcaaggaggtggtggtggtggaggtggtagcggtggtggagctgcttatggtggtgtcggagctggtggtgcttatggtggtggaggaggaaaaggaggtggagctggatatggtggtgctggtggagagtatggtgttggacatggcggtggtggaggtggtggaagtggtggtggtggtgcttatggtggtgctggaggtggtggttatggaggcggtgcaggtgaaggaggtggtgcagggtatggtggtgctggtggaggaggacatggtgggggtagtggtggcggtggtggagctggatatgggggagagcatggtggtggttatggcggtggtgaaggaggtggagcagggggaggatacggtggtggtaatgcagggtatggtggtggagggggccaaggtgggggtagtggaggaggttatggtggtggtggagctcatggtggtggtggaggaggaggatctggtggtggctctggaggtggcggtggttatgcaggtggtggaggtgcacatggcagtggatatggaggtggcgaaggcggtggccatggtggtggtggtggctatgccccttgaaaataagtatcttttccttttgcatggttttatgtgtacttgtgcctataatagtaagaaaaccaaataagattaaattttagtaataagagggtgtctataatatttattagcatactgcaaatgcagttgtatgaaagaaaaaaaaatatgtattctcttttattattattaattaaatatgcaataaaattcttcttattttgttcttttgtctaaacaattaataatgttttgaagttattgttggaaattat

SEQ ID NO: 380719 - DNA, 1803 bp, Cannabis indica
attgaaaatatattaaaactttattgcataatctattaatacaaatcaataccaaacataatattatattaaataaaactaatataatactatacaatggaatctaatacaatgatatatgttgattgattattagaatgaaatctatatcattattattatttttttaaaaaaagaaaatctatgtcatgtattttaacatatatgcatgaatcgtggagtggataacttttactaaaggccatcttttagacaagccatgaccaccaccttgtcgctacttacctttttccatttctcactttctttcctttttccatgtttgcacttttcatttcttcataaaacaataaagattaaattaatgattattggatttcttaagcattattgttaagagaaaaaagggaaataaagaatagtgctttggtgttaaaatttaatattttcttatgattaaacataacattgtcgtcgactaagaaattttttgacacaaatattactttggtattaattaaatataccttaatgaatattttcaccatagtatatattaaaaagattgtgattaaaagcacattattaatggaatttgtcactaattattgtatttttttctaaaatattgttagtggcaaatattaaagtgaataaaaaattaaattggtttactaactatttgacttataaggtcttaatgatatatttcattacattttaatgagaacatataaaatgtatatatattatattaaatttaataaataaataaataaagcaatgagaacatgataacaccatttaaggagaagcttgttcaatcatttcctataaattcaaataaacaattcacctactgcatcaaagttgatcaagacattctagccaaaaaaaaaaaaagttgatcaagacaccaactttaattttttttcttaaaaacatttgttatatttgccaaaagatcaattgtatatttcatattatataatatattaatcttttcatagaatacatgaaaatttcttagttttatttaagatctaaagaaattctttaagtatttagaagaggagttccacatggccatagaaagaagtatttgcctataaacatatatatgctgtgtttagctaagattcttcccatatttttgagaacgaaaaatgtttacgaactgtttataagatgtaaagtacattgttattgatgtatgttaaaattagacctcactgtaacctttattattacagttttacagatgaagtgaaaattacaaataaaagcaaacagaatacaacagaaatcagatcctaggtggcttcgcctctagtggatcaagaactagttgttagttacaaccgaagttgtaactaactcctggttctgtgatcaaccctagaactacaactataaaaggaacagaagagaagagaggaaagatataccagaagcaaaaagccctaggttaccagatctgagagattgttcagctccagatgttgttttcaagttcatgcaaaagaaacaaagaaagttagtgtgagaaatcagaaaaataagagagaaataaacacagaaaaacaaaagagagaatactttagaaataccagtcgatctgtgactggatttctcacctgttgtaatattccttcacatagtgcaagatctgaggtcgatcttcaaggcgagctcatcagaggacgtacccctaatttagggcgaacctctatatttctggtgtttgatttcttactctaaaatactgtgttttggctaatctttgtgaatatgtgtgtgtgt

SEQ ID NO: 380720 - DNA, 9405 bp, Cannabis indica
tttttagcaaaaaaacagtattttttaagttcccagcgaaaaaaaaaacaatattttttaagtagtactctaaattaaccaaatgtgatggttttgtttttcaataaagacaaggaaaggcaaggtaatcgatatgttttcagtcaaatggaaaagacttgaaattttgccttgttggttaatatttgcagtgaaagctttggaggctgtaaagagcagattgattgatccaatgaataatatccgaaattggaacaagggggatccatgcgtatctaagtggaatagagttacttgttcaaacaaaactgggactgatggatacttgcatgttacagaactgtatgtcaaaccattctttagtttctttgatagtcatgaataattttcctttaggctgctattgggagataactaagtcattagaactgggttttaatcattattattattcttgacttgaatgttgcatcattcttgattctctctctgctctaattttctgttatgtcatccatgtttaataaaagatttgatgcagccaaatgatgggaatgaatctcacaggaattttagctcctgagctgggacaactaactcatctttggatattgtgagccatatctcttaaaattttattgcacatgtagaagtttttctgataaaattttcatttgtactgacaccattttcttatcatttggaagagatttcatgtggaatgatttaacgggcacaattcccaaggagattggaaacattaaaaacctgaaactcttgtaagttggatcttgttttgttttcaaacctctttcttttttgtttagtagtaaaaaagaaaatttatagtagtttaatttgtctgtcaaatgcattcatgcttagaaaaaggtttttaagcattccttgattgatttgttcctatcttcttatgtcggctttttaatatttaagctgttctcacaggcctacttatctctttgtaatttgattgatatgtttaaagctttctcctttgctatatgtaatttgaaattctcatattcatactgactagttacacattagatgatgtaccggcaaacatatttagtattaatgcgaaagatgaggtaattaaggatgaggaactagttctgtttaaaccaatgtaactctttctcacatattttgtatgcaggctcttgaatggaaacaaacttacaggttcttttcctgatgagcttggaaatctatcaaaattaaatcgactacaggtcgatgagaaccaaatgtcaggtccaataccaaaatcttttgcaaatttgaaccgtgttagacacctgtaagtgcatctttttgaaaaacacctcttcaacttgacctgcttttacatgtgtgtcttactcttaccttatgcctcttactttgcagccactttaacaacaattctttcagtggtcaaattccttctgaactttccaagttaccccgtcttcttcacttgtaagtttatgtaccacttgcttcatttattcatgaaatttttggaagtaggctaacatcttgggaacatgtggttggcgaataaaaataaaatatcgcaggcttttggataataacaactttactgggaagcttccaccagaacttgcaaacataacagagctggccatactgtatgcttctcctgctcaacattattggattactaaatgaaattacctataaattacttcagtaaatgatctaggttcttgaactgtattttgctttttcattactttgttacttaagttatatgttctcttttagtcactgatttgtgtagcattaggatatttgaaagccaaagctaattgttcatgcttcatagctggtataaaatctttacttaaaagaaagaaattgaaggtaaggtataaagccgaaaccttagttcaaatgttgataatttgacactgagtcagttccattctcttaagattactacttgcattcaagtttttgtgtactttatttaatgaacaaaaagcaactaagtttctaactagactctcaagtctttcatttgaactggggaactgttccgagaatgtaattggaatatcctgtttctaaaatgcttaggcaaaactggttctcttcatgatttatgataagccactatttattagctttaactcttattgttaacaatcctatgctgtttatataggaaatgaaatgacaaaatagtactgatattttatttataaatgtgttctttcttttgcagtcaacttgataacaacaatttcagtgaatctgagattccggctacctatggcaacctttcgaaattaactaaaatgtaagtgttgtagaaaaaatataatttcactctgtgaatagatgaacatgtctattagttttggattttgaaatattgctaatatcgttaatatctaggcacttgtttctaattatatatggtaataataagagcataggcacacatgaagagaacatttctagttgaatccagaatgccatccacatgtaaatacactttggtgaatttccaatttcgcttcagtaaaatagtagtctttgattttgaaaccttttgttttcatatgaaaattgtttgcaggttttatctcatcctaaatatttcattctttttgtgatctcatagtttttatgaagaaaatctgtcctgacatcattctgaataatgttctaaaaactacatcggttacaagtttttaaactctttgttattctttttcgcttgttgcagaagtcttaggaattgcggcttgcaaggaactgttcctgatctaagcaggataggtaaccttagttatatgtaagttcatggtttggcgatgactcaatgttcaacctttcctttgtgaatctattattgactaggccctgtttggcttagctaatttcagctcttttttagcttctaggattaaaaatgtccttcaagaatgctgtttttttttccatttctttttaattgtgttatgattgatcattatttaaaatcttacttggttcacgtacagagacttgagcaggaatcatctagttggatccataccatcacaaaagctttctcataatgtgacaacaatgtacgtgaattcatatttatattcccacaatatttattttatgaaagttcatgttgatctcttgcacaatatttaattttgatatttactctgttatttatatatttgttttgtgaagttaccctgtaaagaaatttattcttgctattgcagagatttgtcgtataaccgtcttaatggatctattccaggaagtttttgggatcttccttcactgcagaaactgtacgtgtttatgtgctctttgacaatttttcattttagtttccatcgaaaaggatcatatgctgctcttatggttttgatggaccaatatttgaatgctatctgtcattatacagaccaaacataatatcattaataaattgtttatccattatagttaagatctcctatataacacttctcttagctaaaaactagttgattactttaatacgtcaacaactgacaaacgactgttacagtcgatgggggatatttttgtaattttgaattgaagtttactgattcataaacttgatatttcagtgatctgaggaacaattcattatcagccttattggaagatatagatcctcaaaaaaatgtcactctgaggtatgctttctatcattctatgcatcgtgtagcaagaaaattgattttggcaaagataaaacttgtactatgctatctaatacaactgtcaacatattatctatttgaaatgaaatatgttttgcacaagtctatgtcttgaatatagttttataaactcaagttttgataactgtagcagcttttcctcaggcttgtaaacaatcctatctgcaataatgcaaccatacaaaacataggccagttttgtaaattggatgctgaacagaatgagatcgctgaagaacctaaagatccaaaaaaaagttgtgatgttcaagcatgcccactagatgatttctatgaatttgtcccatcatcttcagattgctattgtgcagcaccaatcagaattggatataggctaaagagcccaagtttttcttattttcgtccatacagtagtgaatttcaggtgtatctaactagtgctctcaagctgaaggtttctcaattgtcaattgattcatttttctgggaagaaggacctcgtctccagatgtatttgaaactttttcctttgttcaatgattctcaatcacatacattcaacaaaagtgagcttcatcgaattagagaacaatttacctcctggaattttcctcgtactgacttttttggaccatatgagcttctgaacttcactctcctgggaccttatgaagatggtatgtagtatagcagcatgtatattcattatagccttatgccttctatttgctcttaaaaatctaatggttcttcaattacacaaagtcaactgctaattatattctacttgttctttggttgaaaaataattgagaaattatcaaggttatttacgagatatattgcaaacttagctccaatttggtttatgcaacgcttattattttgtttatacattgtccagatgaatttgtgtgtatgaagttgaaagttgtaaaattataccacggactgaaacccaattgacaacttagaaggagaagaaaatgttatatctacaatgaagttattgtttctctatttatttttgtgtgatatatatgtatatatatatagatatataatatgttctttttatgactataacatattcctgaacgaaaaacacatgcataaggacctgccaattgagtccagctatgtaaatgccttgaacctgagttgatcacactagcaaccatggagacatggttatgcagattgagctttgtagcattaataaaattaaaaatttgtaacataatacatttttttagattagtacataatttggctgatgtatttaattttccactatataatcaatggttttttattgaatatttttatgtatgcagagttgtttattagcaaacatagtgctggaattagtaaaggcattttggcagcgattatacttggggctattgcttgtatagttaccatttctgcaatagtctcatttctcaccatgagacatgccaaatatcatcaagcaccattaagaagacgttcgtgtaagttttgtttatactatgaagtatgataattatgatggcactctaagaacttttaacatcaactaaaatgacatgaatccaattttacagcatcgatggcttccatgaagattgatggtgtaaagccattcacttttaaagaaatggcatcagctaccgagaattttaatttctcagctcaagttggtcgaggaggttatggaaaggtttataaaggagttttagcagacaacacatttgtggccataaaacgtgcagaggaaggatcattgcaaggccagaaagaatttttgacagagatagaactgttatcgaggttacatcaccggaacctggtttcattacttgggtattgtgatgaagaagatgagcaggtattttttataattattttgcccaatcttcaactagtaatcttttcagttgaataatattaatagatttcctgtttgtttcaactagtaatctaatttaatttatttggggagggtgatcatggttttggttattgtcaagttgtttggtgctgtgtatctgctatcaattctagcaccataaaagtgataagtgaattcaatacaaaataggaaatcttctctcggaaattgttatgatttaaatccattaatgatatacattttcactggcattgcactgtttgatccaaataagaattgtaaacgaataaaaaaaaaatcaactgcttaataccataccatcattttttatcattcattgttagggaattgatatcattaaagaatgaagttttattatgtatgttaaaattacttctatggaacttaaggttcatagtttcagtccccaaaaaacttaccaggattgctgaatctataaattacatcaatttatgttcttcatacatgtgcagatgctagtttatgagttcatgcctaatggaacattgagggactggctttctggtatgataatcttcatcatatggttcataaattctcatgtttctaatctactccttggattttatttgactacccttatgcaaaatctgaaataagttatgttaaatgtcataaaatgccgggaaaggatctattgtttgattttactttgaaacaatagtttgaatctcaatcatacaatggtttaagtacttaaattgagaacatctttatttgttctgacttcttttggtttctaatgtttttctttcccttctcatggtgaatattcaaaatgtgcagttactcattgtgcatttgtgcaattctttttctattataaagaacccaagatattaatatagtacaatgatgttgtgaccatgttatgacagctaaggcaaagggaaccttgaatttcagtatgagattacgagtagcaatgggttcagctaaaggaattctttacctacatactgaagcagaccctcctatattccaccgggatattaaagcaagcaacatacttctggattctaacttcactgctaaagtagcagattttggactgtcgcgactcgcaccaatgctggattccgaagggacagttcctgaatatgtatctacagttgtgaagggaacaccagtatgtctacttctcaatatatatgtgtagagagatatttaaaatatggttttttatgcattttataacttacttttaactcattttaccttaacatgaagtgctgattctgtgagtgcatgccaaactcaaaataagttttgtggttgaaacctggctggcgtagtaaagggttttgtgaacaagaaaatacccgtgttacttgtcccacaatgaaaccagaagttatatatatccaaaattctgtagcctcttgcagcattcagccattccacatgatattggtgcaagttagcttagtttgtagaatgaatttgttttagaacttcaaccttgtgagagaaaaaaaaactattttgtagtatattgaagctgggtgaaaggttggatcatggcgcaattgaaaattactaaactgaaaagtgacagtgagttatgaacttaaaccagcttaaacctttcctgggttattctttggcccaatattccaataatagtgagccagttgacaggggatgaaatttgagacattttggaccattcataagctaaaatcatccctttcgagcgcactatgatttgaatatagttgtaatattatcattatcaaagctttgatgcaacatgtttttcattttagtttgttcttttcagttaccgttagcatagtagtatctattctgtgcttcatttagaatgcgatcatgtttgcagggctacctggatccggaatattttttgactcataagttgacagacaaaagtgatgtctacagtctaggagttgtatttctggagctcttgacaggcatgcatccaatttcgcatggaaaaaacattgtccgcgaggtatttctcctccaataaactcttcttgctctgtacctagttatgatatgtctctgtacattatgattttaagaattttatgacttccttccaactcattatacatattagttaacttgataataaattggttttactaagatctggattgaactactttcagtgaagagttacaatgagagatcaaacacacttctatataataggcagtggatatagaagtttgtgtggacctgtacgctttaagcatgacttaacgatgtctccgaaaatagtttccaaacatttcatttcattccatttgaacattcttaaactgaatctgattccttttattcaatgacatatagcatagaatcatattcatgcaactagtagatttagcatctaagattatgcaaaacttgtaatcttgtttcaggtgttgacagcgcatcagtctgggacgatgttctctgttatagactccaacatgggctcctatccatctgcatgtatcgaaaggtttgcagctttggcactcagctgttgccatgaccagacagagaagaggccatcaatgttggaagtggtgagggagctagaagacatacttcagataatgccagaatcagacacaactgtttcagaatcaacttccacctattctggctcttctgcaacaccaccttcatccttggtcacgatgaactcatttgtttctgcatctatatcaggaagtgatcttgttagtggtgtcgttcctaccatatcccctcgctgagaatctatgtttgatcaattgtaattttagttttaatttaggttggagagataagtgtacaagtagaatgttgtttttcttttgcaaagaaattcatggtagtttatttacggtcgtcaaactacatagatcttctgactcaatttctgatttggctcccttatacacacatcatagacatggtgtaaagaaaagagatactaatacatggaaaaagcattgcagtcgtgaaatacaaagaggaatatcaaaatttgtttttctttctgtaaagagaaaccatgtaaatgttaatttactgtagattttatatttttagagtaatatttatgtaggtgttttttataattatttttgtgctaatatatttatcttgagaaattataaaagtttatttctattgcatgtttatgaattatataagttttggtaaattggtctaaaaacatataggttttagtaagttaatttttcaactttattttttggcaaattggttattaatttttttgtctttacaatgggaatggaaggagctcggcaacgaagaagcagcaccatgaatttgggcaaatcaacctaagaagaagaaaaaatattaaaccaaaaaaatcaaccattacgatgagcgattttatagagaaaaattagtttaaaacataacctcaatcctttaaaataattcaaattcgataaaactaatttctcctaaattcaatatacagatttataaaatgtagacccgtaataaatagatcttcacgatcaatcaaaattaggtataacccataaaatatgtatcgagtgactattcaatagttacattttattataaccatcatgattacatttttctgtgacctgtaatagcaggttactaatataaacattcctttttttttagaattaattaattataattaattattttaagaaaataattaattaaatatttaacaagacctcttttagcaattaatattta

SEQ ID NO: 380721 - DNA, 1891 bp, Cannabis indica
gtttttttattttgtttctctactaaaaaaaaaaaattaatttattttatgtatagtgtccaaaaaataaaaatatataaaaattatatatatatatatataatctaatctatatatgtatgtgtcggcaaaaatagattcttttgcctaactttttctatacaactaaaaaaaaatataatcatataaaacacgtttcttttctcaatatgctaatactttaattaacacaactaattaataattaaatagcactaactaaacacaatgattcatatgataacacaaaaaaacacatatatattttatattaaacgacattattatcgaatatccttaagtataaacgaaatcttaattaattttttttttttttgttatagatggtcagctatagcagcaagattaccaggaagaacagacaacgaaatcaaaaacgtttggcatactcatctcaagaaaaggcttataattaataataatgatgacgtaatcattcaaaaatcaaaacgacaacgtaatcacgagtcgtatgatgatgataataatattaaaattgatgacacaaaatacgacaatgataataatagtaataatgataatttggttgtgtcgtctcctcctcaatcttcatcttcttatgactcgttcattagtactgatgatcaaaaattttcggaaactatggacgatcaattttggactgaagttttctcatcagaatcagatgagaatgatcataataatcatgaattcgatttcactcttacgaattcgaataataatgttgattatgatcaagatatggagttttggtttaatgtgtttactagatctgcggatttaccagaattattattataatataatttaattaaagttgtaataataacaaaataatgattaatttgtactttcattattgatcgtaatatttttttattttgttatgatatgtaatttttggtggaaattgagtgttaaaaaattgtttaattaatgccaagctgcccaattattttgaccttttacaaattaaagttatccctagtgtatatactatatttaattcaactatatatatataattaattaccaaataagtacgtacgtacgtacgtaggtagatttatttattcacaagtggaaaaaatatgtaaaaatatatatatgatcatgtcgacatatattgataaattgtaattttattgtaatgcatgacagcaataaagtactatacatctaatcaattaatgaaaatatagagttgaataacaatctcgaaatcatttcacttgatcttagacaatcgtgggattcaacaacttacccaataattctccttacggatcacgagactactaaatattacaatttattgtgtagaagtggtgtgaatagccattctcacatcttctttaattgtatttacaacaatatatatatggtggttcaaaaattgggctagactctctactcgaaaatgagatcatcatgaattacttgaatgaatttggaaacctaaagcttcaagaggtaaaaaacaaaggttcttttgagtatttttttaactataatttatcacatttggcatgctaaaaatattgttctttgtgataaaaaaaattttactgttaaaattaccttctaattgtattggtcatagtgtttgtactaaattgatctctttaaatacttagaatttaaataggaaattttatttaaaattttgtaagggtgcatttggaaagccacagtgtaattggatttgtgtgtaatttgaagtaattacacaatttaacatgtttgtctgactatgtaattacactgtaactgtgtaattggaagtaattgaggggttccaattacactctccaattctcatgtcccc

SEQ ID NO: 380722 - DNA, 2069 bp, Cannabis indica
caaataatagcatcacacgcccggccaccaccaccacaatatcctcctcctcctccttctctgccacctccaccaccaccacctctcccagtaaaaccaagacctgccctaccaccacaagtgcctacgggtggtttgaatacatcaagacgaacccaagctggacatacagggatgacaacaaaaaacatagaagaaaagtccagggaggaaagctcaaaccctactatggctgggcaaacgaagctgaaaccactgcactgggacaaggttacggcagatgttgatcattccacggtctgggatgaaattaatgacggttcactcaggtaaccatgtcttaactaataactatgataacaaatttcatgattttcatggtcattaacctatgttcattaatcgtttctcatacactttaaacagattcgacgatgaacttatggaaaatctatttggatactctactaccaacacccaatcttatgaaagaagcaaccttttctcagctttcagcaaaatgaactcaggccctccaactcaaattttcttactggatcccagaaaatcacagaacaccgcaattgtcctaagatcactagccatttcccgcagggaaattcttgatgccctcaccgagggccagggccaggaactcgctacggacacccttgaaaagcttaccaaaatctctccaacccaagaagaagtggccaaaatcctgcaattcagcggcaacccaagtagacttgcagacgcagagtccttcctctaccatatcctcaaagttgttccttcggcattcacccgattcgacgccatgcttttcaaagcaaattacgacccagaaatccttcagttcaaggagtctcttcaaactcttgaactaggctgcaaggagctaagagctcgaggtctcttcctcaaactcctggaagccattctcaaagctggcaaccgaatgaatgccggcactgccagaggcaatgcccaaggtttcaaccttaacgctcttaaaaagctctcagatatcagaagcaatgatggaaagaccactttgctccacttcgttgttgagcaagtagctcgatcagaaggtaaacgtaacgtaaagaacagaaatcaaatcctaattagtaaaagaaccaatacccaaaaaccccaactagccatttttgcaaattatgataatctcacagcagaagagagggaaaaagagtaccttttgctaggtttgccattgttggaatctctaagtagtgaactctcgaatgtaaagaaagcagccacagtcgaatcggatagcttcgtcaatgtctgcagctccctcggaggccgagtctcggatattcgaaaacgactctcgttctgcacaaacgacgaggacaagtgctggttcgctagagaaatgaaagggttcttagaggaatgcgaggaggagatcaaggttgtccgagaggaacaaattagggttttggagctggtgaagaagacgacagagtattattaccaagcgggagcttcgaaagtgaaaggggttcaaaacccatttgggcttttcgtgatcgtgaaggattttctcgacatgatcgatcaggtatgcgtagaaacatgtcgaaggattcaaaagaaaaacgcaacgaagaacagtacggcagggggttcgttatcgcctccgctgtcgccgccatcaatgttgagtcggaacaaatttcaaaacttccattcgaacttcatgtcggatatgtccatgacatcttcaagtagtgattcggacgaagatttctgaagcagagtccatgatgatgatgatgtaacgtaaaatgtatgtaaatgtacgtagtaattcattagtctaagaacttcgacacttcttttccaaacaagtttaagattctttctttctttttcgagcaatcctactacattataccatccaaactaattcagttgcaccacgatcaaaaattggattagaatttagaacgtttatacaaaaataaataaacaaataaaataaaaagtggtgaatcaaaatgtttctgtgttaatggttacgggagaaatag

SEQ ID NO: 380723 - DNA, 3558 bp, Cannabis indica
ttgtgtttgtgcgtgaggtgaaaaagataggttggatctgaaatcattggtatcaatgcacatgctttttatgttgtgagtgcaaaaccattcaattatcttcgtcactatgattaatttgattactcatgaccgaataatgcaacaagatattgagtggacattttttattttaatttaactttttttatatataaaatatgctttttatgtcacataagacatatgcttcacctgaaataagaacaaattaacaaaaatcctatttttatataaaaagaaaataaataataataataattaaaacaacatctaggctaccttctactttataatatataaaattgaaattccattttaagaaaaataataataaaggcgtggaagacactaaacatcctctggcacaggctgccagccaagccacctgtttcagtgccacctcataaatttgacctttgacaaatgcaattgtcgtttatggtctcatttaaaacgacatgtcgtttcacgtgagtggagtccttttaatgagaattgagaagagagaaggccgtttcaaaggacctttgtttttcggtcttcggtctttccgtttctctattctctgattggccaaatgttattattacgttagcgctcacactatataatcttcttcttctcctcgttcaagagttgaactaccctccaattcgtacagttactcttaccaattctcaaacgaaacctccataccagcccaagtctctcagggagactcatcgtcaccaccaccaccaccaccaccttccgatatctcattctctcttcgatccgtcagcgtcactaaaggtattcttccttcgaaatctctagatctatctgtggattacaatccgtgtatttgttgttgattacgattacgaagtgggatctgaatttcgggtttgggtgagtgtaggttccagagatcaaaggagaaagggattatggctcatagggtagaccacgaatacgattacttgttcaagatcgtgctcatcggagactcaggcgttggaaaatccaacattctttcgaggtatacaagaaacgagttttgtttggaatcgaaatctaccatcggcgttgagttcgctaccaggactctccaggcaagttattttaccgatctgtttggacgattctgatttcgtgttagcgtcgattatgtgtctgcgtgtgtctttttttcccatcaatgacatgcttagattttttgagaataattgtagcttttagaacttgattgatcttgcatgtttctctctaatggaacagaatttttttttccttttaaattgacttgtgttgataaagcttttcagtgatgcgtcctttgagttttcaccgagttaagggaaagtttggggttatagttgatttctggagttcgtagttttaaaattatttgggtctcgttttttctgaagagaaattgagttaaacttcattaataattgagtcagcatcaaccataatttgggtcttgttgatggttgcataaatttacttcgagggagttggtggactttaaaaatatcgtgctaaatttattttagtattataaatgattgggccaaagccaattatgattgcttgaggcggaaatggaattatttttcaatttaggattgcgtatctcgtacacatattttcaatttaattttttcagaagaaacccgtgtgcagtgcagggtgtattatggagaaacttgtcctttactttcgtttttcctttcaatgaaaaattgtctttgagaatttcatgattaaagaatactttaggggcttattcgttttcattttgaaatcaatcgttttaaagtgtgaattttaaatggacaacaatttaggaaaagttcggaaaccaactagtattttggcattttggtggggtttcattttcctgtattgcatttatggcatggagtggtgtttgcatactgatatggctgatttaccatttactactgtaataacgaaaggtagtttagtttttaataccatagccttacctgaaaactttttcaggtagaaggaaagacggttaaggcacaaatatgggatacagcaggtcaggagcggtaccgtgctatcaccagtgcttactacagaggtgcagttggtgcactgcttgtgtatgacataactaagaggcaaacttttgacaatgtccagaggtggctgcgtgagttgagggaccatgcagattctaacattgtcatcatgatggctggaaacaagtcggacttaaaccatcttagagctgtttcagaagatgatggtcagtccttggctgagaaggaaggcctttcatttcttgagacatcggcgctggaagcaactaatgttgagaaggcatttcagaccattttgactgaaatctatcacatcataagcaaaaaagccttggcagctcaagaagtagctacaaatactgcacttcctggtcaaggaacctctataaatgttaatgaagcttctgggaatgcaaagaaaagttgctgctccacttaagtggatttttttgggaaaggaaagattggctaggtggaagataattttcttctttttttggttgagagagtcctgtagaatacaatttttacttgattgggcggtgacaggggagcttgtgaaaatttaaaccaaacagtacatctatagttcttttttgaagattggctcttttcttatgctccattatttcattctgtcacttagaaagtgacactctgactgataactctaatgttgttggaataaggcatatctcaacttgaaagaaagagtggaggagcagaagagccttgtctgtcctagtgctttactctgggttttgtttattgagtcaaaccctaacttgtaataaaagcttctttacttttaagacaaattccttcaattttacacatgcaaatggtactgaatgaaatcattttttttttcttgaggaatgaacaagttgcttagattaattatataatctctgtttaacagatgaaccaattcaagtcaaataaccgaagttttacttcaaggcttctggaaggtggaattagtagtagttgcggtgaatcagaatcatgtcagctaaatgaattataaaagtaataattatatattgacttttgaaccgttcaagctcgtgtattctgattctgacatgaagattgatgatctagtatacctttaagttaaaactaccctgaaaactaattgaaaagtgtaaatcttgtttcagtagaacctatttaatttgagaccctttttttaatctaattttatctatttttttattgatccatttatttttatttttttttaaaaaaaagtaaaaaacctgatgaaaagtaaaagctaaagtgttatttcaaaaaataataaaataaaaaaatgagaaatttatagaaaaaataaataaaaatatatattttatatgaattaatattgggtaaatattattttggatcccgtgttttgcaaaaattactgattaaaccctgtattttgttaaatgataaaatggatcat

SEQ ID NO: 380724 - DNA, 1229 bp, Cannabis indica
acaaatatttagcaatcatagtagtgttccatttcttaccctctcgaaacctaatgcatccaatctgttttagaaagacaaacttttttcccaggaaaggagatgaagtttgctcctattaccattttaaatcccattaaaaaaatctttacatctcttatcaatgggagcaataatcttctgaggtaaaatgaataggctcatctagaacttcaaataccaagcaaaacggagtgaattagttgggcacgaccagcaaaagaaagacttctactagctcatccactaagcttcaagttgagtatatctaaaaaaaataccacaattcaaggccttccatttagtaggtcttagatgaactcccaaatacttaagaggaaatgacctctcttccatttgggaaatctccaagatcttactcttactctcctcttaaacctccccccccccccaaaacgatgtgagatttctttttattggcagcaagacctgttgcattacaaaactcttgaagagcttcaaaaactaatttcacggagttcacatttcccttgcaaaaaatcatgagatcgataaagcaaagatcggttaatctcatattcttacaaaaaggataaaatccaaatcgttttttgttcgaataatgagctaacaatctagaaaggtattctattattaaaacaaataaaagaggagatatagggccaccttaccgaagacttttttcccctttaaaagagccttgtaatcttccattaagtaacagaaagtacttagtacctcttaagcagacaaggatccattgaataaatctcgagggaaagaaaaattgtttaggagatcttccacaaatttctaatctactgtatcatacgccttactcaagtctattttcattatacaatgagtaaacacattcttccttgtatatcctttaagaagatcttaaaatattagaatattgtgggccaaaagtttatttttaacaaaagccccatgattgttgcttattagcttcgggaggacttctgccaatctactacaaattattttggatatacacttataaagtgtgttacaacaagttattggacggttttcacttggcatccttaagattttaaaccttcaaaataagagtgatcaaagattcattcaaggaaaaaggcatgcaatcctcctcaaagaaagtcaaaatagccttagaaactgttggaatatgttttacc

SEQ ID NO: 380725 - DNA, 4611 bp, Cannabis indica
agagagagagagttttaggctatggggtctacgtttttttctttgttttgtttgaaaaattcatggatcatttattttgaagagattaattttgttgggtttttatgttatttttttgaatttgattacccactaaactgagtttgatccttttgactttttgactatatgatagtttgaccagagtgaccagcttttcattgctttgggttgagttgagtggttatgagtaggtatattgtgcttccaataaaatcaacctacttagtcagagagagaatgattggaaatagatgcagcaggcactatgcaagccaggcaggaccactttcacattaacacaatcacaatccccattaattgattatgggctgggctgggctgggctgggctgggctgggctgggctaaactacattatattgggcttagagttacataatcaagaaaaaatatgataactttaaatagttgcaatactttgttatacataaatttagaaagatgaaatgtcaaaaataatggtgatattgatgatacatatgtgaaccctaccattaattcctttcccacccagaacagtcccatgtggctttggaggctgttttaataaggatgaaagtgcatttttctgccttaggcacccccttctcataaaaaaaaaagaaaagaaaagtgcattttttcaagtatatttgttaatatgagggtaggcaatattcaaactaatctaattacaccaaactaattcaatctaataacaaaaaatttgatatctaattataattagattagattaaattttagtgactgaattagattgaatcagatgatgaatgacaattataaattgtataaataaatagtatttagctatttaattttatttgataaaactatattaattagttaaatataataaataataatgaattgtatgagcattaattaattattatttattggcaggataaataataaatcttatttgtaggccacacgtttaggactagcctaaatgcccatatttattttgtttgattattttattgttaaaataattcaaattaaattaattaattatcttctaattattgaattaaatatattattagataatttatttaattaaaaagataataataaaataaaaatatttaattgaattcttttaatcagttataatatttatatttgaatttgaattataaatttaaatcaaattaaatattattttttatttaaaagaattaaataaaagtttgtttataacattctatatataatataatgagatatgattttgtcccgttattgtacttttacggattgtaatccgtgatgtacggcagccgtcagataagagagttatttgatctgatggctgagattaatctagggataattagggttaaaaagtagaaacgtaccctgacactcatttaatgtaccctgagacccatctaatgtaccacagaatacattccgtgaaagtacatcacgggacaaaatcatatcccataatatatatcagtataacaaacaagaataagaactctaagaaaaagagaatagagcaatactttcaaagagaaaataggattaaacttttcactctctctcttctcaactcacacgcaccacaaacattagtgtggtgtgagttttgtgatcatctctatctcatcacagtatctcataagttgagatcgatttctaattacagtagaacatctatttaaaaatacacttggattcaagaaaattatattctaattgagaggttataactaaatagatgtacactaaaacaaaacaaaaaaatcaaaacaccaaaaaatatcaaatgtaacatcaataacaataaacaactcttaatactacatcataataaaattatttaagtgatttcaaaaaaaaaataataacataaaattatttgagtaaatataatatttatatatatatatattacaatttaaaataaaattattaattctacataaataaatttataaactatgtatattttattaagatatattaattattcttatttataattcatccaaattgtattttttatataataaattagagattattcttgaatagattattcttgaaaaacaataaattaataaattttattataattatatatggttggtaccaaaactaaatcaaattattggagctaggttagaattaaattaatttaggttagataaatttttcttgaacttcacgaaatttttgtgggtttgacttcgtgctttcaccatctctatactacagtaaaaaactcatatatttgcgaagtgataaatttaaaacatattatttttggtactacaccaaacatagtgttttttttttataaactcaaaattttattgaaagagaaacaaggcattaaaacccaaagtttgtagaggcaacaaggggtgccacttccctaccaaagaacaacttaaaacacgcattggaggcagcccaagctgcaaggcgatgagcagcactattaagagtacgagatatccaacacaacttagcattgtcgatacgagataggctattcagggtagcgtcaaacgtctgacgggccttccacaccggacatgtcctagccagtaagccatgcaccaccacttgacagtccgagaaaatggacacattcgaacagccacagtgcagggcctgaagacacgcatgctgaattgcaataagcttcgtattgagggaagaacccaccatactcttcaccgtgagcgcctcgaccactgcacctaaaatatcccaaattatcacagtagcaatcccccaatcatctcgcactgaagcatccacgaaaatatgatgctcggaccaaggaagtttcgaacatgaagcgattcactgcactcgatcctcgtcccaactgagatcacagtagagcaactctccatcaaatcaagaatttcacgctagatcatcaagacaggaggggaagaaccttcatggaaggagtggtttcttgccctccacaacttataacatgggtgtatagcatatagggagaaggcatctctgtcaccaatattcccaagtgggatatgtaggggagacaccaaccatctcaccaaagtcttaaggtcatcatattggagctgattagagcataatctccgcggtccagatctccaaagttgtttagcaaaaacacaatggaaaaacaagtgaaggggaaagtcatcaccatcattacaaagaacacaagtcttaccattaccgaaaatttactgagttttgcttccaaatgggagaatatccttagcaagtttccaaaaaaaaaatattttaaccctctcatgcaccttgcacttccaaataagaccccacaaatcatccacaacaccacaacgagcacggatacatgccatataagcattcttgaccgtaaaggagccatgaatagatgcattccaaatcaattcatcctcatcatcaacagccaatcgcgggatattcataacattcctaccaagaggaggagcgaaccactccccaacagcttcagccaatcaatccccattcccacttgcgaacaaagagtttaccatcagtcttttgtcctgaattcttggattaaaggaagcttcgtactgatcccaagacaaccacggaacccagggaaaattccatatattaactgacaagccattccccactaaatagcaggcttcattacggatgaattctctagtgcacatgatacctttcgccccaaaggacattgaatttcgagaaggggtagatcaaaaagtaaggccacgcttaaaatgcttatcataaaaaatctgccaccacagagagttggtcccgaaggcaagtttccaaccaagtttagagaccaaggctatattaaactcttcaaatttcttaaagttcagcctaccccacttccttagcacacaaaagggaatcccaattaatgagggcaagaaaatgactcttatctgctgaacttatccaccaaaaacagcaagtcattttatccaatttcagacaaatagatcttggaaccaaaaagtagacatagcataaattaggtactctgatgccgtttatgacggaggaatgtccatcctaacaccaaacatagtgttaagatgtgcaagtttgagttatttaataatttgggctcattttaagcataaaagtcaaatttccatttccttattattcatgtgtgacatactactcattaacattttcacatcagatataaagagcacatcggtctgagttatgtgatttaagtaactgttggataccaaaaatccatcattttactaaaatctaacggtggatggaccaagtgctattttcataaggctaattagtaaattttttccttgaattattgagattgttaaatgtaaggacttttgtctaatttcattcaattttactatctcagtgattgtttatgtactaaaccatcctccccagactttgatatctacaaaaccatgcccctcaaactttgatatgtactaaatcatgctccttgaactttcatctatgttagaattttttactataattagacaaaagtccttaaatttaa

SEQ ID NO: 380726 - DNA, 1933 bp, Cannabis indica
tggtgcttgatcggcgagagtccggtgatcatgttatgtggacttctgggtttatctttgcagaaggagaggtatagttggtatctaataagtatcaagcattagaaacacaacaatgagcttgtctaattctctttagaacgaataagtggtcttttataggaactttgaaataatgtcatttgaatagtttatgtaactttggaggtattgattgacaagcttgtttcaatttacagattaaatactgtagatgtgataatgaagcaatattagatagtctacaagtcttatttatgcttgcatcttttataattttacttccttaattcgcaggacattgttggcctggaaaccgaacatgggactattcgcatgaaggttaatgcactctttagaaagttggatgctttaccttgtttagaagtccagttgtctagtgattacaaacatggataagctgtgtgtatggaagatcagtctttgggttttctttttttcctgttctgtttccttgaatagcttagctccttattctgcttaagcttttataatctagttttttgttctgttagtctttcttgtgaatttaatttgacattatttttcaatttctgcagctttttcctgattgttccccagaatctgctgcctatattctcgatctattgcaattaccacaatataccggctgtcatttatatcgtgcagaaagccggggaagcatttgggattcagaaggaaatcatgtgaaaaacgtacattttcctggactcctttctagacatgttgtgatagtgaatacctgttgttaactgcttgacaataaaccctcttatttcggtttttcacttgtcagctttccctacataatcattcataaagaaactaactttcataaagaaagcattaagatatctttcatattaatgtgtaattcttaactcgattatttcgttctagaatttgttactaattttatgatgagcgtagaaatgagctaggacagtgtgatttgttatagcatagaatgcttatttttcttagtttctaacttgcatgttatatttattttcagactccacttggtcctccttatgccttagtgcaagggacgcttgaagcgcacgagactgtttttaagaaaatttcatctgagttcagttccatcatccgaagaggatcagttgcttgggttggttctggccctgatttctttatcagcttagccaatcatgttgagtggaagaaatcatacactgtatttggctctatacttccagaggacatggagattgtcgagaagatttcacatcttccaactaaaccggagatttggggtagtactaatgtaactgtcttagagaaacctattaaattaaagttccgaaggatgaagacgacgagtcacagtaaaccctagttgttatagtagagaggtccaactgaataagaccagaatttctttaccattttccatttaagattttgagccatgtaaactgctatgcttgaatgtattcccctggtagtttatattgtagatagatttgtggatattatggattcatttttaacttagtaggtagtcaaagagtgtcacaaaaaaaacagtcatttagttcatttttgtttcttattgaaaagaaaattatattgtttttttttagtggtttgcggcataaatacttaattttgattgcggataaatatttaagtataatttttgacggtagaacttctataagtacctggtagtgtcaagtcaatagtcacatgaaaattcttaattagtttgagttattatatttttgttttttatttaaaaattaatttaaatataccaataaaaaaataatacgtataacttaagtatttatgcttaaaaattactctttttttaattttatttttagaaggctaattaggattt

SEQ ID NO: 380727 - DNA, 1566 bp, Cannabis indica
tgattaggaggatctccgtgctgttataaacctcacgttcgacgagcaaagatgcaactttatagaattgatggatagggagatggaaactttgaaggctcaggaagcaaccatcgatgattgcacgaggtaaaccaccatactaataaggagggcctaccaagtcgctaatcaacaaccagctaccgcgtccagtatcccattgagaagtatagaagagtatgctgctgggcataccacccaaactcataatggtcagccgtccaatcctcggccgtaggtctaaattgtgggccaagcggtagatagccaaatccttcttgaccgccctttggctagacttatacctaataacttcatcaaggctaaaaattctggccaacccatcaaacaaacaagtcagacactgagaccatctggtaccttgatatttaacaaattgggtgtggcacacaagctcagggctaacctgaatagaagaaaaggtctggacgaacactacgtccaaccagctgcccaaccgggcatccgcatctcggacctagatccaagagatcttgatgtgacagaagtcagtcaacaagctgaactagttcatccatttgtgtaagcgcaattggatcaacgagaaaacatggtacaaggcctgaccagcccaaaactcactaatctcgagctggaccgagcacccagatcacccttctcctaggagattgaagtccttgagttacccctaaaattaaagatgccgacttagaagatgcagatgggaaaagaggacccatttcacatcttaaatattttgacatacagatggacttgcagggggtacgaggtgacgtaagattgagaatgttccctggtacacttgcagaggccacccaacaatggtacttcaagccaccaccaagaagataaaatgtgtgaaaacccttctccttagaattccatgcacaattctcctcctcccgtcaactcccctggcacctagaagacctggtcaaggtaaaacaagtcccaggagaacctcttggagcttatataagtaggttcatgacaaaagctacaaaggttaaggggttaatcgaggagggaaggctaaccgccatactggggtgcattgattcgcttggggaactgtggaaatacttcaaaaggtttggtcccgtggggtccatagctgaatttctaggtcgagcagatggaattattaagcttgatgaggctgttcggagtgtggacacaatcaaacataagaaaggccagtaacatatctccttggcagggacacctactcaaaatccacagtatcctagcagtttgaatcggagtgggaagagttcttataataatagcacgcatggttacagaaataagggagagttcattggcaatgctgattatggccatgacacgaacgagtgcaataacctgcagcaggaaattgaattcatgatcaaaaaaatatctgcatttccaaaaatatatcaaggccgatcataatcaaagggccgcccaaacagatgataatcagaatctattaatgcctccaccagtggacgggca

SEQ ID NO: 380728 - DNA, 6082 bp, Cannabis indica
aattgatagttgaggaagttttgtcgcaaattatttaattgaaaataaatattctaacatgtataaaaattaactaaaaagttgtaataaaaggtttgtatacaaatttcctaataaaaattattaatatgcaacgcttaaatccaaacgagatgttataggcagttatgaacaggtaaaacatacattatcctccagctttaccaaataaatattaaactaaaatttggagagaattaaatctcccaaagaaaaaaaaccccacaaagtaaaacttattcgtaagagtatattccaaaatgaaaactgaaaacaaaaatcaaagagaagcaatgggggaggtgcccattatgaggtgtataagaattcaatttacattattgtcgtatataataagtattttgtttcactaaagtgggaagttgatgtcccaatcttcatcatataatatagcaagtagcaaacaagaccgtatgtgattttcagaaattccgaaggacgagttttggctctaaccgtacctacgaaagttcttccttgttgaatttgttccaagcttcctgttttggtatggaaccaaaatatattagaaaaggggaaaaacaacactcacacgtaaatacagaaataaatgttacaaaattaaacttcgaacaagtgaagtaaatgttagctattatacatatttttctaacttaataaatagtgcttagttaaatatagagataaaataaataaaatatattaaaaatataatatttaaataatataaagaaaaaataaaaaaattaatatataatataatgcaaaacgttgaggtaaaatagatgaagtaaattttgatgattgtattttaaagaatatagtagagatttgaaaaactgttgagagtgctcctacacttacatatgtataaatatataggtatggatgtaatccatggtctcactctattatggaataatttatagtaatgaggtaattagaaataataaaacattagtaatatgcaatattactcaagaatggaacatggtcggtaaatagagagaggaggttacctggaggatatcaaaaatcttctctgcagtgtacttttgttccagagtggctcctttttgttgaaccttatcaggatggacatacaatgcggctttcctatagacctttttaacagaggaagaagtaattatatctgttaacgaaactggctcccaaccacattcaggccaaagcacctgtttgttgttcaagaggaaagtgtaaatcagttttgacaaactttattgctttgatcagcgcatgttgaggaaattgtacaaaaaaatacaacgcaagagcataatacattacaaaacatacatattgcaaggacgacagcaatgcacgcatgttaccctctttcccggcagcccaacgtttaatcttaacatccaaagtctcagcaattctctgccagcacaattaaataacaaaaattcacattataagagttgatgcgcgaggagaaaaaagtacagcaagagatcaaaaatgagaataaaagctttcattgtacatcaagatgaataacttgctaatgaaacaaaccaaatacttacactcctttcttcctgttcttgcagagattggaagtcgcgctggttcatatcagccaatgcttttgtctgcataatagacaattttccaaatcagtattccaatgcaaaaatgaataaaaagcacaccaaaaaggttaaatataccactacaccaaaatatgcctttggcatcagtcaaaacaacagtcaccattgttaaccgacgcatttaaccaagagtatactgaggtgtctattacagaccaaccacaatgctaaatgcaattgcatcatgatttcaacgtcaattttcgcaacagaccaatggttgcagaataggtttaaaaccaacatcaaagccttgcaacagatgccaataattacagaataggtttaaaactgacgccaaagcctcttttgtcgtatacagttaacagcgctaaccgacgcatttaaccaacgctttagtagggtgtctattgcagatcgaccccaatgctaatatgcaattgggtcgtgatttcaacattagttttcgggacagacgccaatgattgcagaatcagtttaaaactaacgccaaaactcattgtcgttctagtaacgacataatgctatttatggagcatcaacatcatgcaaagttagtttaaaacaaaaaggaaacaatagacgttaacagtccgagaagtctcgccggatgccctacatatttctttagtcttactacatcgcctgatgtcgtgatctgaattactttttaccagttagattgtaatttataattattacccaaagtaactcaaaaagttttaccaaaataaaagaaaaatagaaacaagccctcttatccaataacatctcactgtaatgttttaaggtgagaaaagcttttagaggaagaaaaacgtacaacacggtcatgggttctttgaagccgttctaatctcgcgtttcttctttctcgactttccccttcaatttcttgaaattcttccaaaatttgggcctcttaaataaataataaatcaaatcagaattgatacaaatatgtgtccaaaaagagcatttgattttcagcaaatgaaaaagaaatccaaacttcaccaatatatacctccaaacatggaagaaaggtcgtcaaaaattccacttgcagaagaagacttcttcataacaggtgaggtcctggaagtcgtcctttgaggcactccaggttgaggcactcctctgttttttgtttgaagatcaaacataggatcctaaaagaggatcagaggaattaaaaactaatattttactcaaataaatatatgtatatatatatatatattactcaaaataatgcataaaaagagttacaaatactacagttgttttctcaccaaagtagtagtccttgaccttggtacactgcttgaacgatgccccattgcaaaaatggattctagatcatctccactatgactactggtcctattggcagaggttcccagccattccccactagaatgaggatttggacgtccatttacattgctttgcaccttacccatggcaaagtcctcaagctcatctatagaagacacacttgagctcttaactgaagacacgtttgagctcttaactgcatcagttgagaagctaataagaaaaggggaaatgttcacagagcatttttcagcttatgcaaaacatattacaaaggagttactcttgaatctttaatgcactattgaacaaacctttatgtccttttgaaatttgtgttccttttggaggggatttcaaacgtggaggttttgtgccgccagaagtgttgagcttactgatcctttccagtgggtctagcaaattagcagtagcgtaggcattttttgatgttgatgttgatgttgtagttgtagttgattctagcacaacaaaagggtcttctgatgtggatgattgacgtgggcgctgtaagtttgtgtttcttgtaaacaagtaacaatgaaaataaggcataaggcaatattgattgacaaacattaatcatcagaacagataatcagatataagtaacaatgacattgttctttgtgatttaaaaaagcatcaggttcaagttttgaaccctgaagaacatgatctgtagtctgtaagataacccagactcttcaaaatctgaaccttgaacatctgtagctgttagcgattaaactcaaatacggttaaataacattcatatattactaagtgatactctgtatattgaagaaaaaaaaataaacaataacttatcccccaaatggtagataaatgaaaaagatacaataccctataaatagaaaatgcagttcaccatgtagattaatggattaatgtagcagtagaacaatggcatttaaccaacaaaaaaggactccatgaccagatataatcagtttctcaaatgctgcatacccgtttttagaaggaatactaggcccaaaaccaggtatcaaatcatcaaaaccagatgcttggttcttgtttgagaatataggatttgcgtctgctccagcaaaatcagctaacaagtcatcaattggaacgttcggcttcggaggcgaagcaaaagacccaaaaatatcatcgctcttcgtggcattgctagcagaagtggagctattcaaaccgggcattccaccaaaaatatcatcattatcataggtatgagaaaaagacgaagaattcacattcgagcccgataaaaatgaaccgatatcaaaagatgaactaccaccatgactacccgattgcttactaggtccaccaaatatatcatcataatcattcaagcttccgctgttctgagctaccttatctttgccggattgataaaaaccgttccgatcgtctgaaaaagatgaaaagttggggtttacacccgaatcaaaccccgaattccaattctggccatcgttactattgacagatctcttggaagccgccattggagccgatttaccttgaggcttcaatccaaacctctccgtcaatacaccaaactcatccatattcgctgcagcagctgtatcacccaagcttgttcagcaaaaaatcataaactttaagctaacaaattatgtacaacgatcaaatttacggaaacaaaacctaaaatttcaaaaatatcacggcagatcaaggtacgaacaggggatcaatgagaaataggaagtttagggcttactcgttgaggagtgcaatcgctgatcaaggaaagtcggaaccagacagtaaataattaattgggctgcttcgataaatttccgggaatgaaaaatggaagctaaggttaaggcatgggctttatatgaccgacttaaattattttgtgtcggtgaaggtacacacactcatccaactcgtgccaccccacctgtctctaaaaattatattatatgtttttttcggttaaactcccacaattattccttgtatttaattttgtaagtttaaatttaaacggtaaaattctttaaaattgaactagttgtaaattaaaagtgtcattcaattaactgttattatggtctacttatctatacactcttatatatgtttggtaatctaatttttgaagagaagaaaaataatagtaacatttaaatttatttgagttgtacatacaaacattcactaaaatataaatttgattttatctaattttattaacaaatgtttgacgtagatagtagttcaaaaagcataatttaatacataataaaatttgaagaggatggtatggtaaatatcaaatttcgatcgacgtgatttgatagataaacaattgtcatattagtaaaattgaacagaattggacaaaaatccttaaatctaacaattttaatatttcatcaagaattcttaacaacgtgaaaaattcaagagtataatttaatacatgttaaatttcgaagtaaaaaaaatcctaattatcctctatattttgaaattataaagattgatattttggctcaaatttgactctaaatttatatataaattttagattctaataaattaaatatatttttcttgtaaggttataaattaaatatttaattgcatataactaaaatcacttttatcatatttttatatgtatatatgtacaaaagttaataactacaaaaaagattaaacttttacttattttatgtatattttactttttaatttaatactattacattaatataagatctaaaataattgccgattcttgatgctacacaaaataatataaataaattttattaaaacttgtataaaattataaatattcacctaatttatagattatagccttccaaattatcttacaaaataaactttagaagattaagctcattctaaattaaaaagaaaaaaaaaatgttgagagagcctcatcacatatatattactaattaaagaagataaagtataaattgatatttactgaaaggaaattgcacttaacatatgatatc

SEQ ID NO: 380729 - DNA, 1690 bp, Cannabis indica
tctcttcttcctcatatttgactcacgattcaatctacggctcaacttttgatcaggatgatcagaagatgacacaagcggaggtagtgctgtttttgcttcattcttagttgtatctttcttgactgttggatcatcattctgatggagtggcacccttaagccttgaagattgctaatcctttgagtggcaccactatcgggttggctcttcgattcatttaggcgactcaacagtgcatttccaccccaagtcgactcaccaataccaccgtttttcttgttctccaataatgccttaaacaaagtgttgtcattgtttctaacaggggtaccagtcttcaaaatttgcaaagccaaaacgtgggaatctatttgtttgattgcttttgctacttccttagagaagtcattagtctctccaacatcatcagactttttcccagtggaacagccaactgaactcgtgacattattgtttgaagttggattggataattcaaaatcagttattctcctcgttatttcgccacctttcgtgctggattgttcgccattaatatgattacttctgcaatattcgcttccagccttgttggatgagacactgagtttaggggacctggaaacaactacttcatgatgggagtttaactctgttgggtgcgtactcttaaaatcacgactcaatataagtatctgtaaaaaagaaaagaaaaatgaaatatgagatgatagttgaaatgtacaaaatagtatggacttgattaaatttacctttgattgggcactctcgaacagcctttgtctgtcatcatcaagaagattcttcaataattgaagtgctttcctatccaataattcgcaagcctttatgaataattaattgcaccacaaattagacatgagaaactagtttctattttactagtaattatataaaaagcaaatgtatagtaattcttcttcttcttcttctctcactttttctataccagaagcaattatagaattgcttacattttctgtgcttgtatttgaagcattgtatccaataatactttgatgaagcccatataaatttctcaaggcaaggagatgagatagtgattcatcaacttccatgtgcgtctcgtttaaatccatcaacgattttattttctgggcctatatgagaatcacattcacaacatatcatatctcacgtcaaaattaactgccactattgtcatctccataactcaaattttatatagaaagtaaaaaaaaaaaaacgcagtgaaaaaaattactgcacataataataataatattattattattattattattattaacaacgtaaaatatcagagtagaccaaaggttgtaacccttcttctatcctaggaataagaaccaccaacagccaataaataggtttatcttttccagttgaataaatgggtactgtcaaagattgcaactcttgatatggttactctaaacgaactaccatttttgtcgaacaaaaaaaccaaccaaacaatatcattaatctatcaataagtctataatacactccattatcgacattcaagaaagtttttttttttcttctttatattagttaaagatttgtaaatttttagaaaattttaaataatatacaatgccgataatgtagctgtttttttttgttttttatttt

SEQ ID NO: 380730 - DNA, 7745 bp, Cannabis indica
gttttgggctataaacaaaaataactctaaatagcatatatttttacataatttttaatgtcagttatgcaattaaaattgtgttgaccaaacatctaattaacaagcttaagctttggagactgaaaaaatattaaagtattcaaaagctagtaatgttgtttgttttgaataaaatcttcattcttagatttaaaaaagagttaattatacaagttaactttaattagttattactgttactataaaattaacttgtgttttatcattcatttcaaccttctaaatcttaattttctcttctctaataattcttgtaaaataattgctatgtagtttgcacggttaacaattcattttcaatcaataatttctttttcaaagttttcgctaaattttattgtgctcgaaatttgtttacattgtgttttgttttctgtattctggattggggactgtagttcaccacaaatttactataaaatcaatgacgaagaaagaaaaatacaaataataataataatagtagtatatcttaattcaaattgaaattactacatgcatcaaatgtaaggatgaaaataagactggtaataagcggggagtgctcctgtctccattctgttaatattttaatacctattctcgcttatatccttgcatataccttatcggggcgatggaagaaattttcactagaaccggtattactgtcaaaaaatctatttatttaacgtaaataaaaacaataaattatataaaatatcatatatactaataatttaaaatatacattattatctaaaataaaataaaataaatataaaaatttactaataaacttcaaaaacacattgtgtataataattaataataatattataaaataaataaaaaattgaacgtccccatcagggcgggagtattatctccattcctgcaccgtttaatattctgggatagaaaattgtccctattcccgctccattccccatttaggtactcacgggacccatacccgcatgtcaaatttcattccctaatcaaatgcatctctttcagtttttatcatgtttccttgtagtctaagcaatgcaatttgagcttccataacctctggctgtgattgaataccagaaaagaaaacctgaatattattcttggcttccaaccaactcaatccagggtctttttctagcaccattccttttatttttctcctcatttcagaaacaccattccactctcctgtggctgcataaagatttgatagcaaaatatgtgtagcactgtcttctgcatcaaatttcaaaacctgctctgcagcatgaattccaatactcagacttttcttaatcacacatgaacttaacaaacttctccacaactcaacaccattttcactaaatggtgatttcataataatttccattgcctcgtctaacaatccagctctgcttaacaaactaaccatgcaacaataatgtttaggccccggcatgatgcccttttgctgcatataggtccacaaaaacttcccattttcggtcattccactgtggttgcacgctgagaggagagacagaaacgttacttgatccgggttcatgccatgtttttgaatctcatcgaaaatctcaagcgcctcctttgccattccgtggtgactaaatcctccaagcatggagttccaacacttcaagtcaggattcactgcttgagaaaatactgaacatgcagctttgatgcttccatttttggcatacatatctaccaggcttccacaaacagacatttcggcttcatatcctgtttttatggcctgggaatgaatcatctcaccttgtttcaaaattgtaaggtcagcacatgcactcaaagctccactgagagcaaagctatcaaccttgtgtccttgttgacacatttcgcaataaaatttaaattgcattgttcccttctgccaatctagcattacttgtgatcatctcagtccagagaacaacatctttctctgagattgaatgaaatactttctcagcagattcaggttcaacatttttgaaatacatggacacaagtgtactcccaacaaaaacaactcttctcaattcctgttttgatgacttcggcgtgaagaggtttcccacagccgcaggctaagcatccggctgttgcagaaacaacagctgcaaaagtgtactcatcaggtttaataaatgaagtagcctttaactggacaaacatatacatagccttttcacccatccccattttctgtgtaaccagaaatcattgtgttccatgaaaccaaatctttgttttccattttcttaaacagaacaaatgctgtttcaatgtcaccacaattgcaatacatgtcaagcaaagcattctgcaaagtcaaatcagcttccgagttcgaaacaatgaaccgggcatgagtaatttgcccaagttgataatcacctaatctgctacatacctttaaaaccattgcataagtgaactgagtaggagcaactccagttctcagcatatcatcaaagatttgaagaccttcattcaccatatcattcttcaaactcccataaataatagagttccaagcaataacatctttatcaactagccacccaaaaacttttcttgcggattttaagtccccacaatttgagtacataccaagtagagaggtttgaacacgttggtcatttaagtaaccaaatttcacaacttgggcatgaagcaaagacccaatgaaccaatcttcaagcagagaagaagcttgaagtaagctagtgaaggtagagccattagctctaacacattcaaaccccatttgggtactcattctcaaggccgtgacagcatgatctggggcacgtgaacaggccgaaatgagtgcgttgaaagatataacatttctttgaggcattttctcgaacaccttccgtgcatcctccactgaaccacatcttccgtacatggacatgatattgttgtacaagaaaggtgattgccagacggctgtcatggtggtcagcagcagagcgtggagctgacgcgcttgattcagcgaggtaacggttgtgcatttttgcactagagtagctaaagaagatccttcgtacaacataagccactcgaacactcaaaacgattgtcgttttgatatcgtaaaagacgaaatctttgaactaattattgaaaattgaaataagcataaatatcagaaaatgttctcttcccgcctcaaacgcagcgtttgatgccctcttttctttccttcctcgaattctctaaccggaaaatgtctgaaagtcagtactgttcccggctttgccggctgatcgaagattctctccgttcatacagggtgagcattcaccgttcaagtttctttcagtgaatgtcttctttgttgatatacatatattttgcaggaattggaagtgggttcggtgacgaaggagaaggagaaagagattctattgtctctatcacaggttcggtttagatacatacatataatttttgtgtttaccagttcaagaaatttattgtttcagcttaattttaggttttccgaataattcagctctggaataaaaagcttgattctgattccgacaatgtaagtctctcttttgatttagaaatattggttttaatggcaaggatattcacggaatggaaatacttaaaagtttagtctttgtgataaacagggttctgtggagagattggtttgtgagattgaatgcttggatgggtgcagctcacattctgaggaaattcaatgtctgtcccaaatcgtagttgacttggtaatactctaagcttgtatgtaatcaaccaatggcaggctttgctcattatacaaagtattttgtaacactgtcttcatgaaagcttttggaactaaaacaatttgcttggccaagagtggttgcggtattttctattcgaaaatcagtttgaagattaatatttgaggtggctttcagttgataagtcttctctacaatggtgtctgatgtgagttcaattttgtgtttcttgtcaggtgtatttgctgaatgtcaatagtcaatatgttcgacatctggggagcaatgttttgcttgttgcttcgaagcttgtggccgcatctgtatgttacaattagcatgcttgaaaaattagcatcacttatcaaactatattttttcatccttatctgcaaattttgtgtagggaagcaactgggaaacttttattcaatgtttgagtgtttgcctctatttggggatcagcaatttgcatactgatccctcagcacattcagtgattggagctgatgattctaagagaacttttttaggttttgtacttgttataaaagataagttgaaaggtgttggctggtctgcattggctggcatcattcgagttttacgctatagcttgaaacacttgagtccggaggatgattttgagctcatttgttcattctttgatagtatcaattctagtctgctaaatgtgccgtgggactcaattaccaagatatttgttgagtcagatgttgctgcttctaaaagctcaatcacagaaggttcgtttgaaagattcatgtttctaggaaattttgttcagttcctgtgttccttggtggaacaaagcagtggcatagatactgcaggtggtgctataaacaaacatccagttattttgttaaccattggccttgtaccgaaactattaagttggagtactggaaagcaaggggataatgtcagcaattacatcagatacaagttattggtatgattttatcacaaatgttcaacatgctcaacatcaaagtgtgaattcagtggagttgatataattctttaaatttatgcttttcattcatattaattgtcctttggttctttgactattgatatgatgtttatcacaatttcaaaaaatttctatgctgtggtaaatcttccagcccaattgggtggttaggatgcatttgcttttcatgcttaactgtctgtagttgcgactttctgtttctgattttcacctgcttatgttatgttgagattcaaatttgtggcctattgagtaccgataaggctaattaaaggttacagtactagtagttattactaatcatgtaaagatgggaatatttcatgtaaaccattgtcagatatttgtatatgttcctgacattattccatgtaatttccatgtattctccgaatcggggtgctgcttttgcatctgaaacctggtttgtgataaaaatgaattataatttgagtaacaccgattgagcaacttactacaggtgttgatgatcaggctcagtgtcccaacttatttaaacttctcaactactgtttcatggttgcaactagtccataattactttggtgagcttttatgccaacccgtaaccccacttgagttggttcagaatgacagtctacaaggatctccatttctatatagtatgtttgatgaagaagtcagtaatgtatcctccctgcatgtaaaaaggcgagcgatatttatttttctaacgtgttcatttagtctgatcaactataaaggtgatacgattaaagaatgtacgtgcacatctcaaaacttgtgcttgcctaatgaatcagagttagagtgttgtggaataaagagaggttttggagagctttataactggcttcaagggcaggtaccaattgagattaatctcaaccagaaattgtactcgaagaagtgtttggatttcaccttatccttccttcgactatacttgcatgaggtttgtgtattttaagttaagttcttttctggagatttttatatctaacatattatttgatcaattcttttggtatatattcaataaataatgtattggtgtgaaaaaaggatgaacttgttttctaagtacgtatttgttaagtattatttataggtttcctatgttcacatttcttgattattttctcatttttctgaactgtaggatgatttattattcagagtgctcttgctactgctttctataccttttcctgcagagacagagtaagcagtagagacaagacatcctggtttattccttcatttccaagcagtaaaggattgttttttaaacaacctcatttggtcttttacaggtttcagaaggaaaaagaggcttctcagaatgaaaaacacgatctgatctctcacgtttcaaacgtttttaatcctgtgcacttgttccatctatttctttctgaggcaagtacatatttgttaatctgtagtaaatgatcaccatatttattataggtattgactctatgaatcttatctctcagttacactatgatcatcaagtgcttctggattaccttatttcaaaagatacaggaataagttgcgctgagtatcttttgaggtgtgttttcctttggatctttttctatcctcactgatttttgaaattattatacacatgagaactgtagttgtattaagctcatatgatttcattattagtggcaattgtttgcaataaaaccttttgtggactttctcttttccactataaattgttttatctatatcatttcaaatgatatctaatgatctaaactaaacagcctaatcattagtctagtagcttaaatgaactttttttttattcttctcaatagggaaatacttattttgctattattctggcttgcagatgcttgcgcacaatttgcagttcttggcatttttttgtacagttctcagcaaatggacatcatgagaatcagttatcttgcaagaaaagaaaagttttgcgggacaattcaacttctcacgatttggaatcttctgtacctgaagataaaagtgtggagggattcgatgaagggtcgaaatctggtggtacgcaatatcgccttgcagcaaaaccatacaagaaagccagagagtgtttgctatctcttaaagtttctgttgaaagtctccataaaaagaatctctttccttacaatcctaaagttctcttgaaaaggtgcttaacttcactagcattctggtaaattcaggatcctttaaggcactgtaatcctcacaactatgctttcactatttttgcttgtgtagattatggagatttgaggagctctgtcttgaggaagataaacagtacctctaaaagaatggagaaacaaaatagaagtgcaagcaagcaacaataatgctagcagagtctcatcctataatattaaagttgcaacgaaacaagatattgcgtgagactgtcacgaattgtcgattaatggttccatgtcctatggatttttgtttgcttttgttttcttgacaatggatgccaaccagaccaaactgccaacatgagatctttgaggtaaaaatcttaggtgacaactgtaaattcttctttgaatgctttatgactttttctttctttctttctttaaatgttgaaactttgtatgaaattatgtaaaaatagaaaagtaaagtgtgtgagtaggagtcccacatgggatagaaacactaaggggtacccagttttgcacgcatgggtgaggactcacacactggaccaccacacgcgcgcgccgccgccgccgtccgtccgaccgaccgaccgatccgagccgggccgggccgggttggcgggcgggtgaggtgtcactttattttttaaagaaaattatttaattaaataaagatttatt

SEQ ID NO: 380731 - DNA, 1658 bp, Cannabis indica
aaaaaaagtcttattgctgtttattcttttcctttctttgcaaaaagtattgaaacttttttaatattataggccaaaataataataggaaaagaaaagaaaccatatacaaacataaatgctgaaaaaaagattttgtttgactcaactctattacctataaataaacagtcactctattgttgaattaaatatcttttctttgctgttcaaccttttttttttcctttctttgtggaatatctaattaattacgtttctgggcattgttttttttttttggttgcgtttactaataaattaaaatttacaacctagtgaagtgacaaacttaataaaactagtttaggctcttttgactagatgggcaagcatagaactgcttgtatacgtatgtacaaccccatatatatatatatatttgaatacgtacgtacaacacatgcaaccatatatagaaataaggctattctacatatataacattacatgcaaaaaaactactacatatatattacactcaatcactcagaaaagaagaattaaagacatgaaaacagacacattcatatactccttaattggtccttacaattattattccttccatggtgatggttaactggagggcaaaaaaaaaaaaaaagaagactaaatctgaaactacaaaaaagctgaattttttattatatgaacaaaaagagtaataagtatgctttgtaacttaattattaagagtgtttgtgccaaccaagaagcatggagatgcagacccttataatgtagagctttgttctctgttgcctcaccattctcctccatttaccaaatctctttcccatatataagtacctaagactatactaatgataatactatattgttgggccaaaaaactctgttgggatcaatctgaagatattagcatatatagcatacttatataatataagctttgaaggtggtctatagtcatgaagaaaaggtcctacttgtacatccaaattgcatctgtgccacgtgcactttctctctccatctaaattcatcaacaaataaaccatctttatcagtttagtttttttcctttttctcttttgcctgccattgtttattgtcgttgttcttgtcaaattctctaattaaagctattttttaagtagacagaaaaaaccatggtctatactttacttaatgatgggcttatctactactactactactatactacaaataccccacataattgaatttaacacaaagtcaagtgtaacattactaacatcacgtgatcctttccattaaattcaactatattatctataatagtatagtagcagtactttttgagtacgttttcatatataatcttttaacaaaatattaattattcaagacacacttgactggataagactatttttaggattgatacactgatcagtacttacactacaaaaaaactgttaagtgataattttttttagaactaaatgtaacttttagttacaacaaaatattacttgcgactaaaacatagtatttagacacaaactgtcactaatttagtagttttagtcacaacaagtattgtgattaaaaatacatttagtcacaacaaattttaattttttttagctaatacttttagccacgga

SEQ ID NO: 380732 - DNA, 1913 bp, Cannabis indica
attactttctctcttccgcaatagtgaatgatcgagatcagatgagttacaagctcatggttgatttccaagaggaattgagcaaggatccattaaatgttgtattaatagagaaggaaatattgcaatgtagagaagtttataaagaggctcatattgctttggtttatttcatttttacaacaaaaagccaaggtgcattggcttaaggaattaaggctagaagaaaacagaaccttttatcatgtaattataagagcaagaaggaacacaaataaaatctactcggttatggacacagaaggcaaatgatttgatagggccaaaagaggttactgatgaatacaaggaagaaaatgatgaaaagtattgtgaatcttggccacttgatttcgaaatctcaaattaagtgattgatggagatttacactagaaaagatgtgaagagataaatttttgacattcccagcaacaaagctctaggtccagatggatttgggagtttcttcttcaagataattggaaaattgcgggggaggatatgtgttctactatcctctcttttctatatttggggaaattatatcactaatgtatatttttgaaaatagaacttattttctactaataatatacaaatataagtgagcatcatactattacatgttgcaatgttgtgtaaaaagtagccacgaagttgatttgctcaagactaagggaggtgcttctagaattaatttattagaatcagagtggctttgtacaaggaagattcattgcatatactgtgatggtctgccaggatttggttagacattatggagtagtaattctctgctgaatcgtatgattaaattagatctaagaaaagcttatgatacaatcgagtggagcttcatgctttcaaattccttgtgaaattcattcagctggtaatgatttgtatcaaaactcgaagatttagtttgatgatgaatggtcaattccatggcttttcgaaagtaaaagagatcttcaataaggtgattcattgtctcatcttttgttagtttttggaatgtaataattatcaaggaaaacgaagaaagtgggacaaagagaggagtttaagtttcatgaacgatgtcgggatttgaaattaaatcacctttattttgccgatgatgtattattattttgcaaagatgattttagatccatttacttactgctttagaggttgtaactattttctcaaacttcaggattgcaaccgagtaaggcaaaattagcaatctattattttagaatggagcaaagtgaagttcagagggtgttagatgcttccaattttattcaaagtcggctgccatatattcaaatatatggggattttgatatgttcaaagagactcagattcaaatatatggaatgttcagagattatagagaatatggtatctagaatattacacttattaattttgtgctagtatcaatccattcttattgggctcaaattatacttatgtctaagcaaataaactctaattgtagatccattctatggtaaggagtggcagattatacttatttatgtaagccaaaaaagaagttggcctaggttgtaagaattgattgtatcctgaaactttacaaattagtagttgcttgcaattctgttggctctgcaagtggcccgtcagcgtaatgtttcaaagatcaaagtccattcggactctaaggttgttgtcatggctctcaacatcggttgtttgcctttcgcctggggcacttaccctgtgtttgaatcctgtctatgtctgtgtgttgagaatcatggggttccaactcaaaaccaattggctatgagtggagtagcccatgttcttatatatggctcaatacttttacatttaatctatgtgggacaa

SEQ ID NO: 380733 - DNA, 2548 bp, Cannabis indica
ttctttgaagttaaagttaaagagagataaaaaactaagaagaaagaaagaatattaatactactaaagatcacaaacaaatatatagagtggtcatgggagattcttcagcttcatacatacacatggtaagttaattaatagttttatcaataaaaactttcattatatgtatttatatataggtaataaaatacgtgattactttgttgatatattgactgtgatcacttggtatatatatacgtacataaaattatgctatgcatgcttatgtatgtggttattatatatatataaatatatgcatgtacaggtgcaacacctaatagagaagtgcctgatttttcgtatgagtaaagaggaatgcatggaagccctgtccaaacatgcaaatatcaagcctgtcatcacatccacaggtaattagtttctttcctcaatgctcaaatcatatatttttctaattatcccaaatgagttgtgcatgcatgcaactcaacgtaataagaaaatataatttcacaagcacaaaggcaactcaaactgctctagagaaataaaaagtactccatatcatgccaacctagctggctatatatattatattgggttaagatcagaggtcaattttcaaacatctttatagagaaaattatctcacatgccatttcataagctcagtgttaaaaatataccaactgaataactaagctgttatttgatcacaagtttttactagttggttgaagaagaacacatcaagtatgtagctaatttattataaaatataatagcaccaagctgatcttgaacgaacctttaattaactaattttcagtacgtaaccatgttaatatataagtgagcaaaaagcataattgtttaattaatatatgttagtatcgtataatttttatgcaactgtagctatatatagctagaccaagttaacatgtcaattttgtttctatatacagatcattaatttaatcatagtaataaacatataaacaaacaaaatatcgatggaattcaatagtgtactagttcacaataatcaaacaacttggtgccagtgtataaattaatgtattttatatgtgatcatgggcataatatgcaatgatgtataccatgaatgtaaatcactattcctgctcaaaaaagacatcttctttttattcttttctaattatgttatgttgatatatattagattaatacaaaaactttattatcaaaacaacaacaataatatttataaagaaaatgtaatatgtactgatgtgacatttaaaaataggtaaggatgaaaaaaatgttttataagcttttcaaatgtgtcacggcactactctactctagtacacagtaattatacgaaagaatagaggaaagaaataaatagagccgttagatctattttgtttagaactgataatatatatatttataaggtgcacatgtatgatgataattgtaccatatatagtggcagatactcacgatttaaattgagaatttttttttttcttaaacgagaggtagtgtactttttttatatgatataatatcttcaaaaattcatttatacttttataaatattatataaagttaaaataaagaaaaaagtaacaaaaaataagttggcttcactgttgatagtttaaaaattgcttaacattttttaaaaaatgcaattatcattattagtataatttaatattggtattatttattttaattttaataaaaattataaaaaaaaatactaaatacttatgctaaacaccttattgcattagaggaaatgctcgtaaaagaagagaaaactaattcagtatgacaaattttagatatatgtttatatatgttttgtgagtagtattaattattaattggtagagattaagatgtgcagtgtggaatgaattagagaaagagaacaaagaattcttcgaggcatacacagaatcccaaagcaaagaagacaaaatagtctgaggaagagacaagccaaatgatacagaaaatgatttctgattcatccaaagattccgacgactaataacacatatatcatatatatatgcactcgaaaacgaatactcacctctctctctctctctctctctctctctcttggtgctctggttggtgaatatatatatatatatatattaaatttctctacatgtaattattatcatgactccaagcccagccaaaaccacatctacagggagagatcagtcatcacatgaaaattcatatcatcattaattattacgcggtcccccttattattatgtatgttgcttttttattactcctctttcgtatgtacatatatgaatgtttaagtttgacagtgaattaattttttatttattattaaaaattaattatctatacagtttttatttttctttaatatactatgaaatacagatatatatatattcagtgacggacccaggattttttatcagtgggagcttaattattataaaatatttattatttattttacattaaaattat

SEQ ID NO: 380734 - DNA, 2232 bp, Cannabis indica
aatggctgcacactataggcttctattcataggatactgccacagtcgtgttgtaccccttctcatcttcaaattcaattaaatgagggtactctttctacaatgacacttctataagaaccctagggaatccaagtttgtctctttttttggtagcttcatcaaccatgataggtttccctacttggccaataatcttgatcaaggatttccccccccccccaatacttcaattctaagtcatccaaatgtacccgaatcgggaccacccgaatgtctttcttcttgaaattaatctcaagaccccacgattttatcacaactggtcttttgttaaagaagatatattcccattttagcactttatctctatcctctatagaattgaacctaatcagaaaaaatccatatgacaccattcctactctttcatctttgtctttccacatccttctagaaaatccttctaaaattgacaaaggagggtttgcccccaacacatagcacacaatagatggtttccaaaattcaatttcctcatgtgtgtcatctactgtaatcttaactttgctcgaagaattggaatgagaaaatgaattctcaagactccttttcacattgccagatcgtagtatagggggattagtaatgtttccatgagagatgtttacagagcatcgttcattggcttctaggaattgaacaaaatctttttatatattctcctactgccttatcgattggaagatgacctaggcgacaatggattaggaaagaaatcttgaacatttggaagttaaatgccctgacgaacatcgcactcccctatttccccaatttcttctccatctgaaaaaacaactggttctattccaagaatagaatccattgatttagttttcctaacatcagagcttgaattagggcctttcttcttcttcttattcgtagaattaagcttcccctgccccctggaccttgtttttgtcatggatccagctcgtgagctgcaaggttttgagagatagataaatctcaatcaatagaccgggtattgtgtattctatcaataaattaagttaatttcttcaagcccctactcaaaagcattagagcgcttgtaagaaaatactttggtatcttgcatcctcaattggtgatggaatctcatttactcgtgcctctcagttaactatcgaaggctttagcgactcagattgggcaagctcccttgatgataagaaatctataacaggctactacatttattttggaaataacttggtaagctggagctctcaaaaataaaaatcagtggctcgttctagcattgaagttgaatatagagctctagctcagacatgtacagaagtagtgtggctgcaatctctactttctgaacttggaattgaacacaaaggaccacctatgatatggtgtgacaactcagatgctcagcaacttacttctaatccaatttttcattcacaaacaaagcacatggaaattgatgttcacttcataagagataggattctgagtaaagaagttgacgttagacacataccaatagaagagtagaatgctaacatccttacaaagtctcttagcatttcacaatttctctatctcaagaacaagttgccagttttgtattctccacagtccagcttaaggggcctgttgaaaataaagatgatttacagttagaaattgttgagacgcacgatcagcaatataacagctagcagtacaacggctagcaaatgatttgcaatgatttgctcccataaaatttggttataatttttgctgaattatagggattttatattaggggcgttcgcgatgcgagtggtgtagtttttgaccatttttttaaatcaaacccgcacatgcggtttttccaattttccaaaccgcactcgcacgacaaaactaaaaatccgcgaaaatcgcactgcaaaaaatggtgcggtgcggtgcggtttttgtggtttggactatcactaataattaaactattacaaatacaacaaagcttgagtaacacttgtcaaaaatatcataaggcttgaaaatacatataaaaaaaatgaaatttacatgaaatatgggatttcataaaaaagttagaaaaatatggcatttataggtttgccactcttctatggtattttttcacatttaagattttttatggtatttgatatgccatatttttataaactt

SEQ ID NO: 380735 - DNA, 1832 bp, Cannabis indica
atgatttttgagtcaattagttgatgaatatgatgttttgtgtttttgggttaatgggtatttgagttagtttggtattgaagattgtttgcaaggtgtttgatgaaatgcatcactcattgtatttcgttcattttttgagataatttattgatgtggtcacgaactattagtataattatagtattagaatctatttaactaacttaagctagttggaatcgtgtttaatgacattaaacatgaactcttagaattgacttttgattagtcttataataagaaattgtttgcaaaaatgatcgaaataaaggggaaaatttgattatttccataattcgagaggaatttttttacgaaaaagaaataattcttggacaaaatcctatgtgttataattggaggagtgaaattcatatttgttcttataatttatgtatgatggattatgattttcttctcatttgtttaggtagttgaagcttgttcacattgctctgaacattttggttacaagagatcaacacgtaagtcattatgtttgctcttgaaatattcttgaattcttggtttctttagctaattattgaatgaaaaagttgaaaagatagtttataaacatatcacttaagaatattgaatcaaaatcacttgtaagtcttgttaaattttgaaacttgggatgaactcaggtgagcttattgcataaaaatatttattctatgtccttatatttattgaattgaactgttgttttcaatttatttgtgtacatgttacatatggtttcttaatttagttttttgtttttcctttcgaaaagtgaattcgcttatttggattcgatattactgcctttgattctggattattgcaaaattaattcatactcaattgaagaaagtttgtttggtgttagataaggcataagcatatataactgtttctttctttcttttctcatcttgtttgatgacattttcttctttctcattttcattttttcgtagcatacatgccgcatttaagcatcctctatgcagatttaacagaggatgagatgaaaaaggctcgagacagagctaacattcttgatgatagccttagtagcttgagcttccctataactcgcctcgcgttgtacaaaaccgacccagaagacaaaactctcgagtcttgggaaaagattttcgaatgcaacctcgaacccaagtagatcttctcacaatacttggaatgttgtttgattttgagatttttaatgaagttgtcatctaggcaaaatagtttgaaggaattttcttctttaacttagtcaaatcttttgaaaggtcaattaggttaagaaaattccaattatggctatgaaaaagaaactcgaaataattaggaataatgtataaggcaagagatgttccgagtttgaaggtgttgggcactaaaataatacaagagcgtgaagtttgtatattcgtctagtttttaatattactggtgtcttgtaacaatattcaattacaagtatttgtagtacctgcaaatgaaaaacaccaaatctaaaccctgagatttcgacattaagtctagtttgaaccgacaaagtcttgttagcaactaattcaaaattaagaaggcatcatttgaaagctatatgtgaatagacactattatggtttagcttaggaggaagaaaaggttaacaaatttattgagttttgttgttacagattcacttatttacccttaagttgaataacaccactcatagggtttgacaaatatacccttacatcagatacaacaaatatcaagacagttacaaagatagttac

SEQ ID NO: 380736 - DNA, 2613 bp, Cannabis indica
tccttttatgtgttttttgagtttgaagctaaaccccattattgaacttgttcaaaattgactagatttttttgtgtttggagagtgtcatatgactgatttggggtttcatttattgtttggtatgaaggtaaaaggtaaagaaaaggaagaacttagtgactcaatggggaaactaaacattgatgagggttcatcatcttctctgggaggagcttcttcaagtacctttaagaaaaaaccagtcatcattattgttgttgggatggcaggtaagaatacaatttggttggtgtattgatttataaatcatagaatcaataagaattttgccccttgaactttgtcctctcgaattattagcaatgcgaagtattgttcctcaactttgaaaacagaagtaatttgtaggactttggttaagtagctagcaattttacctcctggaatatgaccactgccacattatgcgtccgatttggcaatgctaaaagttcagagggcaaaatatgatagtggtcatagttcggttggtgagtttgctaattatttattgaaggaaaatatttaacctcagtaatagttcaacaagcatgatattttctcggccaaagatcaaggggcaacatacctattttttatgaatgaagtgaagtgaagtgaagggaataaataactgaaatcttatgagtttgaatttttgattagggagtggaaaaacaaccttccttaatcggttggtctaccacacacatgtatctaactataggggttatgttattaacctcgaccctgctgtgatgacactcccatttggtgcaaacattgatattagagataccgttcgatacaaggaagtcatgaagcaatttaatcttggacctaatggtggaattcttacttcacttaatttgtttgctactaagtttgatgaggtaaagcacacttagttgaatttctgctctaaaccttttttcggattctactttgcttgggattttaactcttatgatgaactttttggctgtattttaggtggtttcggttattgagagacgggctgatgagctcgattatgtacttgttgatactcctggtcagattgagatatttacttggtctgcttctggtgcaattatcaccgaagcttttgcttctacatttcctactgtggtcacttatgtagttgacacgccccgttcgtctagcccagtaacttttatgagtaatatgctttatgcctgtagtatactttacaagacacggttacctcttgtgctcgcgtttaacaagaccgatgtggctcaacatcaattcgctttagaggtccatttgatcgatcacttagttatgttaataaatatgatatcataatctgcataactgataaaataaattgtttttcatgcagtggatggaagatttcgaagcatttcaagctgcgataaatgcagacgactcttactcctcgactttaacccaaagcctctcccttgtactggacgagttttataagaacttacgttctgttggtgtatctgcggtttctggtgctggaatggatgatttctttaaggcaatcgaagcaagttctgaagagtatatggaaacttataagtactccctcgaaccctttcacttgttctaatttgacatggctaccgagattatcaaacaattgatttgaattgttatgttgttgtttttatagggctgatcttgacaagagacgtgcagagaagcaacggttggaggaagagcgaagaaaggagaatatggataaactgaggaaagatatggagaaatcgaacggtgaaactgttgttttaagcaccggtttgaagaacaaagaagagaacagcatcagtaaaggcatgatggatgaagaaggcgaagaagaagatgaggatattgagttattttctgaagacgaggatgctatcgatgaggatgaagatgaagaagaggtttctcgatactctttttagtgtcgattatcttcgagcctcgatcgaggggagggataaaggggcatgatttgtttggagcaaaaactgtgtataagactttatttggaacaaaaaaaaactgtgtatagaacaactaacttaagaagatgatgatgataatagtggtctgctcactcttctgtcaaagctttaattggcacagtttttctattaatttttcaacattaccaaagtgccatttgcattattacaatgttagtttttgttatacagatattctccaattttgttcatgtgtttttaaattataatttagtaataggcattgttgagtacacaatatgttaaattgatacttacaaaataaatgcaacttggcattgattactatgttcattttttctttcaaaataaaaaagttatataaaaacatagttaagtttaacataaaagtcaatcgacaaatttcaagtgtgattatgagttcgggacacaatgtcaatgattcacttacattttaatatttataatatttttataagtaataattttagagtttttgcacgggtaagttgaaaaagtttaaaaaaagaggtaaaaatgatagactttaaaaaaaagggtaaaaataaaagaggacaat

SEQ ID NO: 380737 - DNA, 1097 bp, Cannabis indica
acacacacacacacacacacaagcaaaaccccacaaatcactacacatgagcaaaaacacacacacacacgtctctttttcttgatagatttaatcacaccaaacacataatttacccaatcaccaaaagaaaagaatattgttgtgtcttgctatggaaaggctttgaacaaaattaattgacctaaaagagaaaagataatcatttccctcacaatgccaataccatatggtcatttcactacaatctagtagtctacagagtagcttctcagctttcaaaaccttcaacacacttttgttctcttatattttcctctaaatcgaataataaacacctttgctttttttctcaacttcaaaatcactataccaaaaaattaggtttaatgaaaaaaacaaaatcaattctaacaaattgtgtacagaaccctatgcaaccattgattttccagagtgaacattgtcattctatttcgtaaattgtaaagattaaagattttctgagctacaaggcttcaacaacgtctgcaaaataagtggtgaagaattcaaacaattttcttcccaaattcaacttccaccaaaccctaattcggcgccaacaacataaccgaaaaaaaaaaaccaaatctaacaataacgtttcctccctaattcaaaagcattcatttgtctggttcaagtgagcaaaatcactacgaaaatcgaaaaaaaagagagagaaatgacatacctgattcttgaaggtaacgaaagacgagataattcaattcgacggaggtgatggatgtggccatggactcaaatttttcgtgttcagcggctatggagaaggctcaggcgagcatgtggccccaagagagaagacgagccgagccgagaagatgtacggaactccgttaccagagggagagaagggagaaaataccagaatcgagagagtgaacacttttttttattattatttaaatatttaattaattaatataaaatatatgaatatttattggaggaaattacactctataccctttttatattgtactcatttatttttaccttcttttttaaaatctatcatttttacctctttt

SEQ ID NO: 380738 - DNA, 7647 bp, Cannabis indica
atatatatatatataaatcatattgtctaagctttttgtcttgtaatggtttgtttgtgttttttgacttttaccaactctctcatcttatctattctaggtgataattactattattgtaacttgaatcagataatcaaagataaaatatatgttggtaaggtaatatgtcaactttgaatgctcttataactttttgaacaagttcatattgttacaatatcaatggaatctccaaacagaaagagatagaactggtgtacccttccaacacaacacaaggcattttccattcatctcaagagtacagtaagtcctacatgagaatctgtcaacaatgagattagcttggtatatagatgatgaactcaattcaagctcttccattccaaacctcccaaagaaagctctccacacatcaatcttaacatttcttatctttctctcttctccttctgcagccacaatgtttctgattgcctgacaacaataagttgcttcgatcaccatccgattcggctcagttctttccatgaaaaagtcaatgcaatcaaatagtgtgccatagaagaaaagggcttcaatgaaacggttaacaatggtttgcttccatttcggttacaaccatcacacatggatctaagttccttaccactttcattaaagattccattttatcaggctctggaagcaagctcctaagtacatgtgaagagtaaacagctactgtctcatcagaatctagctcgaaaaggtcttgtttaagatctgacatgtctgataccatcactatcttaaaagacaaaggtatattaatggtcttggcaaaactcaacaatctctctcctgtttcctcaattgcaggttttgaagtagttccaatagcagtaatcttgagaagctcaagttgagattcatgacaagatgaagcaagagcttgcatcaggatagtccattgtgaaccgctccttattccaaggtcgattatgtgaatcttcttcgcttccttgacattctcgataatggcttgaattcctgcaaagatagaaagctgacaaaatggaatgtcctggtgaattgcatggtaagtggcggttatagtcaccatcgcttcatccagattaaactgctgaaatgtctgctgaattgactgcaaactcaacactatgtgtcgtccggtttctctatcaatcctttctctaagagcttgacagaaatagtaaaccactctttgaactggatttcctgttgcagaacataacagctcacaatggctaagcaatttgctccctcgttcgaactgttgacattctactttctgagcagatgaaagaagaaactccacaagctcaacatctttagtatcttcaatggaaaggccataaaaggatgattcaaaagcgtgtctaagcatcatggaaggagctttatcagcagcatgatgagaatcgaaacattgaatgaatcttgttccagcaattctcaaaatgtcatctgttgacaatttcatcccttcattgcttgttgtatcacaactcggttcctccataacactatctcgcttcatcttctttactccactgctatacttccttaggatctcaaaagctgctaatgaaatcggacactctttctccttcttggattcaacatctgaatccacatctgggatttcactaatcctgctatctcctccaaacatgtctatagtgagggcaaatctgtttgaaaagacttttatcaaatgatgtttaagtgaattgaaaatcaacaccaaagctaacttcttaaactatataagaataaagaaatgaaaagcacataggaaaattccttaccttattgacttggtcagaaagtaattcaagatggtttctcatctgatgcacatttatgctgttataaccaattataatccttggtttttaccatgaaggtgaccaatagtttgattataatattacattccataacagtattttaggtacattcaacagctttgtcacttagtcttagttactatcaccacattttttgtactttgcagtgtcctactcactcactacaccttttacagtgttcggctttgtacaccttaaaaacaaaaacaaactactctttaggtgagagcaaactttttagtttctaacaacaggccaaggtgtgtcattattctacatagtacacagtttttttgtcttcttggtttctcattctctaactgtttcatcatcatttttaagtgctaattattatgtaaaaatgatgaataaataaaagggaaaaaccccatcatataacaaactttcaagagcagtatctattggtaactatgatcattacaaaactgattaaatgatgatcaagcagatattgaaacatgaaattaggaatctagagctaatatctattggtaactacgatcattacacaataaccttggagcagaatctatcaattcgaaagctctataaccttttaaactagtttatattgttacatcaatggaatctccaaacagaaagagattgaactggtgtacctttccaacccatcattagacattttccattaatttcaagattacagtgagtcccacttgggaatctgtcagcaatgagattagcttggtatatagacgaaggactcaactcgagttcttccattccaaacctggcaaagaaagctctccatacatcaatctttacaattcttatcttcctctcctctccctcagtggccacaatgtttctgatagcctcaaaacaataagttgcttcaaacagcattcgattaggatcattcctttccatacaagtttcaaagcaatcaaacattgtgccatagaagaaaagggcttcaacaaatcggttaacaaaaactggcgagttatggttaccttccatttcaattaaaaccatcacacatggatttaagttccttaccactttcattaaatgctccaattgatctggctctgaaagaaagatcctaagtgaatatgaagagtagacagctactgtttcattacaatctagctcgaaaaggtcttctttaagatgggacatgtctggtaccatcactatcttaaaagacaaaggtatattcattgtcttggcgaaactcaacaacctctctcctgtttcctcaattgcagatcttgcagaagttcccacagcagtaatcttgagaagctcgagttgagattcatgacaagaagaagcaagagcttgcattaggacagtccagtgtgaaccgctccttattcctagatcaattatgtgaaccttcttcgctttcctgacattctcaataatggcttggattcctgcaaaaatagccagctgacagaacggaatattctggtgataggcatggagagagggatttagagtcatgagcgccttatcaatatcaaaccgctcaacggtcagctgaacagtcttcaaacttaacactataagtcgtccggtttctttgtcaatcctttctctaagagcttgacataaatagtaaaccactctttgaactggattccctgttgcagaacataacagctcacattggccgagcaatttgctcccaagttcaaactttttacagtctactctcgcagcacaagaaagaagcaactccacaagctcaacgtttttagtttcttctatggaaagaccataaaaagatgattcaaaagggtgcctgagcatcatggaaggagcattgtcagcagcatgctgggaatcaaaacatcgaataaattttgttcctgcaattctcaaaatgtcatctgttgacaatttcatccctacattgctagctgtattaccataacttggttcctccataactctctctctcttcttcatcttctttactacactactactactgccccttaagatctcagaagaagttaaggaaatggaacattgtttcttcttcttcttcttcttcttggattcaacatctgaaaccacaactgggatttctccaaacatgtctcaagtgacaacagcaacactgtttaaaagcaaaatagttttataaacttcattatatgcttaaaatggtgtttaaggaaatgaacaattgacatcaaatctagctacttaaaatataagaaagaagaattgaaaagcacatagaaaaatttgttaccttgattgacttggtgagaaagtaagcagagacagagaggctctctaatgcatatgatcatgttgttatataactgatacaatccttgttttttactataagagtggccaatagtttgattactatattatattatataatgtaaagccttaagttgaaattgatgttttggaggagtgttcaaacgatttctcctaaagaattattttttgtccaataaaagaaaacaagagctttagttcagtcaacaactataaaataaactctgtataattctttagtaagaaagaaggtataaagactaaaatttctctaacttcatgtacaatacgcgttttgacagaaaagaaagccacagcttttttctttcatatacttacatataaaaatatatactatacagggtaccactatagtattattttagaggaagaaatactgtgtaattttaggatgtcgaaatcatgattcaaacagtttattctacgcttgtgtaataaaacaagcgtcctgcaattagttgtttgaatcataatttcagtattttaaattattcgggattttttgaaaatttattaagaaaatactaaaaataggtgatagtgacaaaagacaatcactatccccacagttttttctattatttgtatatgtatatatatatgacaaatccacaggcacagggcgatattttcagttggtcaaacagctctttctagggacatttgtcatttctgtaattcctaatattttattgctcttgatctcattcattcattagtaagctttttgttttgttatggtctttgtttgcatcgtttgtcactctcatatcatcttttttaggtgctaatttttatgtaaaaataaattaaagaaagagaaaacaaacacatatacacacacatcatacaataattgtattctcagttgttatgatgtggtctaattatggcaatttaagaacataaattgaaaaaatcaaattgtacaaactttgattaaatgatcattataatcaagcagatattggaaaatgaaatcagaaatgtagagctactatctaatggtatcattacacaatgaacatggagctgaatttattatgtgaactgtaaatgtaaatatatgtcaaatttgaaagctctgtaacattttgaactggtttctatttgctacatcattaatggaatctccaaacagaaagagattgaagtggtgtacctttccaacccatcataaggcattttccattcattccaagagtacaataagtcccacttgggaatctgttgacaatgagattagcttggtatatagatgatggactcagttcaagctcttccattccaaacctggcaaagaatgctctccacacatcaatcttcacatttcttatatttctttcttttccttcagtggccacaatgtttctgattgccttaaaacaataagttgcttcaacctcagttcgattcggttcattcctcttcatgaaagattcaaggcaatcaaatagtgttccataaaagaaaagagcttcaatgaatctgttcacaaaggctggtgagttatggtttgcttcaacttcagtgattaccataacacatggattcaagcttttgatcactctcatgagtgactccaattcagctggctgtgctatcattcccctcaatgcaaaagaagagtagactgcgattgtttcatcgttgtccaattcgaaactatcttctttgagctcaaacatgtttgataccataattatattgaaagagaatggtatttttagagtattagcaaagttggtcaaccacttaccagtctcctccataacatgctttgaagaggttgcaatgactgttattttgaaactttcaatggggaagtactcatggcgagttgctagagcttgcattaaggctatccattgaacaccattcgcgattcgaaaatcaatcacatgaactttctttgattcagaaactttctctatgatggcttggattcctgcaaacttttccacttgagaaagaggaagtccttggtgaaatgcaagcttaggctcatctggtaccatcattgccttgtctagatcaaaagattcaaggattctccccaaaccctttgatgtatttcttccactttctttatcaatcttctctctaagagcttcacagaaatagtatgcagccctttgaactggattacccgaattcgaagccaaatcatcacaaaaatggagtaatctgcaggcactatcatattgttgacacccaattttctcagcagaagctagaagcaacccaactagctcaacatccttggtctgttcaaagttaaggccagagaaagaccaattgaaaggatggcttaccgcctgttgcttggaataggactgaatgaatctttcaccagcaaacctcaaaatctcttcagttgataatattctgtgatctgcagcagcaacatcagccacttgattaatattattatcattacttggctcaatgattctttccccattcaatcgtttaaaccccttttcatgattgtttaagagctcaaaagctgcaaaagagaaaggatactccttcttatccctcttgcctccaacaactgagatcacagttgggatatcatcactaacctcctctatgcatttttcaaaggattttaagacagattcatattgaggaatttcatcaaacatgtcatagacagaaaatgattgttgttgttgttgaagctgctgctgttctggtacctgagacttggataaaattaatccttgttcaaagtactcatctgggtaataaccataatctggagaaaatgaatgaatcccaactgggtcataatcataaccccattgatcttcagctccataaagctgaactttttccacaattttattatcagtggaacaaaagttatcttgaatgtccccataactaaaatcctcagggaagaacatagaatcatgcaattcaaaattgaaatccattcctttctgggttctcttctgtctaatcaactaaataattattatgataataaaacagattatatatatacacataatattttatatgtataaattataataaacacatcaatgcaattagtgtgacaatgataatgatgtttttgatgttatcaaagacaaagatggcctgctttatgttgtttcaatagtttatttatgtgaatccaattggattaagattgagtatcaaactatatttttttaattagtaaataaatttgaatttacttaaatattgaagagattaattatgttgaacttgtcaaccgatgtcaccaatggggattcagacaataaattgttttaagaagagtgcaacgtgaagctgttattacaatctcttaattactttttatatccgaaaatatatgttggaattctttttaaaatttttttttataacagtatttgttatagttacaatattattcttataaatt

SEQ ID NO: 380739 - DNA, 2725 bp, Cannabis indica
gagggtctggccggaccacccctggccggccaaggaatgtgccgtctagccctatacaaagggtaggccagatagcacctgtaatggctatcacaaagaagcccgaatgattggtgtttctatagccttcaccttggacggaccacgactcattctcagctgtaaagctactccaacaacccacgaaaataggtatttgactccaaatatcaacctattctttgagaaaattaattagctattttttgtataataaatgtatgataaaagatgataactcccctttttaagggatataaatctattttgaatctagatcttttatgagctctcacctatttaaagagcatgaggccaagccaaaaacctaagttctaagtgccaagctctaatctcgggacccttgctctctctctcactcgagtatccataaaactgatactaagattgtttacttatctcacttgttcaagatttgccttacattattctcgctattttaacattcaaagagagccacactagaaatcacaaggtaaaaacctataatctatgtggtattatcactcgaatcaatacaataaaaaggggagtaagttattacttgttaatcaacggggtcaaacctccataaattgttatgtctatttaattatttgcttttattatttacacatggtgattgtgatcgtaaataaggctccactatcagttgaccaaatctgaagtcaacattttcgtgctttcattgagagcattatttgccaactcaatcaatcatcatggttgtaaaaaaaagaactacaacttctacttcttcaagtcttcctcaagacctctgactgttgatcctaatgttcgtgttccaaccaccactggagtttccacgaacccaactgaagcaacaaatcttgccaatcctgtcagcccagcagacccaacaaacttgaccaacacatccaatttggtcgaccccgctaacccagctaatcctaatgaatagcctttgccacccaacgcagatctgccgatagcacctcaaatagaaggtcctgttgacacaaaacaacctctacagagcggaaccaggactattccccggtattatgtaggggaaagaggactagggaccgacaaactaactattggtgagcctcatgtggactgggagaagacattaaattggccaggcttagagaggccataggccaggtcgagcaggctaaagaaccacacattgttggttgcaatgctttcacccaatagagatgcaaattcatgaggtggatggacgattaggaggccatcctccgggcccatcaggaggagctggaccaccgtaactaggaggccagtaacctaataaggtggtttaatgaaagaactgttgggaaagtatctgattaaagatcctttgcaatgattttttaatatattaaaatcgaatcaaatcagatccgatctggaaaaaaattaggcggggccaaacagatctaatctaagatccaataagtatctaaatgtttcagattaaaagtgatttgttaaatcaaagctccaacccgatccaactaaatggaatctttttgacatacctacattcaatggaccaatctaccatcgaagccacttgagaaaactttaacactatttaggagtaatacgctcacttttaccttaagaactaggtgagagattgggcaaggtatattgatagatctaccatcacttatgtttatgcgagaaaggttaagggtgagaagagtgtcagttcaacaacaaatgaggtcataatagatagttgagctgacactcattaatgtaataattaatctaagcagtagtttagttgagtcaagtgtggagaatttgttggttgtaaactgctggagagaattcaaactctcaaattcctgaaaaacatcaatacaatatccatttatccatgtatctattacttgcagctcatccctaacaaatttctttcatatacaatgttcactattctgcttcctcgatccatttgcgagcagttggattggattcccttcttagacggattcactagaaaagagatgcttcaaaaactaaatttttaacacttgaagccagaccactttgatagctcaaacttactaagggattggataatttttgccgatatgaatttggcatttgtcatgaagttagactagaactttgtctgaggaaaataagtctatgttacaaaatgctctaataaaagtcttgtcgaaatagaaatttttggtaatttggtgtcaggagcaatgcttctgtagtggccaaggagatctgggctactagaggtttgatgaatttggtagtttgtgaataacacttactatctgatgtccttctcacttgagattcttgtggatcctagaagtcacaaatgaggatattgatagtgttgaagtggagtaatgtatttcctgctaaagaaggcttctttggaaagttaatttttgttgagaatggttaaagtccaggtgatgattgaaggtttgagttgtagggcactcttcatgagagagaaatatatatatatatatatatggaagaggtttcaatggttacatttttattgtaaccattatggttacattttttttaagccattggattactattaaatggttgtgattaatttggaaattagataaaaataaattataaataacttgtaacctgaaagtaacctaat

SEQ ID NO: 380740 - DNA, 2890 bp, Cannabis indica
attatgaagtgaatcatataaaagcaaagagaaaaaaacaaagatcagtttatgtgttcatatgtatactagattgtaagttacgtgcagtgcatgcacgtatgttagtcttttttgtttaataaataatgaataaaaaaaaattaataaaaaatattaatgcatcaaaaatcaaaatgtttttcagataatattttatatttatatcttatatattatatgggctataatacaatacaaaattaacctcactcaaacatgccaagtctttgaactaaagtagacaaaaccaaaataaaaatgcacaccatggtgattggtataaacacaaattaacgttttaaaatatatatatatatatataaagtgtttctaaaaatataatattaattgataagttacgccaagaacataatatatatatatataataaaaaatttaaaaatttaaaacagaattaatataagcacaaagaccataaataataaattaagtttgcacataaaatatgttatcttgcattctcgtgctagatgaggttacaaatacatttgagatagattataagaaaagaaaataactaaagtagtaatttacttcaatcatgaaacctttatcttggccaataaaatacatatatatatatatatatctatatatttggaatataaaatacatatatatatatatatatatatatatatttgatatccttcaattttggtgagagactgcatcctgaacaagaaaataatttttgttaattaaggaaatcatgctaaacttgaatactttgcaagctaagggaaggtggcccatgccaaatttacaaattttgcaatctcttgtagtacatggagaataaaaatctttgaagggtgaaattatagataaatcaagacttgtagttaattattcaattgacatcaaaaactgaaatctctacatctgaatcttcacctttggaaatagatagttgctcgcataatgaagattataaaacaatattcattaaccaagttgattaaaaaggggtacagcaggcatcacaataattgtgctaaataaatggcatgtattggactcttgtgttacatctaatatgataaataaataaataaacaacaatacatttaaaatcatacatcatacatcataaggcaccaacaataaaatattaaaaaatggttagatttcccctatcaatatttgtgaggccatagcacaaaatttgttctaacagccaaattgattttaatgaatactatcatagactaatgttcaaatcaacacatctttcattgttttaaaatacatgtttagaaccaccatatgaatgtcatatagctagacctattgtagctagaaccaccatatggatgccattggttactaagtgatcaaatactaaattaaaatagctagaactactgtagtttccctaaagtatataaagtatatatgttactatgataacacataattgaaacatttatgaaatcagagaatattcataaaaaaaaaaatcagagaactttaaaagtaaagaggatacctcaccaccattgatgcctgcttcagaacatggtcttaaagtaatttcatgctcaagataaggtgtccaacggccggtaagtaaatcacttctaatcatctcaacacctacttgataatagtattgtttaaataattattgcacccaaactcatcaaattcatggcaagaatttttatggaaaaagagaagagtaaaccagaagaaatagtgaacattaggttcttttaattacatgtttagaatgatagggagaaaaaatagtttataaaccaattatacctcaagcacaattcttaagaaagaccattcaacaaaatacagctcacattgacatgtttcatacataccaattatacagtcaaatgctactataatatcaggtgtatatgtatagctttttaaaatttgaagaaagctctttagtatcagatgcattaccagacacaaccaaccaaaagataaaaattcatctttcaactttgagcatgctggctgcaaaatagaaaaagaaacaaggtataattttgacatgcaatcttaaaaaaatacatatgtgatataaaataaatgttgtaaaaaaaacctaatgattccttataataaatgtaaaaaaaactaatgattcattataataaatgtaacttactatttgtatctaatttgatccctgtattaatgaggaactcctaataaaggtcacacacccgatgacactgcaaactgaagcaatatggtatgtaagaaaattaagctaattttcccactgaagtttaaaatagctagcttcacatcttcctcaatcccattttagagaataatcttctgctatctgtatcacattttaagagagacgtgtcaaaaataatcaccaattaagaggataaaaatactctgtattaaggcatagcacataaaacttaacttgccaaacaattgaccaataatgatggccagcaaccatgacatacttttcacgttgtaatactgcaaactaatcattatatagtgattttcctaatgacttcacttatgcttactattatagactatattagtaattacttttataataaagaaatattggtttaggatattataatgaatatctgttgattatctatcaacttcttctttcaaaaatttagtatagagcatcttcacaaatatttattgtcaatatggacacaatataattggttgctagtaataaactctaaaaaattaaatttattgacaaactcacctccataatctgtgttggaaatgtcaagatatgaatccggtaaaacccaaagaacaccaggttgtgctatccaaccaaaataacagatca

SEQ ID NO: 380741 - DNA, 3774 bp, Cannabis indica
ctttaacttgggaaagttttgtaatagagaagagactttggactaaagagtacaattttttttttcactctagcaaaaatcccaatctgggtatgttccaaaaccacaacattcgctaaagacactacctttctcgtaaaagagcaaaatacccattcatacagtgctcagagaactgccccttacaccctcttcatcatcatcatccttattccatactgttgctgagctttgtgttttatctgtgtggactcttaacttaagcttcatctttactcagaagagcgaagcaagcttcttgaaaagtataaacagtgagtgatttagtttaaagggtctctttctgattgaccaaagaaagtgggtttttgattggtggtgggattttgagacatggctttctccccactcttctgctgtggaaagggtttagatcggtgagatattcttttgtttattttcaaagctgagaaaattgttatttgggttttgattgttttctgttttatattattattttcacacatatattaattgtaaaatctgggttcagaaattgatttttttctggtcatgggtttttttgctaaagaaaatctctggactgacccatgagaattgattgatttgttttttatttggttattcaacaaagtttagttatttatgtgatgattgaagctagagttttaggtggtttaacagtatagattttgctgttttgattttggacacttagaaatgggaaataaaatagaataataaacgttttgaaagatacacatcattgaattgagtttgttttgatttcaatgtcattcattatttttgtgaacttggtcttcaagttcttacatttctttttatcattctataacggccacttcttctttactccaattgtatcaacaaaaggaaagggtagagttttaagtgatgttgattgtctttacatttttgtattactttatatatttatgcttgttttgatggaaagttttatgtacagtaatgaacgaaagaagaagcaaccaacatggagagtcttttccttaaaggaactacatgctgctacaaacaatttcaattatgacaacaaattgggagaaggtggatttggcagtgtttactggggtcagctttgggatggatcacaagtaatgataaactcatatttcagtttatacgttcattcataattctagtccatttattatacatcaactttactgaatcagttggtataattcttgttttagttttaacttttatcttcttttggcttttaaaaaaccacttgatattctcggactgtttaaaaatggcgtgttcggtcagttatcttaaaccgaacatgttatacattttaattatattgctagtttatgattaaatgtgctcaagaaactagtagttgggttatagaagcaactagttttattagataatacatatcttaactttgatacttttatgatacatatggtgtagcatccaagtagcgctaaggatagtttttttttcttttcgaaactaggtccctcgcctaactcttcaatatttgagatccagaaaactaggtgaattgctatgtgtatgtgccaatgaaagaatcgatcttagaccttgtgggagtgaacctcgtgcttaaccatttcaagacaagagaataaatgaaaagttggtattagagtttcgaagtatattgtttgttattaaaattggaagtaaaggcagcagagtacaagccaacaaggataatgtaaaatttggaaataaaaaactaggtagttaatttcagggaatgattgaacaagaagaaagataatttattgagtattgatgaaaagaaaacatctgattatatcatgttggtgttcctaataacagtactagctgtcagcagttgccttaccttcttttcttgttctttgacagcctgtatttggtttgtgttttatttggattatagagaattctaactagatttggtgcaaacagattgcagtgaaaaggttgaaagtgtggagtaacaaagcagacatggaattcgctgttgaggttgagatcctggcacgagttcggcacaagaatttgctgagtttaagaggatattgtgcagaaggacaagagcgtttaattatatatgactacatgcccaatttgagcttactttctcatcttcatggacaacactcagctgaatgcctacttgattggaaccgaaggataaatatcgcaattgggtctgcagagggaattgcgtaagtactcaactcacattttttagattatgctgcattacttttagtaccggtattaacgtcttagttaattttttcagctatcttcaccaccactctactccacatataatacaccgagatgtcaaagctagtaatgttctgctagactcgaacttcgttgcccaagttgctgattttggattcgcaaagctaatcccagatggtgcaactcatgtcaccacaagagttaagggtacccttggctaccttgcaccagagtatgctatgttaggaaaggcatcagagagttgtgatgtatacagctttggcattcttcttttagagcttgctagtggcaagaagcccattgagaaagtgaacgtaacacaaaagagaacgattgttgattgggcgctgccaatcgcttgcgaggggaaattcaccgagttagtggatccaaagctgaatggaaagtacgtggaagatgagctgaaaagggtcatcttagttgcactactttgcgcacatactcagcccgagagaagacctactatgcttgaggtgttggagttactaaagggagaatcgaaagagaaaatagctaaactagaaaatgatgaacttttcaagaaccccattcctgcagataaaaaagaaagctccactggaactgcggaagagacctcggatgcaattgtggaggaaaagagggttaaagatgaattgaaagtggaaactgagcctgcaattgttgaacaaatttgatgaaaaacatttaggtgcataatttggatatttgatgttttgcttttttggctttttttcattggggttaggtggcaaggctttactgggattttacatggtagttgctcttgcttttgggaagcatttttagtggaaaaaaaaaaggagtgctgtgaatttgtgtttgtgtgcttgttctttcatttttcttatttgttccatcctgaatatatatatgaatgaaatgaattgaactgtattattatttcctgtataatttgtcaaaggaagctgaaatcacttaacacaaacatacaatgttattttctagtcgagttgtttaatttgaatatagtcttgttttgttgtgtcggtgccgttaagaactttatgaggtctgagcttttaatttatagtagtttaaaggaaatgaatgaatattttgttaccaaaaaaaaaatcagaacaatatttgtagaggaccacagtggtagggtatgacaataataaaattaataatcaatctgatacggtctaaacaataaactaaataggtcagtttagctttaacttgaaactgtataattggtatatgtcggcggtgcggttaaaaaaaatgtaaaaatccagttctttacagaaagattaataaaacttaggctaattagtaatttttctcgctgaactttgacatgtagtaaattgtgcccctgaacttttttggccgttaaaaattccactcgaactattgagattgttaaatttaaggacttttgtctaa

SEQ ID NO: 380742 - DNA, 2274 bp, Cannabis indica
caaaaataaaacatcactacaacattataaaagttcaagttgttcgtaaagttttgttatatgacatagtagaaataatattggttcttcagcggccagtaagtggtacatttaaaacagagataatatatctccttggtcaccttactttcctataagaaactagtttatttttcaaaaggaaacctaaactttgtattaataatgaaattagtacaaacaattataggcgagagcctaataataataataaaacatcaaaacaaatactgatttacaaaaatactgtcattctccacataaagcggagaaaaggcaaatttaaattctataactccttcacaatataatagccaaatggccacccaatgcctaactttttcccatagacactctgctccttcagataatcttttatttctttcataccatatagcctacaaactaactaccacccttgttctccatagcactttgttgctttattccctggagcacaatggatgagaagaccaatccactgaaaaccaaattcatttaagaatttataccatactctcattgtgaaagaacaatgcataaagagatgactaacatctttcccatttttcttgcacatcatgcaccagcctggtgaaagcgagtcgttaggtttcctccattgcaacatctcatgcacaaccaagcaaaaaagtgaaccttagaaggcaagggacttttccaaaccttttgcgttcaaggatacaaactataagagacatatccttaaaacatactgaatgctgatttccaaacacacttttgatgagtcaccaagctagatacttcatcctccaccgcgtgacccaatatctggttctgcagcctataaataactgaatacactcagttacctctctatcattaaaatttctgatcaaatgaagattccaataaccttaccagccctctgtagagatgcaaaaaatgtaactattcttcttctctgacaaactaaccgaatttagaaaaacatctttgagagctatcaccacaccaagcaccttcccaaactaatatatgctttccattacctactttaaagttaaccagctgccaaaactcctacaaataggtgcttcctttccaaggacatttagttgacaatctatctcccaagttgacaatttatgcttgcttttttaaaaccttaagacacaaagctttccttactagacttcatccagctttaaaaatacgggcttgaggtatggggaaggagagtgattgcattgcagcttgctatttataggtcagagataaggagcttaaatttctatcaaaactttgggaaaagtgaatacaatttcaaaatattattcagcaagttatacagtttaataaaaatgatttaattatgtaatttaatgtatgactaaatttcagcaaactaaacaactttcctgagttcactctacaaaatacacacctgtaatggcaccagagtgataataaccagctgagatccgaacaatttcctttggaagtccagaaacctctaatggctcctgcaacagaacattaccaagatacgagaccattataattttcataagaaacataactggtttgaaaaatgacaaacacaattttttgtacacaacatgtcaacaccaaataactaaattacaataagaagctacaaattacaaacccataaatttcaaccacggattgattattacaaaatatttatggatgctttggaatatttatatttaactaaagacgtgtatgtctttttccttttcttttttacaatgtactgagtaaactatatactttgttggatgttctagaaattcatgaaatttctcaaacaatttaaatttctggcataaggtaaaatatctagagtaattgtctaagaattcgacgatatactcatatccatccctggattgcacatccatatgctgtatgcattaattaaacatgattttagggattttagaaattagcatttccttctgttttgtttcctaccagtccattaatttgtacattctttcttaatctaatagattgaaaagattattcagcattatccaaaaaaaaaaaaagattattcagcatatattttatttactgcttgtagatagagattttttgttgtcgctgaatggttcttcccttcagccttcatatttgttagatattagtttgtatattagctgtaagagaattagatatttagtagatatttagtctcctagctttgtatataaatatgta

SEQ ID NO: 380743 - DNA, 2101 bp, Cannabis indica
atatatagatttgaattgttgcctaaaatatatcctaaatcatcgtggcatatttacactacaataaatgatccagctcatcaccagtaataataatccatgtcatcttaaaaaatataatttcagtacggactatccccagaagctttataaacacacaagtcttccggatacgtacatggcttccttctgaatggaccttcacgactgacgttaagctgtccgggagtgtacctctggattaataacaagatattcatgagagacaatccatacacggtacaagcttatttggaagtacctttcgaattctacaagaccttctgcacaaggctttctagatccacactaagcttccgatattttctttctggattcataacttccacttccggatgacaaaacttgtacccacaaccaacatatgataatttattgtaaaagaatatctaaagctaattctggatttgagaaaatggcgactcagataagggcttagagttctaggcacatttcatatgttgttagagttgtattagtcaactatgtattgttgtctattaactcttataggtttgagattttgattcttcctaaaaatgttgttgagagaatatttttagcttttagagcctatctttggcaaggaaaagcaagttttagtggtctaagaaatgttgcttggacaaatacactacaacaattaggagcattagaagcgacttattttggttttgtcgcttttaaaagtataggtattaggggcgacaaacgtatgtgtgtcgtctctaaagtatttttttttttttaattatgatcgagctttaaaagttttaacagcgacaaataacttgtttgtcgcccctattaaattagaaaatgtctcttagaaaagccgaaatttttccctctgcaaattatgtatcgcccctaatagtctgaccgagctaactggcagagttttagaggcgacattgtcgcccctaataaattgaaaaacaaccgttaaagaaggcaagatttatcctacttgtaattattaggggcaacacatgttgcccttaagagtttgtagtttgactttcaaattaaaaaattaatactaagcttgatgtaattcttcattcaatccaattaataaaatttcacagaagttctttcttcttttttctctatgttacgattctcaagtagaagaaacaagtcctaacactttaagtgttaactaatagcattaaaaggttgtgtgtaataaagttttgttcattcaaaatggaaaataaagtttacacgattggaattaggaggaagatttatgcaaaagcttaattgtaagtaacatatttagtgtttgctagttctgctttgtaattagtgtaattgattgtgattcacacacacaaaaataataataaggataattgtcaattttaacttattattatttttctttgatttgaaaattcaaattttattacatattaacttctactattaaacaagctaaggaagtcagtttggaacacacgaataaaagttctaataaagttataagtgattatattaactgattgtttaacaaaattaaccaaatactttttcaaagaaaaaccaagtaaactttaaaaatctttaatcacatgaccaacaagagaaatcattgagaagtttctcctcaaagcttgaagatttattattattattattattattatgaaaaaaaaatactgaggttgccatagtgattatttatcttaaacaaaattatattgtgaaattgactttgactatgtacataaaacaataataagttcaacaactattattattaaatataatttttatcttaatctttccttttataataataaattttgttgtgtttagtgtcactagtgactaactcaattgtttgcatgtgaaacgattcaaattatttgatatgttattattatagtgcaatccaaggtcgttaattatatgccatcaataacttttcttttcataatgaacattatttttggacacctaaaggctttagcaccatttaagatagcgctcaattaataatattctttaaaaattattatatctgagattt

SEQ ID NO: 380744 - DNA, 2798 bp, Cannabis indica
aaattttatcgtaccaagctctatcatcatcgaccagtaaactttcttttcattaaagacaagggccataaacacacgacaacaaccagggatgatggtcaggatccgagtacacaataccagaaatatgatttttcgagatacccacagtttcaaaagtaaacccggccttccaagctagaataaggccacctgcaccgccaatcgcaggaacaataatattaaaataaaaatgcaagcttttcagagaacgtaccaaatgagtgtgatcgctcttgagctcggaaatgaaaatgaagtcaggcgagcatgaccgaaccagggctttaacttccagaactgtaaaggtctgccccaaccctctatagttccaagctatacctctcatggctcatgtggaggagggctgtccgcctcctccacaagggtaacaatgtcaacattagtacccacagcagagcctatatcatctatgaggacatgattcttcaaagggatagcaatatccgccagtcttgccctagccttccaggccgtgagtctcttggattggccagcagagactggtttgtcaacgtgttgagaacaaccggcagataacttgttggggagctcccctcatctaaagacggctcatctgaatcacctgatccatcatgctccccggacacaaccgggtcaatgccccgtggcccaacaccgcgagggaaatccctaaccacacatttgaatcttctcatattccatgaaggcataatttttagcgagtgagtatcaacatccacacgcctcttcttaaccagggtggttctttcattagttatcgaagtagctgaaacaccaatatcacaatggccaatttttctcttacttggtccttgtgaagcaaacacagccagttcttgaagataaccttcttgcgcttgaaaaaatttggcaagagaccttctctcatcaagatgatcagattgatcttggccctacgtagatagccttaacccaccatcaccatctaaaatagtctctatattgccttgtctcgactccatgccacacggcccacttcctccaataatgctattatttttagacaaagtctgaatattattaattataagcccaagcctttgcctactaaagtcaccacaagtcttagaaataggcccattatctttactcttttgcttaccactttttggcccattattctcccaagacaattggcccaccatcctagtcaaagaaatggggttgcccaagctattagttcccacaaacccacgaataccaacattatcatcattctcattgcaatttaaaataccctttgaaatgggtaaattagcagcttccttttcaatacccagttgggtagaaagtgaaggtacacccaaaatggcattgtttcccttcgtcgtagcaaaagacttcgggtgccacgccctccgtacctgggcgccacccctacccctcgaaggccgtccccgcatagatctcgatgacgaacaacgcgacgacagagcagcgatggcaggcggttcactcacagccaactccggcaccaaatcctattcttcctcgacctattctaatctgataccttcagctccatcatcattctcttcaaacataccaggtgggactctaactttcccagaaaaacagttagcatattgtgaatgggtattcatccacgatccgaataaaggaaacggagtacccctttcgttcagcactgtgaccagagaaacgagtttacagtccctccgttgatgacccaacataccacacatgtaacaaaaattccccaacttctcatatttgagttgagtccattgattatcaccattggagagtttgaagaaacaaccacaacacagaggcttgctaacatccacctccaccagtacccgaatccatctcttccaggtgactggcttggcttcatcgagttcaataaactccactttacccgcaagagcccccaacaagttagcattgactcttgagaaatagtcatggggtagagagtgaatttgtacccaaaaacggactgagttgaaagcgaaaaccttgacaccaaaaccagaagaccacgagaggagcaccaacatatcacctttgacgcaccatggtccgtgctccaatatcgtttgctaactgagccattctcaaacagaaaacgaaatgagttggaaccagccagagtacattctataggctccactttaatacgagttttccataaattggagcaagtttgctccacatccttagcattgaatgttttggaggagagtattttaccaaagaggtaaagttttgagagcaccttagtagtcacaacactaggggcaagtgaaatagatacctcatttaaggagaggcatctaccttgcttcccaccagtagcaccaccaacctcatccattgtcataaatacaacctcaaaccaaaaaaacagagacaaaagatccacacaaacaagcagttgaccagaccaaggagcaaccgaaaaaaccagaaaaagacgagacaccacaaagcagcaagacaccacaaaacagcaagaccccacagatgaaccaaaacaaaccccacaaaccaccacaaagagggacaaaccagacagaaagggcacacaaaagtcaaaaggaaagagaaaaaaaagcaaagtttggacacaccaaggtcaactaaagcaagaaaagaataaaaagaaagacacagagagagaatagtagaagactcattgtcttcattagtatatatgttataatgttaaaattttaataaga

SEQ ID NO: 380745 - DNA, 4928 bp, Cannabis indica
ctctctctctctctctctctctctctctctctctctctctctctctctctctctttaactctgtgttttttctctgcacgaaacctcagaattacccaccgttttctgtcaatttcgctctgaaattcccagaaccttactcggcaatgcgtgatctttcacccaaaagcaattttgagctctgatacccaagctttcattgaatattgaattcgcttaaatagaaaaaattaattttttttttatttgggttcggaaatgcttgaagctgtggagagttctgtcaatggcggtttctcgcagttgcagagctgtggtgatagcagcgaggaagagctctctgtactccctcgtcataccaaagtggtagtgacggggaataacaggactaagtccgttcttgtgggtctacaaggtgtggtcaagaaggctgtaggtttaggcggatggcattggctggtaattttcgatgtcttttcagattattgggaagattaataatgggtgttgtggataatctaggattgaattttaaacttttattgcagttatgcttattttattttaaacatgatatgcttctgaagcttttttgaatctgagttatttcaaacaatgtggttaaatttcgctgttttcttactcaataatattctacgtctaattaatttatcaaaagattgggattttgttatcttttctgcctcattttatgtttcttatgatgaaactgagttcaatttttgagttttataaatggtaattttgattgcatgtttaaattatcgatggatctgttaaattgattaaatctctttgtaatgtacgtttaaaatttgctttattagtattgtattttcaagaaatttagtctcttctccttagatttatttccttttagggtttgggggtattgttggcattttattggctaccaaaagttgaatttttattttacttttatattttttttttataatcgtcactgattattaattttgggtcgttgattcaacctggtcttcctactagttaaataaattagattttttttgtaatactattaaattggaatttgataaacaataattcttttaactttccagcaaaaaaaaattctattaacttttaattgtttgcatgcatgaattttctgcacttcagtctttggtttttttttttttttaatttttttaaacacaacagtttgaattggtctcaactctcaattcccgtgatattgcattatcctggaatctcatctagaaactttcttattttttttagtttgggtgaaatgactctcattcgatctggtggtttaggtactacatcttcttatcaaagaaaaatcccaaattgtattcttcaatttatttttattaacggaaggggttcaaatttttgcttaaattattttatttttaatcgagttgttgttgaacttctgtcgtaagtggggtttatgctttctagtttctttctttctttccctctgtttgttttttttttttaaataaaaaaagattcttgtaaagatgcctctgttagcagctaaccttcatttgactatacattttcatagcttttttaatattggaatttggaagccatattccattttactttcactttatcaactttaattctggaaaatttcttctgggttggatcaggtcacttcctgactcacgtatattatacttttactgtttaaagtttgatattggggtctgctataatatttaactttgcaggttcttactaatggcatagaagtaaagcttcaaaggaatgcccttagtgtcattgaagctcccactggtaacgaggaagatgatgattttgatttcgatagcattccctggcatggatcagatttgagtgagtcttgtactctacttgtaaaaagaaaaacctaaatatgtttcttaagataattgtttttctttactaagaattgtcttttttttcttaatgattgtggaatagataatttattttaatttgctgagctaagaaaaaaaaaaaagagagaaaatttgttttataatttggagatacaagattaagctattaactgggtggatatgtctggagttggtagttggactcctcttttttgtgttttaaacagtaatgaccccttgagataagttggtttggtgggcacattggatccgttgtgcctttagtgtttacctttaacttttactaaccatctctaaacctaaacttagttgtcttactcttattactgctttatcttctttttcggcgccatacttttcttatcatgttttcttttgccttcactccatctatttacagcatccgatgacactcaaaagtcccatagatcaagacatagagtgcataagtcatcagggtcatctcacaagactatgtgcagatctctgtcctgtgactctcaatcgaagggctctatcattacttctcgtgggcccatggtacctaacttcattagactagtcttgtttaccttttcttattttttttttctaaatatatatatttctcaagacaaattaccaatgccgtttgtctattgtgatttaagatacctcctgcacagaaagttgatctcagtaaactggaaatggctgctttgtggagatatttgcgacattttaatcttgtaagtgattttcttagagtgtatggttgaataaattcatatcttcttccctttatgttatgttgcactaactaaatggattgattatataggttgatgctattcccaacccatcaaaggagcaactagtagatgttgtgcagaggcatttcatgtcacaggtacccattccggtcttcatcatttcacataaaaaaattgttaatttgtgctgaatctactgatgttttgaaaacatggttgtagcaaatcgacgagttgcaggtgattgtggggtttgttcaggctgcaaaacgactgaagacagtttgcaaatgaggtttgaagagagagggagagagagaatatcggagtttggttgccgatgctaacaaatacttgatccaaatggccagtcccctgtagtaatatctgtaacatatctatccaggcttgtttatgtttatggtgtcgattagtagattggcattagttaactccttttgaaatatagaggatcttactttttggtagtgtagttatgtagatatttgtaaacttgtgaccaaaacagacttctaagaacctgtgcttcttcctaaagcttggttttaatgtattgctgacatggggaagtaggctttttccaaaaaaaaaaaaacatgtatatatcctttagttatcagcttatcatctttgccaaactttagcaaaccttcttgttaaattatagtacactagccccaaacaacttagaattaatcatttttgtttttctcttctttattttaacttttttatttttttacgtgctcgagtcccagatagatttaattttatttataaaattatcttgtcatcttcttcctcagctccaaataaatataactatttggtaggagctttgtggaacttaataaatttcgctttttcttaactttcaacaatattccctccataatttttcatattcatctcttctctttctttcatctttccatcagccaagccaaaacactactaacaaaatgacattattgtgaaaaaaaatatagaaaattatccgttattcttcaacataagaaagagctttaacattaaccttctctaatgattttatgtttaaactcaaaaataaaataaaatagtatgatagtaatattatttgtaaattaataaaataataatattaaaattaaattgtgatatataatatattattaagagaatatcatatatagtgtgcattacatattttgtaacatgtggtgtaataaacataaagttgtaatatttaaggagttacaatttgaaataggaatgcaacatatgaaccaaacttaaaagcatgtggaggaagttttcagttattagaaattgatgaaattaacaattatttcatatgtgaatgttggaattggagttgtccccttcaggagattcaaagctccagatttgagctgaagaaatgtttcaggcgacgtgtcgccttttattgggcaacatatcgcctaaatagtgcataacatggttttcgacgttaaacgtcatatttcaaagggttcaaaggtttttcttcaagcaacatgtcactttgagttatttttgagataaacgttgcaaaacgttgtacattcaatggcggacatttcctatttttttgctaacgtttttctactcctcaaatccatcttagacgactggtaattcatgtcatttggtgcatgagatttgatttcaaagtttggctcttcctacaatataaatacaaggctaaggttcactcatttgagacttgtttattccaataagcattttcatgaatctctaagtatttgatagtatgggaaagtaaatttttttggataaaggtatagaaatcttgttcaagttttttgatgataccccttcaatcattttgtgttctccttcatcttattctgtacactatgataaatcaagtttttgtaaatgttaatgttgcccttcaatttgcccaaaataagtggaccaatgcgactgtgacacgtggatttgagaaatatggttctgagataatttgactaagtctttttggatcaagagtatcagtaagaagatacctcccggagaagatatgaggggtccacgtactcccggagaatagggctatagcaaagcacctccgggaggtaccagaccccatttgaacagtcaccttgcatttaatgccgcatgggagaaggcgtattgaaactgccataagcattaagtctgacggcgtaacccctcttctgcagctattacgcta

SEQ ID NO: 380746 - DNA, 5113 bp, Cannabis indica
aaaacaaaaacaaaattaaaatacataacgaaatcatagcagatctaaccaaattcgataagaaaaaaataaacataaaagatagataactccatggccctaagatcacaaaccaaaataaaaaagaaaggaaaaagatgtgataaaatagagcttactattcgggattcatggctgtgatgaaaaagaagaagaagagatcaaataaatgagtggaattgaggatggattgaattgaatattggcaccggagaaaattgagagagcgagatttgagatcttcaccggaaaaagaaagagaagaaataataataatgaaaataaaaagaggttgggttgatgaagatggtgcgtgtatttaaagcccacccccaaatcgtcgggaacgaaggggtgacttgctaactggttcgaccctttgccacgtgttttgtctctttctctatttaccattttacccttactgtcaaaaatgctaaattatttttcaaactgagttttctccgcaacatcatctatcattgtcaccttaccgaatcgcttataaacgcgtgagtctcactctctctctaaagctaatgttaaaaattctctcatttacacatattttttctttgaataatacactttcttttttcttatttattctcttatatgatatgatgatatctctaaagtatttttttttttaatggtatctctaaagtatttaatataattagtaagaataattatgtatatgtaatcaactctctctcgttattttctttcttgtaatttttcttttatttttcgtgtttgtaattttactgcccataatatcgctagatgagctttcgcccagaacttaacaggtgttatggattcatcctgcatacttatgtctatcttttgtaatgaccgcgaggtctaactttctatttatttaacgctttattttcaaaaaaaaaaataataatgaatgtgataataaatactatcgatatttgaaactgttatactaaattagtttatgagagcatagatcgttgttatagttttttttactaagtatataaaataaaataaacacgagtatattacactagtttaaattttgttttggcacaagaaattattttaaatttttctagaatattttaaattactataaagtattaaattataactatttagatgatatcaaagtagcaaagaaatgtattgatatatctatttttagaagttagattatagaatttttcatatacatacaatttatttcaaaagtagtggtataaattaactattttttgtaattctagcattaatcgttaagtaattaataatttttccaacattattgtaggttggctaatagtgttgcacattctatagttcaatggcctaaagagccggcactgaccctcctgtgcttagagttcgtacttaaaagtgccctaattttttagaaaaataccatttttttcatttttcatacaaaacgcccatttgtatttggcccacaaaattaccataaattaaatatttcaatcaaactcttttttgtctcaaaaagttttttcttttttttctttttttttcttttacagcccatataatataaaaataaaataatgttctattaaaataaaaatattaagtatagaagttaaattttttttaatacaatccattcataggtaatatcattaagaataaaatgagataaacttaaaaatacgaatgaactaccctaaaattattacaagttaaaaagctggataataattaaactcttatataatattatttttttaatttttatataatttaaattattggaaaatacaaagccaaaactaaattaatttaattttagatttttgagtttaaaattcgggtgtctgttaatttttttttattgttgtacccttaaactgatccaataaaacaaatgaaaaagattttgtggtaggcaactgtgtcataatccattttggttttaataattactataccttattagtggaagctactttaattaattttccacttgattgaaactacgaaaggcctaaaatctcccatttatttagaggattgctattaagcaccaatagtgcatagcattttttttgacatattgtgttgcgattggttagcgatactccctaaaagttattacaatatattaaattatatgggacccaatatttagttagaccaataacgatattgatacaagtgttaggcacacactaatgccctttatcatttgtcatttatttaatatatatgtaaagttaatgattgattgattcatattgtaaccaatagtcatagttttaaagaaactcattactttaaaactcgtctatttagtcgaaaatacttctttcatgtgcaaacaactttctagatacccacttttttattatgagtaatttgtttgtttgttttctccttcttttaattacctttaaagaaattgattaatgctactagtgcttggtttgttgtgttattggaagaatttagacaatatcaaaatttgtgtgagtatttaatactattaaataatttggataaaacgttcgagtactcatttagagtagcgagtattcaacaagctactaacaaactggacaaaaattagaaataataagaacacagaaagtatagtagttcggtcagatctcagtctgcttaattcactgttgccaagatttcagcttagtctatttgatttggatcactcctttacatagaaaacaagtgtccttttagttttacataactggtatgttttagaatcgtttcacaataaatgacaacattaaatcaagataaatgttaaagaataaatttaatccgttctgtattaagtgtagcaacgtatgcgacttgacaagtacgagttgcctattcataccctcgcacaagctcgtagctttaggtgtgctttgcatttgctaaatggctaatgggcctattgtttggatgtctgcatttctaatatatcgcatagacggacatctcacgtgttgataatgtgggacatgcaagtccttgacgagtcatcgaatacgattagtcattaggaccaacctttatgtaaaaaagcgatcttcactagtcgtaggaggggactacctagtcatcacatatatttcgttatacacacgacttgtattaaatcctttcggtcctatatttgtctttgattgtgcaaggcatagtatgcgactagaccatgtcaatgtcacatcatcttgtgagtttagatcaagcgagactaactctttgagagtcgttaattaacaggtcgtcctttcctcggggattggatccacatgtcaattttataggagactgctctcgagtttctagacaaaaaattcgcactataacacatgcccctagaatttcgcgattgacaactgtcatatagggaaactatatattaaagagaagcaagcgagttattgtcacaagatggtgacctttgattgtcttgtcgagggtttcaaaaaatggttgtaataatttttttattttcccaagatgccacgtcatcaaaaccctttggggtatctgtaggcatgctcgttggattgaaagacctttggtatacttctgccacgtgtctgtatcccaataaataaggaatgttgtatttaacctcaaatacaaatcgatcccacttcattttcctcccattcctcaatttctcattctttcttctctgagaatttttcaaacttcagaaactctccaaagttttgaattttcaattttcaaagacaaattctcaaaggttgaagaacctttcaaagtgattatcgaacccaggaaaaagaatcctcgtatagaaggttagtatttccttcccattgcgtctgtaaatttatttttctgaatgtccgcatgccttctgagattttagggacaaaaattgcataggatcaatagggcttattaagataatcaaaatttaggacaaaacaagacaaagtacagaattttctctggaaaatttttacctgaaacttgaatactcacatgtttaataatgaactttgaatatttgcatctttatagcagaaccctcttacattctcgcatatttaggttcatttgtcttcaagtcaaaaattggcagtggttgagtgtttcgtaaaaatttaatggttatttcttttggtgacccttaggtcattgtgaaacactcaaccactctgtgccatcttttatggctagaggaaacactacgggccatctttcactctcatgtactacatcaaagcacctcttccaccaatgatcccgatttcaatgcatgcacaagctttttgcccaaaacaaccgagtcttcgagtgcaacactagctccttgtcctatattgggagtgattggatgccaagcgtcacctaccaccacaactcttccagaataagccaatgggttaagcccaagccacaaccatatctgtcagtcatgggtgctctgatgattgtgtcatctagagtatgatctataatgtgtagaagtatctcggcttgaggccaccctgcacttgctctctcgcttgctttctcaattcctccgggtcagtgattttaggacctaatgcgaaaaatatttttggtacaacattatacaccatcatgttaccgaaaagatatatatataggtacgtacctggagagtggagagtaaaggtcatattccagtatactttagaagaagagataggatactatacaccatttccattaatgttggtgattgtgggtggatatggctgaccattaggaaagtatgcaagcccacgaatactacaatacccaacatatttaggctcaccgaaccccatccactcagctatagcagatccaatcccttcacaatcaattacaacctgcgccatatccatataataaaacgatcataataacataatattaatttgttttatgctttcattaatttgctattatatatatgtatatatattatatatagtgttggaaattattgttctaaccaacaaacttaaagaaacaattaatacaatagttgcaaattggtatttttgaaaaataacaattcaaacctttgttgcagccc

SEQ ID NO: 380747 - DNA, 3240 bp, Cannabis indica
aaaaaaagtatcaaacacacttctcagaagtttagattgaacaattaatttctagggagcaagaaccttatttaattatataaccattaaggaatagaatacaagaagtactgctctaacacaactgtaacaataaggtacactaatttgcttgttcttgctccttaaaaaattagtatacatagtggttagtttcctaattttatctacttaggacaaaattattcaactatattaacaaactgcttttgaacctttaatctattgtgattaacttttatttatctaacaaggcaggaaaactctacatcatacattgctagcaaaagtagggtcttcttcatcttctacatctaaaacattctcacgctttgagttcttcaaaagcggagcagcatcatattcggttgcggcgaacttttcgccataacccatcacaggacgactacattggagcaagagttgtacaacttctttcatggaaggcctcctcataggcagagttgccgtacatatgatccccacattgaatacccaacacatttctttcaagtgagaatcctttacttttgggtccaaagcatcctcaatcggcttgtcttcttggatgtgacgccaagcccagtcagagagagagctatgctcgtctccaccgccgtcacccgcttctctccctgttgccaactctaagagaaccacaccgaaactataaacatcgatcttttcattgattcttactgtatgagcatactctgcaagtttgcaattaaatgtaatataagatgttatgacatagggttagggaagaacaaatgtaggttagttaattaaattcacctggagccatgtagccaaaagaaccagccactgtagacattgtggcaagctctccttgcctgaccaacaacttggcgaggccaaagtctgcgattttcgggttgaactctgagtctagcaagatgttgcttgatttaatgtctctatggataactggtggcacacaatcatggtgcatataacagaggccttgtgcagctccaattgctatatgtagcctcttgggccaatctaggaagatatcatggaccaaaccggagggtgaagtattgatgtgctgattgtttttgccatgtagccaacggtctaagctccgattatccatgtactcatagactaagagttttgaactctcacttgagatgcagcacatgagtttcactatgttggaatgtctaattaagctcaatatctccacttccgcaaggaattctttctcaagcttgtggtctacattcatgttgttgctccatagtttttttacggcgacaacattgccttcacgattcacagggacacggtagactttaccagagcctccacttccaataagattatggttcttcagtcctgacacgatctttgattctgtgaaagataatctctggaatgaggttagcttccattttgattcaagtccttttttgctcccatgacctctcattatgaagaatatgaaggacacaaataacaagaagaccactgcacctagtgctatgatcaacacaagataaggggttgaaagtttgtcacgttttctggattggaaactacaattcttaagttttaaatgcttggagcttgtacagagaccgggattgttcaagaagctgtcagcaaatgcaccgttctcatactcaggcgggattgttccaatgagattattggaagagagattgagatcagtgagcctcaattgaccgagtcgagatggaatttctccagaaagttggttttctgataggtataaatagttaagagtaggcaagaaacaaaggctttcaggaatttgtccagagaattggtttcgactaaaatcaagagtgctaagggacctccatgattgaatatgtgatggaagatcccccgtgagatggttttgatcaagcaaaagagttgtcaaaagttgaagattggtcaattcatttggaatcgatcctgtcaagctgttattactggccttaaaaaccaccaaatttttccaggaagatgaaccgattggaatgttacctgaaaacttattgtcattgatttccagccgagaaagattctcagccaacatctcaggaagcacaccagtgaactcattgttgccaatcattaagttactcaatctcaacgatgtccacagaccactaggaacattaccagaaaatttgttgttataaattttgactatgttcaaagagctgcaatttccgagtcctttgggtagttcgccaatgaaattgttgtcataagtcacgacatcggtcaatatacctccagaacaaagttgttctggtagttttccttcaagcttattggaagagacctcgaatgttctgaggcttgaatacttgcccaaatctggaggcaaaacgcctgacaaattgttcatgaaaagactgaaatccattaaacctggtagtttgcctaacccctctggaatatttcctgataattgattcatgaacaaagccaaacccgttaactcgtttagcttaacaaaatcttctggtatcctccctgttaacttgttctctgagatatcaattacagtcaatttcagagattcaatcacctgaggaatctccccagaaaaactgttcttgtgaagataaaccacacttaaattcttcaacttaaacaacccatctgggattttcccactcatgctattattagataaatccaaaaactccaatgctgtcaaatccccaatactttcaggtatttctccgatcaaattcgcattagtaataaacaaatttactaacttcttcaattgggtatagttagaagggagagttgacggcgaaagttttttattattggatagcgtcagtatttcaagattagacaattcacctaattctggcggtaaagagccattgaattggttggctcctagttcgagttttctcaattcttgaagctgtccgatgactgcggggatgttgccggagaagctattaccggcgagagaaagattccggagctgaatcattcggttgatgtcgcttggaatggttcccacgaagaaattgtcggagaggtctaaatattgaagctttgaacagttgaacagagattttggaaactccccaggaatgtagttgagcccaagattaatatctgtgaggtttttaaggtcacagacaaaagaaggaactggagtggtgatgtttgcatcataaagat

SEQ ID NO: 380748 - DNA, 2667 bp, Cannabis indica
aaaaaaaaaaaattaagtaagaataatataaatgtaaaaattagattgtgagggtataaatgtaaattttcggaaaagaagaaagttagtataggttacaagtgacagtacacaggttgtcacgatgtcacgagaccattgcataatgcatacaattacttgatttctataaatatatgcttccgtaattgtttggacacagtccataactgtgtgtctcactcccaagttcccaaattaaaactctgtcaactcaaccatgtccatggctcgatctgaaaccgcaaacaacctacatgttgctgtccttcctagcccaggtatgggccacatcatccccttattcaaccttgcaaatcgcctagccaccgaccatggctgccatgtcagttacctcaacattactgccgaagcctccgctgcacagacacagctcctaacttcacccaacctcccacccaaccttcacatcgtccacattcctccggctaaacaaccaacccacttacctcaagaagaacagagtactctggctttcaccagactctgccacatagtcgatgacaacctccgagagctaaaatccatactcctccatctcggaaaaccaaaagctctcatcattgatatcttttgtacccaagctttcgaggtttgtaaacagctttctattcccgtttacactttttatacagcttccgctgctctttttgctttctcgctttatctccctgttatggatcgtgagataattgattgcgagttcgttgatcttcccgagccgattcgggtcccgggttgttccccgattcgaacggaagatctcatcactcaagtaacgaacagaaaaatcgaagagtacaaatggtttttgtttcactctagccggcttcccatggcagctggaacattgttgaacacatggaatgaatttgaacccataacactcaaagccataaaagagaaccctttttatcaccaaatcccagcaccacccatttacccgatcgggccgttgatcaaagagactgaaccaattacgaaatccggtgctgagtgcctagcatggcttgacagccaaccaccagagtcggtcgtcttcgtggcgctaggcagcggtgggagccttacggaattgcagctgaccgaagtggcatggggactggagctaagtgggcaacggttcatttgggtgattcgagccccgagcgacgtggatcctacagcagcgtttttcaaggcgggtgatactgatagtgacgacccaagaacatttttaccagctgggttcgtggagaggactaagggagttggtcatttggtgtcatcttgggctccccaggctaaggtgcttggccaccggtcgactggtgcgttttggtcacattgcggttggaactcaacgctggagagtatgacttatggggttccgatgattgcgtggccactttacgcggagcagaggatgaatgcgtcggttctagtggaggacataggtgtggctgttaagccagctgtggatcctggaatgggagaggtggttacgagagaagagattaagagggttgtgagtaagataattgaaagtgaagaagggaaagccatgaggcgtaaagctagagagctgagtcaaagtgctgccaaagcattgaacagcagcggaaatggatcttcttatgagtcacttgtccgtctagtccacaaatggaaagcaaatcaggtttaattatgttacaaaaaagttaattattacgtactgttgttttttaagttgtctaccgttataagtagattattaaaggtccctatataggatagctccattacatgcaatcaaataataaaatcgagctatttcttaattcaggatgttagatttaggctaattaacattttttttttgtttttaactttaatatgtaataaattttactttatgaaattttaacatcgttaaaaatctcttataaatcattgagattgttggatttaaagacttttgtttaattttagtaaggaaattttaacatgaattcaagggacataatttgatatatgttaaagttcaataaacataatttggtagatattaaagtctagagagcatgatttagtacattgacaatctccgaattagtaaaattcaataagattggacaaaaattcttaaatctaacaatttaatagttcatgaagaaattttaacggccaaaaaattcagaaagcataatttggtatataatgaagttcaggaagcaaaaatcataattagcctaaattttataattgagttttagtgtcttttttatcaaaataataataataataataataatatagtaattgcaatttatatgctttctcggtcgaatctcagtcttcaacgcaatttgtctcctatataggaatattattttgaggtggcgctttataaataattattgatttttttataatttttattaaaataaattaaatgaaattcgatattaaattgcaccaataattatattacaccttataatagtactagtcctcatgggtatcctttaatcagggctggccctaggcataggcgggctaggcccgtgcttagcccatactttctgagggcccaaaataaaaaaataaaaaaaattattaggcttttatttaagtaaaatttaa

SEQ ID NO: 380749 - DNA, 2554 bp, Cannabis indica
actggacagattgtcaatgttgaactcttcgttggaaaatattagtttaaacttcagaaataggagtaacaatagggtccgtgaaattaaaaatttggaaatttgctagtaagagtactaaaattttccattaaaaagaacaaaaaaaatccaaatttctaacatttttccgaaactagaagaatctgaatataatagtgcctgtaccaataagaataagattattacagattctacgataaaaaaaatcaagattgtcgagcaatataataagtgacacgatttgctaaaacttttacaaaacgcaaagagatatgcctcatagatgacaaaagctatttacagtcctagctgaaagtagaacacatctccaagcaactttgaatggcttgaattgtgatcttactatctgtttctacctccatcagttgccatagtttatacttgatccagcttaaaatttccttaacccgaaaggcctcaacagtaactacatccatgcggtcatacttacaacagcaactagcttccaccaacatatcaaatcatcacgagctacaataccaatctcatatttgctttcagtttcaaaaatatcagcatcgatgttaactttatatacattagtattaggtttagaccaaaactcaacaccattgccattttattgaaggtcacatgatagtaatttttcttgatattgagcttttggctagtgttccaaagtgaatttagccaacatcaccaaagtatcaattgaggaagatttttcctcccaaaatagctcattacgagccttccaaatagcccatcaaagtgtagtagctaaccccacattattctcatcatgactacctaataagctagatatccatgtacccaaagagacagaattaccctctccagcagttaaacccacatgactccagcaagttgtagcaaatagacagtataacaacaggtgagcgatcgtttctgtagcactttgacacagaggacaaacagaaggaacaactacatgcttcatttttacttgtatccgagtgggaaaacaatcagctaaggccctccataataaatttttgacatttggaggtatctttagttgccaaaaattcatctaaaaccctaagttattagcgctccctcacacttctttatgttcttgaagcattcgataggcactcttaactgagtaatgactcgatgtctctccacgctaatattagtaatcaatttcaatagaaaaactaatggacactcccaatatcaatctcgcataacattcattgaacatgtctcgaataagattcacatccctttcactactgcacacatataataatgaattcacatactggttttccaagcccttgttatttgtagtaacaaaaggattattatcatcaagtaaccaaggatggtttaagatacccatttgttcccctgtttcaacatcacattgccccctagtttaatcaaactttgggaactctctatactccgccacacatagctcggattggctcctaagggcgcagataaaaaatcaccatttggaaaatatcaagccttataaatcttaaaaactaaagaattagactataccaaaaatttccacccttgtttaacaagcatagccaaattaaaatcgtggagaagcctaaagcctaaccccccaaacttcttatctttggccattcgttcccagctcatccacacaatacctctactcttactcgacgaagtttgttggatctcagtgcatgtacgaatcaaaataataataaaaaaaacacttatatcatacttggcaaagcttgaaaaactgtctttattaaaagaattgctttacctacccgagacagaagcttcccttcacaactgttaatacgagctttcactctatccttaaggaaccccaaaataacagatttattctagcccattgtgtttggaagccccaaatacctattatgctcatcagcctctactgttcccagagaattacagatctaaacacacatactttcttcagagttaggactaaaaagatcgaggacttcccaagatttactttttggcctgaagtcgcctcaaagataccaagaagctcttgaatattaccaccaccaactatagatgctctacaaaacaagcaactgttggaattattttactaggatctagatttactaacaagtatgttattaacatcctaaatataaacttctaaaacgacatgaaataaacacatataaagtttcaagaatcttacagtggttgcagcggaatataatgtctccttccactcagatctctaacccttgtatcctttctgtagcagggtatcaccaagatctgagtttgaatctctttctcttgaaactggattcttcacatccttacacactatgattgagtaccacttgatgtgtgtgggcacttactctaatcactctagggtttgaatagaagagaggagagagagagagagatagggtttcggtttggtataggaaagaaggctaaaaatttactgaaggaagtgttg

SEQ ID NO: 380750 - DNA, 1446 bp, Cannabis indica
gcttccatggtaaagttgttgctgattgaattattaattgtttcattttgttaataatttttggttataagttttaaacaaatatatataatgcgaataatagatttaaaacgttaaaaaaaatatgataatgcaaaatttacctcttaagagaaaactaaataaaacatatttatcttagttcaaagaaataaataaacacattaagtatcttgccagtagtaacgttcgcaataatgaaactcaaagaaattgataaaggccaccaaaacggtggaacatgtgatttaattcgatgtaaagcgaagaaccttactaaagcttgacatgccgcgaatcctcttgaaagagaggagtgccttcgagaacgtagacacatgtggtatataactgttatcggctcgtgtcgtagattgatataccttaaaacaatatatttttgttaccacaaaatatataggcagcaactgattacttgattgtaataaaattcaaaatgggtatacttgatgatatgagttattcaaaaaaataaacaacagtccattttacatgtgtatgtaataaaatagacatgcatgtaacacactgtttgaaccctatttttaatgttttaaatttctctaaatttcttaaaattttacaagaagtcttaaataactataacttacgaaaaaatttgactaaaaagttattttgaatactaaaccaataggattacattaatgtatctcttttaagagtgtattattgaatttttctcaataaacataaccataattttatcagaaaattctataatgtaactttatctatttcagtatctagaaaaagaaaatttagttcgaatctttatataattatatacattgtagttatttaagattttttaaatgcgaaacccaatcttatcacattgtaactattaagtcaatctaatatttcaaataaaaccctcaattaaacattaattacgaatcaatccccaaaactctacacgtcttaaagattcgatctttcattttatctggtttcaatttcaaattcccttttctcgatttttgcgaacctctccaatggaagaagacgctaacaacagtatcgtggcaaaggagaagctggatctggtagccacctgggtcggctccaccgtctcctccgccttcttctcctctctcgaacgattctcctgcgtcaacgtcaccaccgacgacgacgaagaagaagaagaagacgacgacggagaagaaaaagaagaagccaattcggtaaagaaccctcctttatccgtaacagaacagacccaggtccaacacgacgacgtttccaagctccctgtttgaattggtcttcggtatttctcaattctgaaaccagttgttaattactcgattagggtttgtggaattagggaaattgatttgcttttattatatatatatatat

SEQ ID NO: 380751 - DNA, 2795 bp, Cannabis indica
aggttttttttttttttgtatatgttataaacagacacaaaaaaaataatttcaaccgtcagttggtcgcaaatacacatgtttttttttgcgtctacagtacacacgttggttagggaaaccaacgacaaaacttttaatgtgagttaaaaaccaacaagaaatgagatttttatagtagtattgataatatgattaaaattaatgtcgatgcagctatctttagcaatatgaataagcatggatatggttgggtggcgcaagactcttctggtcagcttattctaactcagacaacaagtcaaatgggtgtggttgattctgttcttgtcgaggctattggggttaaagaggttttgagcaagttgaaagagacatgtcgtgaagatgtggtggtggagtcatgcagtttgatcacgatccaagctatccaaagttcgatggatatactttttgttttcgggttctgcatctctgagtgtcgacagattctttccagtttgaataatctcttttaactttttgtcaagtgatcgtgttgcttattatttagctagagcttcatagttaatgcttgttgtaactattcggctactatgtttccgagtagtttatgtaatgttattttgaatgatttgagttaataaaatttacatccttctcgttaaaaaaaatgtgattcaatatcaatatggtatttaaaattctcatatcataactatagctttattcatgagtatattctaaattataaacttacaaaattttgataaactctttttttttttttgaaagaaaaaattttgataaactcaatacaaaagaattatgttttttttctaatccccagttaataataagctttataataagtaatgttagatttgataaatgattatttcaatgaaaaagattcatgtgttgaccataatttgacttataataattagtagtaattaaattagtttaaaatggtaaaaattaatatgtattttcttattttgtaaatctaggatatatagttttttttatttactaaattataggtctccatcaagggtattgcagtgttcactactataaaaaaaattatttttcgtagactaaatataactttaagtcacaacaaatattgtgactaaatcatatttagtcatagcaaattgtaatttttataactaatacatttagctacgaaattaatcacaacataagaatgataatttataaattagtcacaacttttttacttttattcgtgactaaaagtaaagaaatttatagtagttctatgatatccttctatactctcggttggtataactcgttgagttaagtagaaaccaattgtcaaatagtgttattaatattaataagagtcaattctgttatagaagttggttagttagttgttattgtataactactctaactaacctcttcttctcttctccttggtttgttagtgagttgttgctcttttatatattcttgttctctctaataacggtgtaatgaattcagtctttcttcaattcatcttttcttctctctttctctctgtctttcctttttctttctttgtttcctctcagcaatggctaagaactttcacaaatagtgttatttggctttgttgaagagagataaaaacttctagctgaatttggctgtgccttagttgacaatattaattatttttctttggttgacattaattgaagcctatatataattagatgcattccaatatagatttgagttaccatagctcacaaagttttatctttagattcttcgatggtttggtagtcaaaattatcggattgtattttgagtctatttggactcgatcggctttttgctgagaatttctccttcacatattgaaatattaataaaattatttattatatagtactatatatataattgtcttttttgttacatactaggaatgcaccaattaaaacacacgtcgacattaagcccatcatgattaattgttttatatatacaataatcttcttccttcatcattaagttcacattagactaagtagtaagtatactatatatagtgcatatacaactaattattataaattgtaaaaaagagaaacattgatgtatttttaattgctttacatgcatgcttcgtacacatgcaatgctttatttttgttctttgtttttttgttttgttttgtttttttttttattttattttgaggaagggtgaaaatgtgatcgaataaattaagatttttgtcctctaaactttaatatgtacaaaatcatgtctcttgaacttttctgaccattaaaaattttctctgaattattgagattgttatcatgttcctcagactttgatatttatcaaatcatgcttctctaacttttacatgtactaaatcatgccccctgaactttcatccagactttttttgttaaaattgaacaaaagtctttaaatctaacactctcaacagttcatgaggcatttttaaagaccttaaaactcaaaaaacataattttttacatatcaaaattagagggtgaaaatcttaattaaacttaaataaattaattatataaatatatgaatatcctccacgcaaaatatatagatatatataacatttctactttttgtaagcaatagtcgattattatgcaaatattattatttaattaaagacatccagacagaagagaggcttgttttattattatacgtctcctgacactaatattcttattaattaattaattaattaattaattataa

SEQ ID NO: 380752 - DNA, 3670 bp, Cannabis indica
ttttctaaacatgaggtaaagatatgaaaatctagagtaatcatctatgaaggctatgtgatactcataacccctagcttatgcattctaaagtccataaactttaataccaactcaagtggttactaggctttatttctctttaccgagaacgaaggctttgatcattttaatttctagacatgattcatagacttataactcacctagggtaagttattccaaaggtaacctttggttagtttataaattctatcatagtcattatggccaagacataatagtcatagataattcattttaacgttatttgtctttcgacatttatagtttttaggtcttattacattaaagagtactttgttgtgagttgtttacttggtctcagaatatatagtttatttgcatacattcaacacatagtttatatgtatatatattgaatagttactttaaaacttgcaaaagtcttaacttagtgttcttcatgtaagttggaaactgaaattagagttttactaaaatttagaataatataaatattttatccatagacaaaattttatttctaaatttcagatgagctatttatctagcttggaccgccattaatacatattaacaaactttaaactttaacttgccttttatatctcatcaagtgtatttaaagtaatacaaacatggttagtatactctgaatcaataatccacattgattatatcattctttataacacgcgcctaaaataaaagaaatggtttcaataccttagtattttgatgctagaaatatggagcaatccagtttctaatgctcattttttttgcaataaattatattacttttttaattttgcattttcttacaaattgttgtcgatcttctgaatattagctaagatagccactagttcgatcaattcagtagcattgtaagtgagagactcaatttcttaaaaaaatgaggattgtcatcataactagacagaatatggttatttacactattcattttcttagaaactaggataacgttgtcatctactttcatctgtaattttcatgaatatggagttcattaatgaatttagattcaaactacatagtgatgaaaagacttcatgagaaacaatggagtaaatggacaaactttaagaatatttgtctattactatctcttatagttgttctttaagaaacttagaatagtattataagcagatgttcataagttttctatcatgaaaaattttctttagctaaagagtataagatcgaggttttttcatttctaaaactacattatcaataactgaaatcatctcttagtctatataaattttattcacataacttaagaaatttgtaaccacaaacatgaaagatatgaaaaaaaaaatacctaaaacaaatatgttatccgtgtttttggcaagggacacgtggattctaaatagatgtttaaagcccatcaatgggctcaaaatagcataaactaggctgaacccaattattatctggccttctgggagaacaactgcacacatcgctagatgagcttccgtcaagcctagtaagcatatggaagtatgtcaactccatgtacctggaagagaatctcaatgtgcatccggaagccaatcccaatttcccatttaatgctccacacagaataagggatatcctcccaagatcgtgggcaaagaataatatcttatctaagaagggcaactgaagtaattgaagaccaaataattactatcacattaattatccacaatcaaaggacacaatatgaacatctatcaccgtgatcaagtttccacatcagcatatatgcattgcctcatggttgttcactagaagccaatttattaattgtaaatttcccattagagggaaaaggaaactaagtataacctctactactctataaatatatattgaatccttcatacaaagggttggaaattctagactgacttgctcaagaagagaatagagtgatcatacttattgtaatcccttagacttttctagtctgtctagtaataatactgacttatggactaaggcttattaatgctccaaccatggaggtcttctttattcatcgatctcgtaattgtattttctttagcttaaatattaaataattcgttttccaaaaatatcagtaaactttttggtgctttcattgagagctaaagaaagcagcgataccatccaagattatgttcagtatttatggtactcacccaaacccaatcttgtcttcattacaccaaccctaaaaatggtgatgttgattctaatgctaagacaagagacgtagaagatccaactgaggtgaccaatcgccacaagaaggatcaaactgacaaggattctattcctgaagactatatgaatgaaggcgacaaatcagaggagactgatcctgttgatcctgaagataattatcaagacatgcctattgatgatgatgctaaaaaagaaggtgatctagatgagtcagatcctgtggtcaccgtggcccaaaagttgagagaaattaaagataaatttttgtcgcaagggcaattttctttgccgatgcataaagaaatggagagaacagaggctgtaattaaagcactgactactacaataaaaaccaatcatgatgccccaaaagataacactaccaggaaagttgatcctaaaaatcctagaacctacgatcctcataaggataaagggaaaagaaaagtaggtgaaacctcaaagaaggctgcccaaactaaatagaaaaagaagtccaaatctgtcaaccaaccttacaagaaaagaaaagaacccatgccttagggcaaggctactagattaattctagaggtagagttgtccagaaagacaaatctaatgctaaagctaagatgcttactaccaggaaggacacaaatcactgtggtgattttgttagtcaaagtgataatgtcgaagaggcgtatcctccatcagatgaaaaaaatggaagtctttccatgaatgatttttgaacgaggttgaacgccaaaagagaaaaggtttggactgagaaagttagacctcacaaagatgatttaagaaaccatattaaaaatcgcatttgtggaagagaatcaccagacgttacgattcaacatttggagcataagattgaagagttaacaaagctcacggaaaagatctcccaaaagcgaaatggaactgtgtttgacttggaggaagaggatacaaaaccgtgtgtgaaagactggaattgtacgaaggaagaagggaccccatagaccatctatccaagtatagtcgactgatgcaagtggaaaaagctagtgatgatgcaaactgtctctgtttttcactaactctatcaaagtctatgaaagactggtggaaaaggttatctcccaaaccaattcatcactggaaggatttacagacaatgttcaagaaacaaatcataacaacaaaggaatttaacatggaagttagttctttgatgaacattaaaaatcaaccatgagaaagcctcaagaagtacatccaactcatgatggatacaacaataaagacaaaggttaatgatgatataaagatagtggctttaacatcagtgttaaccccaaaaattaacacttgtaat

SEQ ID NO: 380753 - DNA, 2435 bp, Cannabis indica
gtcctaatcttaaggttgtgcataattatagggattctaatcaattgtctataagattgccaaaccaggattagcattagataatgagttggtttggaatggtcccttaccttccatgtagcttgtttactttgtactttcattgcctattctaatggagcacaagtttttctctaaaaaaaaaaatcgttaaaactaaaaaaaatcatggttggttggaaggagaattttagtacgtgattaagtgtttggattaaaaatctgtgttgtgaaagtttaatgttttaatttttaatattggtttattttgttggcgttattattagattggtgcgggagatgaggttgttgaagttgatagcttggagagggatttgttatcgggtactgagtaatatggagttgatgcatggtgtggttttggtagtggtgggtggtggtggtcttggctgaggtggtgtggttgtgcgaagaagaagcacaaagtttctagagaagaatgaagaacgaagaaaaagaaaacaaaaaaaaaaagcaaaaaaatactttaattttaaaatttattattattttttatttaattattttattttttaattattttttgtactatttaattttatttttaataattttttaaaatatttaaataattaatattttatggactaataaaaagataccacaactattaaaaaaaaaaagataccacaacaagttgtagtacaccttcacaataggaccaaagtggatagaactgagagtttcgtttacaaaatttcaatcaaaaagttaaatcgtattaaacctaaaaggataaataatcaaaccgaaaaaggcaaatatccaaagactcctcattcctcaaagtcaaggagcacgagttcggaagagcttcctatatttatttgtcatattaatttaaacaaataatttcttattgggcttgtgtcttgtcatggtctttttcaaatgatgtatggttcatataataacttacgtcactcaaaaatgtctatgcgtaaactataaagagcatttttggatttgttgtgtaacgtattaattcaaaatttaatgaattacataaatgcatgatagataatggtgtggtgtggtgtggacgtgtggtgtgctaaactttgttattgctactctcaagtcaatatacatttatatatttgtatttaaataacccctaagattaaaattaataaagatttttgttcattaatattatgaattataaaattgaaaaagcgaaaaaaaaattgtttaattaagcctattattaattaaaagtatacaagtaacattaataattaatcatttcaattcttgtatttttctattcatagttatttattattgttgttaattatatactattaagccagaagattcacaatatatatatatttatatatatatatatatttcataaaagtcttacttatatatagattggtcaatgtcgtgggcaagatagagaagttaagtaaggtcaaaaaaaattccacaacacatggtctcacgtgctttgatgctacatatacagtcaaaagtcttataattgaaatattttatatgttaattgatcttatgtcggaatcgaattaatacccttctagatatggataattatagtccaaaaattttatcactttgggatcttaacttactcaatatatacataaaaaggaaaactataacatatatatttataattcatataacataagcttttgtataaataaaagctatatatcatcactttcgctgggaaaaaagaacttggctgtagtgtagaagatttactgattattacgtatggttggtagtgtcatgaagcttccctagtcaatattagcaccgattaaatattcaagtgtgttctagaaaataaataattgtatattaaaggtggaaaatagaatattatatacttatatctatattaagtcaaaaatggctaattatagctgaatacgtataatatgtgtactaagttatatcataataattgattattaattaagtggcgtgctatataaaaagcataaatattatctatttatttatataagggatattgacgattaaatcacttgaatgttaaatattttaacacttacctataaaaatcaattttttagaggcaaaaactacctaaattctcattctgttttgttctgtaccctccgtccaaaaatcacagttaagccacagcggactgcccacgtttcttttatttcttttttccttttttctttccatctcttttttttccttttccttttcctttttcttaatgaaaaaaccctaccaaaccctagcacccgaccccctctcacacactctctctcaaggtgcacaacgccggctttctccaaccaaccccagcgaccaccacgaagaaagagagagagagagag

SEQ ID NO: 380754 - DNA, 1446 bp, Cannabis indica
aagttcgggtctagaatctgggggcagggtctccaatcccgaattctttgtaaatattataatacaagctaatacagatcatttgttatgtattaaataatacaattcatattgtattaaaatttatagtcgtaataattaatacaatgtaatattttatttaaatgtaatgttatttgttatttaatacaatacaatttttatacaacctactaaacaaccccttaaaataaataaaaagatgtgacatacctactaaaagtgcaatgatgttttttaaagaatagagaagcacttataaactaatatacacgtgttgtaagtactgaattaacaacaaaaaaaaaggtacaaatcttcttttacaacactattgatcaactttgaactatttcatttgttctaacatttaaggtagaaaccgcttttgctaagagtaaatcttagttcctttgttgaacattcattttgacaagtattttctctagttcaagtttggtaaaacttgaactatgtctaactataacaaatacacaccaaagataatttttttggctgactggtttgtttgagctctacataatcaaaaatttaaatttattacataaacagacaacaaataaaattaatctacaaatcttctagtgaagtttcatagaaatcatattccatagatgaaacaaattactacaccaatgtacaatgaaaaataaatatgtattaacactttgcagggtatgaatatcaacttccctcctgctagtcatagtcataattacaatgatagttgagaggcgtttaaccgttcgggtaaagctattgagtaagaggaagacattcaagctcgatctccagtacacccctctcaacattctgcagccggagactaatttcttgctttactttgccgtctgttaggtagatgaccccatctttaactagggtgttgtctttgctagctatccattttccgagctgtgttgactcatcgatcgttgagttctcataggctttagcagcagtaaccagaggttgaatgtcaatctcagcctcgcccatgaaatcgtcggtcttgaatttatccttgtcatagactagctgcatttaaccatacaaaaataaaaataaaagcctagtccacaacttactttgagaaagtaaaagaaaaatggtttagtatctgttagagagtcccacattgataatgcgtgaaaattaaataccatacattagatgcatggactactcctcttattgccagttggttttgagatggaaccccatgcaccttatacaacacactcacctatccctacttccctgaactatatacttttgcattttaacatggtatcagagccaaactaaaattctaacgactaaccgatccaaaaagacgagccaaaaggaaccgcttgtgattcggggatagtgagccaaaaagag

SEQ ID NO: 380755 - DNA, 1351 bp, Cannabis indica
tatctttcttgagttatattatgcttcatttttgtaaacaattttcctatgtgattatagattataggtatagttctaatatggggttgagtttatttaactaatttaagtagtcgaaattcaatttattgatactaatatatgaacattaactctaagaatactaatatatcttcttatgagttgtcattagaatgctatgcatgtatattttatttatatagacatggtagaaaagaaattaaagacaaaaatttataacatagatttaattaaaataattaatttattattatgtttagtgtaaatgacataaaataattaatatttttattaactcaatataatttttttaaaatttttaattgagcgagttataattaaaattttgctatccaatataaaaaaatctacccgatcttcacttttttttttatgtaattattattgttagtttttaatattcaaataattaattttaaaaaataaaaatatattatttatatttcaagttaaaaagtgttatagtctaaattaattttaaaaacttttaacataaaaaaatatagatgaattaatataaaatacttaaacaaatattcataaaaaaataataaaaaaaagaaataatatggtgtagattttagatttcaactataatatcaaaatacaataaaaattattaactataaaatttaaatttcaaattaaacattgtaaacccaaaatttaaatacaaaataatttaattattaataaatgtaatttatgtaatatattatatatatacttttatttaaaaaaaaaaataaattattttatttttgttgattcgggttattgaacggtttagaataatttataaactatattttttgtcaatttattcaattcggttttgatagtttattcaaattaggtggtttgtaatttttttttgaatacctctaaattttcctttcactatcaatttaagcttctaaatttttccttttataattcttatcacaaaaacttatcatgaaaagaagactttaaactttaaagtcattgatatgacaattattaccaaaataacaactagaaaaagagctaagattcaatttcactctataatataagttgtattcaatacaaaatattaggccaataattaaaacatgcttattattaaggcttctaatgttggggaatttagggtttatgaacttatattatcaatttagggcttgtttggaacgtcgtatcagatcgtattgtattgtattgtattatattgaattgtatattatgcaatatttttatgtaaaactatatgtagtattaacttttatggacacctaaatatata

SEQ ID NO: 380756 - DNA, 890 bp, Cannabis indica
atccactccctacttttataaaagttcatagttattaatcatgttagatattaataagatgacaaaagaaaatgttttaaattatttgagttaatatacaactctagtttagcacatttttttattctatttcaacgattttataatcaatataatgttataatacataatgtatattacgatagtattataataatgaatataaaatttaggctaattaggatttttgcccctgaacttttaaggtcgttaaaaatgctccctgaactattgagattgttggatttaagaacttttgtctaatttcattcaattttactatttcagtgattgtttatgtactaaactatgatccccagattttgatatctaccaaatcatgtccctcaaactttaacatgtactaaagtatggcccctgaactttcagctattttagacttttttattaaaattggaaaaaagtccttaaatccaacaatctcaatagttcaggaggcatttttaacggccttaaaagttcaggggcatgatttggtacatgtcaaaggttaaaaatcctaattagcctaaaatttaatacatgatattaaaaaaatatcgttcaaaatgatataataaaaaaagataaggtattcttggaatcatttcataaaacttgattagaatgaactttttccaaaggaaaatgtgaagaaaatgtaaggaaaaaatagaaaataaattgttttgcttagtacggaagaaaaaaaattatactaaaagaacttgattcttatttttttttattcaccaaactagtaaatagcccgtgcttcgcggcgggtatttaaattttttttaaatgatatatataaaataaattttatattttatgaaatgataactaaa

SEQ ID NO: 380757 - DNA, 3339 bp, Cannabis indica
aacctgttctcgactgaagcacaagaatgttaaaccagtctaacacttgacaacctccttgacattcagactcaacgcccccaaccttgtacccctacttgcccactgagccagcctcaagtggtatgaagtagcagcactatccaacacacacacacacaacaataacctgttctgatgaagcacaagaatgttaaaccagtctgacacttgacaaccctcttgagattcaggcctcatccattgtacagcatgtggagtctgaaaatttaataaagaaaccaaacttggtaacagttcttaaaatcagtaacaaaccagaagaagagaaacatactacctgaaacattctattaagcctttcatctcgaatattcccaagaccatacaaagctactgctgtcgatccctgcaattcataagcaattattagtgctaaggaaagaagcttgcatctgcatccaatatttttaataattacaatgttacatatccactaacttaccttcttaataagaataggattaagggtgatctgaccaacaccagaacccccaaggaccattttcccaaaatagttcacaagattgcatgctgagagaatatcaactgcggaaaggttatcctgccaacagttaccatagtaaggattggaaattccatgatagaaagaatactaaaatctgctttaagatcagaaataccaaatcatgtggacatatagcttaaaattttgaaggaaaatcatgaataggttgatacaatcacttgggtagaactcactcccaaaagctagggtgcccaagtagttatatgtgactaacctataccatacttagtcaatgctggatcctaacacaggtttagaagttgaattttataaacatgaagacagatattaccaacttaatgaggagaatcagctaataattccatcactggttcagcttggtccttaaccagttgggaaactatcctacttgacaagatcatacaaggttccaactattaatattatggtaggcctcctctcacaatggtttactctaggatagcaaagaagagtgacgtggcaagttagttacatgaggacttgtcgagtgtgggagggtggagctacttcaatacacgctaatataaataaggaagtatctgtaatagaggggtgtggatgatttgtgcatttcctttatttctttcatacagtaaggagagactaagctctcgaatctcttggcaattatcaatacaaagggggttctgctccctatttcttcacatttcttctctgaactctgctaatatattatctgtgacctatcatattgcttgtgttatataatacatacatttatttatatatatataagtgtttcttggcattcctaataaggagaggaagactctcggggagaatgaccatgctagaaagaacaattcagaatggttttaaatatctggacatcaccaaggcacataaggataagaatttacggctgtagttcatgaacttaactttaaaattcccaagtatcttatcagtgaggtttacaaatatgggcaacatgtaataaattaagtaactacaacacttggccaaaatatccataccactccagcaggatcatcatggtttccatgaatactgaatacaggcaatccaacattgaagtgtggatcttcatagtttacatgaccaaacctgtcaaagaagtacagaagtaaacaaaagagaagaattcaaaaataacctaacttctatttttcctttcatgtcggacctcttaaattctaaattattattgaaaagaacaagaaatctaatcaaagtagtaagtaaatgtctatactgagtgttcgacgaagataagctcagacaagtaattacgaatcccaattctatatataaaaaaaatgaatatctttaaaagtcatacgtgcttggaaaattcacggtttggtcactaacaacttggaactgtataggccgatcattgaggcagtgacgacgaagaatctcaatggccttaactagtgttgtccttgaaggcttattctcatggaaaagatcaccacctagaagtacacaatccacctgatagcaaaggaacatgtaaatatacaaaaaaaacatatgcaaagacaaaacaaagccccttcagatcaccatatagccaaaatgaattcaagaattacctccttttgtaccgctattgagcatatctcttcaaatgcctggaatgaatcgtgacgccgtacttcatccttctccatatagcccaaatggcaatccgtagcaacaagtactcgaagtgtattgctaatatcctctctaaaaaaatttttgtcacacataaatacgaagataatttttctaaaaaaatttgactagttaatcgataaaacttcatctgcattgcacaactatgaaaaattctaccatacgaagaaattgtataactcaagtattcaaagttctgtaagcccaagcttgcttgctaataaatgaatttaactttcgaaattctctcaattcagactgaaaggcgttttctccataaccaatcaaaagagttacgaaagaaaatcatctacctcgataagtcggccatgccttatgtcacaatccgccccttctaacagttcaaacctactagagagtaccatgtcaaaatatcagtccagcaccattcaatgattccatttttcaattcaactttttcaatactgaaaaatacttcaaaactcaatcgtctaataactggaaatgtaagcttgccctaaaactgtaagaatagaggaaaataaccaaaccccactttccattatactgaaaatagtacacttaaaccaaacaacaaatatcagaaatataagaacctttgattgatttgtatcagcagaagtacacaggtaaaagataaagagtactaattcaaaagacgccaatcgagtgaagaacatctaaaagagggggtgtttgtagagacgcctttgtaagaagaaagcgaattttctttcaggttcccgcattttctagggaaaatagacttacctgtttggtatgtattggaaagattaaagaggagtgtgtgtgagtgagtccactcagtgggtgtgtaagagaagcttgcagcggaaaaaatgtactctcccgtggcggggaatttttaaagattatgttatagggtgctcgtaaaataggtgcaccaatatatttcctatcaatttcaccatttaaaaaaatatatactcatatatgttaaaagtattttattgttataaaataatataaaataatataaagtagatgagaagaaagaagaaaaagatgaagag

SEQ ID NO: 380758 - DNA, 4545 bp, Cannabis indica
aatatatataagatacaagtatctacacttaatttcctttttattaacaactacaccaaactattttaataattgtttttttttaattaataattgtctattgatacattaataaactaaataattatttcatgaagaaagctcctatgtagtacataatggattattgtcatattaaaatactaattaatggatttttctaagtaaaatatattatttaaattgaccacctaccctaactctattatttatacttatatcttactttattaaattttatgtatttatatatattagatatttcccattaaatttaaccactatatatgaacattgctaaaaatatatataaagcaaaagttaaaagttaaattatcaattctaatttttttttgaaataatttactatgttgaaaatatatttttaagtataagcattgcctatatatacaatatgcttcacaataattagtgtttttgtcattgtaagttgttcaaaaatttgtaaattaattagttttctagctaaaaaagaatacaacaaacataattataaattttggacttaaccgaggtcaactctaagtatagttgagctagaactctgtttagagcttatatttttggagaccaaaataaaaaaataaaagacatcattaggtttttattttaaaaaaattatgtattataaataacaaatattcatagctcgataaattagagtgtatgatacattatacaatagtgcgagtccaagtcttacaagtaagggccccaaaatataaatcacgttatactcatatattctcagggtcgactctagacttaatcctaaaaaaaaggatgcatgcaagtcaggtcggctttaggtcgaccctaagtataggcggactagacccatgtctaagacttatattttttaggacctaatataaaaataaaaggtttcattaagttttatttaagtaaaattaagtatctgataaataataaatacttactgtttaattagttaaagtgtacgatactttccacactagtgtgagtgcaatatattttagaatttaatttcatttaaatatgataatgtagagaattgaaattataatattttatgtggaatacacacacgtgaggatttcataatttttcttaaaacttttagtacaaataaagaccatttttagtcaataatatcatgcgtgaaaaaaaaggaagaagtattaattaatatttatttaatttaaatgttttgtttttttaaaaaaaaaattcttttgacaatataattatacatatagatccaaaataataattgagaatagataaatgaagagaacgaggttaattaagatttttgctctttaaattttggcatgtattaaattatgcttcttaaattttgacaaatactaaattatgtcccttaaatttttatctatgttagactttgcttattaaatttggacaaaaaatcttaaatctaacaatcttaatagtttatgagagaatttttaataacaaagttcaaaaagtataatttgatatatgtcaaaatttcaagaacaaaaattataattagccataaaaagaatatgtccattttaaaattgatatagagagaacattatatattttttatttctaagattactttttttctctaacatatttttatgatgatgtttattataattataatattttttttataaatttttaaaaattacaaataatttatagtatggaaaattaatttaattctgttaaacctacttattaaataaggtaaaaattattttaaactctgaagatattgattagattctttatgttgttaaataataaattagaccatatcttttttaatagtactaaattgtactctgaattaattttctgttaaaataaaacttaataataacttaatattgatgcgttatgacaaaattaattatgtctttttttttttacgtatgtttgtatcatgaattatttttaaattagttatactaaaaaaaattatcaaaaattaagttcatatttctatttataccattttaaagagtacataatttattttgtaatttaataaataaaaaatctagttaataatttttataaaatattttaaagatggatgaaattatttttttccttaaaaaaagagaaaaaaaatatcaaatttatcttggtgggccgggcccacttgtatgtaaaactgcaaaagatgaggttgatgtagcccattggcccattgacaggctgttattattcagtgtggtacagtccactattgcacttagacagactagaatgaaattttgatcccatgctacgtcagtgcacatgtcttatggtagtcacgtggccgtttgctcttaaaacgacacgtgtatataccgcgtttggttcaattattattattagtgtaataattaggtttagttttagataaagacaaacatgtactagttgtaccttaggcttgtttgtttctcaatttcgattttttttaatattattttttataaattgtataaagcattaaataattaacaaatatataaatattaaaagatatttaattattgattaattatttgattggtttaaaatgttaaagaagagaaaagaatctattaaatttaaaatttgattttattttttcatttataaaacttctattatccttgatttattataaattctaaatgttatagcatttttatttacttaatcttttttaaaaaattagtgtataagtcattcaatttgcatttttgtaatattattttttaaaaaattagcacttaataataatttagattttcattttttataacaaccataataataaatacaatataaagagaaaatttaaatacctgaacaatatttgcttatctcatccaaaacaatttaatagtagaaaaaaaatctagcaggggcgacctgagaacacacgaaaaattatcgaatcacatacattttataatatcgattcgtgtattctcaggaaacccctgatagactcctctaccatcttttctatcaaaaaccttcttcttctctttggcattgcttgtgtttttgtatagttttatatataattttatcattagagtactagaaagtactttttctttgttttatgaatgaaatgttgtactacacataacaatactagtacatgttacaaaataagggctttattttgatggagtacaatttttgttgtacttctcaatttttggttgtgttgtggtactactaatattattgcttaaattcatggaataatgtagaccaagtaatttggagaaaataaatgtgttatttttgggttatttgtttttgtttaatagtaattgttcaagttatatggattgaaatatggatgaaaattaataggcataactacttcatttttcatgcacataaaatcagggccatcttaagttatttgaaattttgggtaaaaaaatctaattgagtttttaatatatgaaaaaatttatattgtttttatatagtgttaagaatagtgttttgaaaatataatttagcatttttttaataaaatataaaatatagtattttaaaaaataaattaagtattaaaatagttatatttctcaataaataataataaaaacacaaagggttgattgctataaaaccctcttatattttgattttttatacttaactcccttatttatttttttatggtaaaactcttttatatttacttttctttataaatttgaggtaccaacaagatatcgttgttaaatatcaaatcgattataattgtattagtcttcaaattttactttcatgtatacatagatatacacagtggtcttctatttagtatttaactgacgctttaaatttataaagaaaaataaacttaaagaagttttgtcattcggtaaagtaaatttgtaatctttttgttaaagaattttttgaatctgggtgaagagctttagatgtagcctctactgtaccactcttgagttggcccggcataaaactcacatcatcatataattttgtttaataaatatcaacaaataatacacaaatattggggatttgagtagaaccctaatctttttgtatgtaattatgtaattagtatatattccataaatttttgttgttctatgcttaatctcgtcccattatgaagaggttcatatgtattgtggatcagacattttcatgtgctattgaaattttatataaggtttctttgggttgattatactttcaagactaccattattttataatatttaaaaaataccacaaaacttatagaatttgcaacaaaataccaaaatataacacaactatttaggcttataattttgtacaaattcaattttgtatttcgaacttgcaatgatttacaaggggtaagttgaaaaataccacttttattaatcaattaatcaaatttacctctacttttatacttatttgaaacataactctttttatgtgtattgtacccaaaataccctgaca

SEQ ID NO: 380759 - DNA, 2319 bp, Cannabis indica
tcttacgggtaaggaattgttctagacaaaaataggagacataatctcgaattgtaattcccctattgtcctctttggtgatctgaatggtacatcggcggatcatgaatgcattaattgtgtcaataggaaaaattctgcaaaatactcattcgatcttagaagaattgttaagagaacgggtctcattgaccttggttgccagggggaagattcacctggttcgaaaaggcatcaagaactcaaggaagctcctcagtgaaacgtgcccggcttgatagggctcttacctccaccgattggagagtgttgttccctaatgcaattgtggagctcttatcggtttgtacttcagatcataaaccaatcattcttaatacgatcgggggagcgagatgccttagaccccagtttaagtatgagttggtgtggggaagagacccgagatgtttttgggttgtccgtaatgcttggcgggaggaaatccatgccaacccaatgatcaatctatactgaaagttgaagaagacgaaggatcaccttctgaaatggaataaggctcagtttcgaaacgttcgatagcaagtagaagaagcaaagtcatctctggggaagattgaggcaaaggatcttatacaggaggaagtgctgggggaagccagggctaaacttagggagactcttactagagaggagatattctggaaaccaaaatcctgtgtggcttggctcaaacatggggacagttgtacaaaatttttcatgccttcaacagcgattaggcgtaaacgaaattacatccaaactgtgaaagttgagagtcgagactgggttacggatatgaagactattgtgcagttattcatttcaaaatttaacaacacattcacccgacaaacatcttcttcggctatgggggaaccttttctcagtaattccattatagaagaagacactaacgagatgcttactctagtcccaacggattcagaaattcttatttgccttaaaatctatggggcatgataaagcgccgggcccggagggtatgtcggtgggattctatcttcaacattggagcgtgatcaaacaggattttgtgaaaatggtgacctattttttcaggaatgcggatctcccctcattcatcaacaacacaacctagttcttatcccgaagaggactgtccttctaatgtagtgactatagacccatagctctttgtaatgtagcatacaagtgcatctctaagctcttggcgctgcgtttgaagcccctgctgccctccatcatctctccggcccagtcggcctttattcatgggcgttttattgcggagaatacagctgtggctagagaaatcgttcattccatgagaagaaagaaaggaaaaaaggggttcatgatgataaagctggatatggagaaagcgtatgattaaaatggattggggatttattcttaatacgttgaaaggcttgggtttccatccaaatttggtgaagtggattgagaagtgtattaccattcaatagatgggattgcttatcaatggatctgttcaaggcacaatcaaaccaacttgtggcctccatcagggagaccccctatccctagccctcttcattactgctgcggatgttttatctagattaataactacaagaatgatcgaggggcacattcaaggtttcaaggtttccagagatggtccggtaattacacatctatgttttctgacgatgtaatattattcaagaaagcttcggtcaaggaagctaaaggtttccttcggtgccttgaagattattgctcttggtcgggacaagcggtcaactatcaaaagtcaacagtgttcttctccaagggagtttcttcggggcttgcgagggagattgcggggattctcaacatgaaaagaatgaagaatgatgcaacttacctaggccttcctctcttcagatccctaaacaggtcaagagatcttcggtttctagttgatagggctttgcaaagggttaggagttggaagactaggctcctctcaaaagcagggaaaacctgcctgattcaatcggttggatctgctttggcttcttatgtcgcggctactgaaccaatttcattgaatgttgcaaggaaagtagataaatgcctccgagatttctggtggagagtagtgagaagcgtaaattacatctacttgcgtgggattctttatgtcagcctaaactcagaggagggttgggatttagaactgttgaagcggtgaacaaggctttcatgactaaatgggcttggaaagctttgactgataat

SEQ ID NO: 380760 - DNA, 692 bp, Cannabis indica
agagagatactcagatttagatttggttaacaacctataacaatgcatatattacatcttaaaataaaaacaatgaaagatattatgcactgtatttgattggaataacaatctctgcttaatttttgctttacatttttctaattttttgtttgtttgtatatatattttaggctatatatattcagatgcctaaaaggtagacactatacagcttgaatgcactgcttagaagttgaaggtagtgtggggtcttccaactctcattttaggcccttaaacagccattgcttgtaaagttattatattaattcattagctaaagataacaaaccactttcaaaagctttcttttaagaagtttcttccaactttcatctttctctaaacttatcccttttttcctttccagattagaaaaaagaaaaaaataaataaagaaaaggaaagaccattggttttcattcctgtctatctatctaacttaaactttcatagatatttattattggagtacttataagtatacacatatactttatactttactatacattattacttaactctactgcagagtactacttatccttatcctttcttattagaaacaactttcatatttaaataaatatatatagggatttgattttgtcccgttattgtactttcacggattgtaatccgtgatg

SEQ ID NO: 380761 - DNA, 1783 bp, Cannabis indica
aatttaatgatttggactaatcatagatttatttaaccagctacttacagaagtttcaaaattataacttaattattattactgttaaaaatcaaatttatctattatttataacttgaagttaaacttaagtatttatactttaaattattcaattaaaatataaaaaaatttagccgccgcacctaaaaaaaaaaataataaaaaatacagtaggtagcagctggaaacacgtgagagatgtagatgtatgaaaagaacacgtgcataggaaaagcagtaaatatatatatttatatatatatatatatatatataaataataagtgagaggaaattggaattgtggatgcttggttgacgtggggacaatagggtcgcagccaggcgtggttcgtggggcgcactgtccccgacctttcttcccaacccacgcgtgtgtgtgtgtgtgcgcgcgcgcgcccccactaaacgacacgctcacctccttctcatcactttctttgactcttcatcacctttcctcactcactctctctctctctctctcgtacataatttatcagagaaaaatatgaacgattctacttcaattaataatgtgttatgtatatatatttattatcatttgaaagtggaatgataatatcatttaatgggtttaaatgagtaaaattaatctaaattgttagtcggaagcaaaactatgcggttctaataaggagatatactaaattatggaattgataatatttgagaagaataatcaataagaataaggaaatgaagagaatgtagagatctttataaattaaataggttgtatgaacatggcatagtaagttccattttggcaggagggaaggcgatcaggacctgggagggatcgctaaatttagattaaaaaattgaatggaaattttttcatcaaattacttactttttgcaggctcttgagcgaaactaatactgtcatgtcacgttttttttttttgtagaataaactttcaaatagcaaaacacttaaacaacataaagtgttttggtagagcattctatccaatgcgctttcaatttgatcccttcttaaagaacgaatgaatattgaagactccttattttatttgtgggagagaggaagaaactaagtagcatctttttcttcactgtacgtaacatgacttctcatatttggagagcatctccttagggcctcaggaaccgaggactagaaggtgggactaagtcaaattcatttgaaggtttccattgagagacgtgaagattgatgatgtgtttttatatgcatctattctaattgacactatttagagagcgataaatgacaaggtacataataataatttttatagcctcaatttttatattgattttattgttcattgttgtaaataagaatatgattactatcttttgaattatctcaatcttcccctactatcaccaagtgcgttcctctacttgtagaatggatcaaacttaactgcgatgtgatagttaaggagcttgtggctcgagaacacattgggaagatactttaggacaatactaaggcttacaatttgttatcgtagaaagtaattctgatagagttattaaagtagtcagtttgcaaagataatctaaatacacaatgtaatttatttaaattgaattatgattgattatgagaataattagtactacagtagaacctttatttaagaatactctattcaagaataacctaatttgttataaaaaaaatcaagtctcgatttgg

SEQ ID NO: 380762 - DNA, 2526 bp, Cannabis indica
tgtgtcatggcagtccagtgcatagatatggcctatatgctcttcagtggattgttgaagttaatggaaagccaactccaaatttagatgcttttgcagatgtgacaaaggtactctctgtcttgtgtatattatatttgtaatacatgagtaagataagtcaacctggttgatattagagctgttttacttaattaggatgtgatgaaaaaaatagggtggagttcctaataaaattccacctcataggaaaaacccgccaaaaatggggaaactttacaggctactgcttgagagcacggaatggattcttgaacttactaaggccaataaccaacccagatcaccttgattagatatttatattttaatatattaatatatgtatgcgtataaatactctatttgcctctagacgctgaccacgctaatctgctaatctgcctagccctttatattctcatcgacaagaacatcacattacaaaaatgaatcttagaaaatcctataactttttaactgaggtagaaagtttattgttcttgttattaattatggcgtacttttttttttttttcttgtaattgagtcttgtcatcttgtccttgtcctgtgatacgaatagagtaattcaagctaaagaaaacaataaaacagtatcccaaacggtaaaagattgctgttacaacagagagacaaggttacaactaggggagccctaaggccccagtgatgcaaatagagaaacactcaattcattgccttacacgcctatttaattatagtaccaattcctcactcaagactaacctcccatacgaagactcatagcctttttattaaccatattttagcacaccatactagggcctaacatcctgtttagtagattcattaattaaagaacatgcttatataaatttgtatatatatatttatatcttttctttgtgaaatgggaccagggtctagaacatggagagtttgttcgtataaggacagtgcatctgaatgggaagcctagagtactaacactgaagcaggacttgcattactggcctacctgggagttgaggtttgatgcagatactgcaacatggcgtcgaaccgtaataaaaacactaggatgaagtatcacgagtgccaaaatgagactttgcttgcaaagttccttcgaaatacttctcacttcatgctaccttggaggttcagagtaatgaaatcaatctagtacattttggaagagcttgaaaactgaagatcacaatgtcattttgatttttggatgggaatatagcatattcctatcataaattcttgtaagaacttcattttatgtgaagagtattttagatgtggaatcttatttcataaaagatgctttaagtcattttactaggacaacaaatatatattatattgtattattatactaggctcatatttgatttttctattacccatcccaatgttttatttctgtagtgatttaactctttttgtatctttatatgtttgtttattcatagtttccagctaggacaacaaatatatgtttgtagctttattttgttgttgaaaattcatctctgtagtgtatgtgaaacaggattgggatttcttaatctactaaaaattgtttctcctttgcgtacgttgacataatatcctctacaatgtgtatttgggatgattgttttgtaaaaaaaaacttttattagtaaaataactttacaactaaaataattttatataattgcagaaacgactatgaattatactgtgcggctataaacaattattttgattgtaacacgattatagatttatattgtgatgattgcatagactaaattaagttatgttattttgctaatgaaaattgaacagaatccattggtaaattctgacccgcactaaaggcctaatgatttggacagtctcggagagagggttggtgtaatagataatgtctgtgaaaagtaggaatagaggatttctgatggatatctaacataaagctgtacagagttatttatctaaacttcattacgaaatagttctttcctacttggtctggaatgtaagcacttaacagagttagggaaattcatcactcggtaatgttctcttttgtatttttcttttgaaacaacaaattagaataaggtcatttccccgaagacaccaatatgaaccccaagaaaggccagagatcctatttcaactctcaaagatgcaattcaacaagttcaattcatgtataatgctaacagtagaatgggattttttctagtttttacttttttatggaatttttaaataaaacttatgtggtatttttctccattaggcttttaattattgtactatgttgttaagctaagaaactctttatttatttgaaatgtttgtgttttctaagttacatgaaaaatcttatcattattatattataaaagttattgttagtcatataaatattgttttttttttaataacatataaatattattatgaaagcca

SEQ ID NO: 380763 - DNA, 1823 bp, Cannabis indica
tatatatatatatatatagttaaccacaacagaatagcaactgcattatgcagaacattttcaaattttggagaaccaatagaaacaggttaataaaagagacgaagagaaaaggaaatgtagtcgaaattgtttggcacagaataagaaatgtataaaacaatccacagaaacttgcattcaaaaccgttggtgtaaattttaagaaatatataccaaaatccacaaaagcatatgcaaagtgagagcatgttatttggaacattaacatttaaaggaaagacccatgaagctatggacaacaaggaaaatcttatcaaaactagagcagccatgcaaaaacagtgaattctttgactatatcaaatttcttgtttagagagaaataaataaccttcaagcatggctaccccacgcttcacgtcttctggttgcctagagtgaacgagtgcccatgacaatcgcataatgctttcattcctacgttcatctgacccaccatcagatgcctctgcaacttctctctcacagccctgatttagttcagtacactgttaggtaaaaaagaaaaaatggaagaacagaacaactagatagttaaatatctaaacgaataagcctatggttgcatttatccaagaaagttacattatcgtcttaaatatgaaactgaaaaccaaagacttttacaccaaagaaattatgttatgcacttacacgaagttaataccagtcaaaagagaaaaagaggtttctccatggattgctctcaaaaaaatctcactctaaaacacgcgaaatatttctcaatttgcgagacaaaaaaattccttcctataggcgatacaaataaatcgaaacaactgctaataatttgaaatattagatatctagcctaacaaaatcgtcaactaaactccatagttaaataataaatgaagaaatatagctacagaagaatacagattaaataagggaatttcttcaggaaaaaaaatgcaataaaagaagggaacagaatagaaagttaattagggtctttaatcaaaaaatttctatcagtaatcttctcatttggttatgaattttttctcttcactttcattctgctcagggctataccgacaaacaaacagaaattaagcgtgaatagacaaaagaggcaaagagtacactacacatacatgtataacgtcacgatcgcaccaaggaatctgatcgccgccgctgaagaaggaaccgacggattcgaagaactttccgattttggcttccatctgcggaacgattactctgatgagaggtctgaaagagaaaactggggtcctaagttatatgaccttcaattcaagagagatgcgctatcacaatctaaacctttttcttcttcttctatttcttttaccccaatttgattaataggcacaagtacataccaatcacttcaaatcctaccttttttttctttttttaaattgcactaactaaccattttttttagttcttttttgggaaaaaatcaggaatattctaaaaatggaaaaatattacaacaatactgtgggccggcccaatgaacatttgtacagcccaaaatgaaaatattacaaaaataccacttgcccttaccttcagccgcacgtcacaaacggagaggatgaatgaagctccatcgatgcagtcggccacacaaccagaatgaaaccagatccaacgtaaaacaactgaaaatcccgtcgaatttcaataggaaacgaacaaatccaacgatctaaacagaatttttttttaaaaaaagagcaggacaaccgtggagaaactga

SEQ ID NO: 380764 - DNA, 992 bp, Cannabis indica
aaaagttgttatatttatattaggcagctgcaattgttgaacacatgaatttgatttttgttggtcttggtcatggaggataagtagtggcctgtttttctttatcaatatctccaaaagtccaaacatggcataaatattgaaatggttagtcctattattcccacagcagtactagctgtaaagcaagcaccaaccaatgaaataatgctactgttgtccatatatattttatcacttagaacagatattttctaaataactggccgcttcccttttcttcatctctaccctccattttcaagtttgaaatattatcaaggacaagtggaccacaaaaatattttggtgattataggcataatttaatagtacaacatttcttaccctaattataaagaagaagtctcaagttttttctttgtttttttaaattctttctttttgtagaaagaagaagtctcaagtttgaatgcttccccatgtggttgatgagacacaattaaattttatgatttttttctctatagaaaactctattctaatccttgcttgctatttaaacattaatacaaattgttgttttgttatttattggtgggtaaacattaaaatataatagatgagagaaatttacataaaatatgacttaacaaaaagcaggtttactgagtttcgggttcgcaagtttcgagaaaaaaaatgtaacccgcacccgcccgtgtatagaccggtcggttggctgagtccacaggtgtgcggattgcgggttgggtctgggtggtttggcgggttggtccaaccttttttttatacttacctaattatatataaacatacctaattatatgtaaacatgtctaattatacatgataaacatataacaaacccttaaacacttacctaattatttataaggaggaggttctaatggttacatttttattgtaaccacatagttacatttttttttagtcattggatcactatt

SEQ ID NO: 380765 - DNA, 5752 bp, Cannabis indica
aataaaaaataaaataaaaaagttgcataataaaacgttaattactacttacttcacttctaaactgaagtaatgcctccccagaaaaatcttgatttaaaaacttcttcacagcaacttcctgtcatgggaaaaggcaagacaggctataaacgatttcaaaatgtaagcaccatgaaaagttaaattccgattcaatcaaaatgagtactgtatcagaacttgacaattcacaattattttcttaggagaatgggtggacagttcacactattagaaggagagtgacaaaacattttagcagaagtatccccaaggagtagattttgacagaggaaatcgaaacgaaaatttgaaagatgctgaaagcatgaaagacagtagtgaataatgaaagtttgaaaacacaaacaaaaaattgtcactgagaccaccaaagacttacaaacatgttcaattgctgaatatattgatatttgctgtctccttggaggtactacaataatataacactctcatgttgcttctagagttaaaaaaaacaatcatgaacaaagtaataaaagatgactaacttagtcaaaagatacttacagtgccattccaatcaccatgataaacctctccatatgaacctacatgatagaatattatcatgtgagataagactcttaatggataaagcatatgaactttagcaagcagcaatatagcattctaatcacacattctgctcacaaacaaaaagagtgactgacagaaatggaccgaacccaactttgttttacaaaataaaactacaaacagttgggcaaataaaaacttcatgtttaatactacccaataattcagccgcctcttcatctttcattattcagcaaaatcaaaaacaatttctaattttctaggcatgccaaggactgcttgaataaccatactggacagaaaccactggcataaaatttctccaagaaataccaaacaaatatttatattttatatacattggtagaaagggggaaaaaagtcagttctctactacaacagcatcaagagatcggtcacaggctttagcctgaatagtgaccaacccctgcctccattgttgatgttgagagtttgaataccccaactcacttgtcaaaagaaaagaaggaaacatacacgaacaacaacaacaacaacaacaacaaataacagtagccaaaacttttctttagtcataatttatcaatgaatcctaatagtctcgagaaaaggaatccttaccaataccaattcgctcaccaatccgaagatcctcccactgaatttcccactctggagcttccccgagaacagcattgattctctcattttcagagtcagaacacaatcgacttgtggccatttccattcctttagctgcagatacctttcccaaatcaaatttatttgtatcctgggagaacttctttctatcactaaaataggcagtatcaacatgtcttcgaaaagagttagcttcgaaaggaaaggcatgctcattaacttgctcctctcgcagagcacttgggtattgtcttggtgggttaacaggaaccatagctacacttaaagaatcagtctggataggttcgtcaatattattagcagcaaacatgtatccctggtcagtggcatcggatgtcaggggaagtttagacataatatccagttcattttgtttctgagcaaaaccttcagcagcttgtttttgaactatatcgctatcaatatagcttgggcaatccccttcagaaatgggcacaagagactgttcctggtatgaaaacaagttatcctggtgatattgaaccccatcaaccacaattcttcgatctcccattctgtcttcatcaacatcctgtggtatatccgaaaacaaatcgggaggaggtgttgctccactttctaacaagacagcatgtagtttctgtgcaaattctgggtcttttgcagcactgataacatactttgatacattcttaactctcttcttttgtgcagaagatgcttttccaccagcaaccaaggaactctgacctgatctctggggtgatggaaagtactttgcaaattcattttcacatctctcattttgattttcttcaaccaaacgccttgcatcctctgttgcctgagtgtccaaaaataatgcttcatctgatcttgaactcccatcttttgacagtggtgtttcaactccttcatcatgcaacattctcagacccgtgggcattacagtgacatctgctaagctccttatatcaaggaacgaactaggaagctgactactgggtacctccgcaggtatcagggtgcccggagcacccataagatcaatgatgtattcactgcatggaatagtaaatcagctacacatatagctctacaatatttaacatctctgatatctaactttgcttagaaagaaaaaaaaaatgtgcatgaaagatcacacacttaatcatatgcttaaataagctgcacaacatgctagtcaaaatgtaaacgaaataagaaagccagttgattcatgttatcaacaaaaagtgtcattttaaactttaatcaagttagtagcatttaccttccatcttcaattttaatcaagttcacagctccatcatcggtaccggtgtagtaacttcctttgaccagcatacatggaagatttatcctatcagctaggacctggcaccagaaatataactaattacaaattattgcacctcataacaaacaaaataggaaatgggcaagcaagatttaaaacaaagtaacaagaatttgaaactattttgacactgatataaatttataaacagactaagttgaaatctggcacaaccttaaagagcaaggccctgtggcgtgatagtccaaaatcaagacgtccaatgggaagtataatagtttttaaagtattccgtaactcattcctccgcatggtccattttctagtcatatcatcagcatcaccaaccggaccacccattctatccacaacaatgtcagcaattttctgtatcaatccactaaaaattagaccatggtcagaaccttgacactccaatgatatatcagatgcccttttctcaagctgtcgtagttcagaatccaacattcggttaaccaaaattacttcataatcaacattatctgaaacagatagtacttggagatcagccaataatggcatccttccttgggcaagtgagtttgaagaaacagtatatacgtcataaaacccatccaccactttctcagtgtaatttacaacattatagctctgcattagataaacatggaaaatcagttaagaaaggaaatattatcaaaaaacatgcagctagtcaattgcagaccaatatagcacggcatcagtactagtatactaaataagatgatccaaacatggaacctggactagaaaggcaattctcatttctcaaagtcaatcttaatctaacttcaggtcttgagaagggagtaagtacacattcaagtaaattaaattgcctaaagaatcaaaattgataccaatatccataataataataaacagctcaggacaaaagcaactactagtcactcaatactagtatactaaataagatgaccccaaacatgtaacctggactagaaagacgattctcaaagtcaatcttaatctaaagtgaattaaatacccaattttgtataattagaattgcctaaagaatcaaacttgatgccaatatccagaataattattctattcatcactaggtttcaactccgacattacttacacatagacatatgaatgaaccagataattaacagcattgatttaagaaaatgatacaattctactcataaattctccattctcatagaccgattcatacttagctagcccatttccaagtacaattgcaacacaatttcttcaaaaacaataattgagaaagagaaaattacccaataatgaagcgaaagaatatcgacgcggcctttattatcagaaaccgcagccgaacaacccaaactaatccgcttcgcagcatcgatctgagccgactcaggatcctcacgcgaatcgggatcggaagcactaatcgctaaagccaactgcacctgaaactcctcctccaagaaattaaaatccacacactcaccaccaccaccaccaccgccaccgctaccactaccactaccaccatcaacaaccgtacgatcaccaatcgaagaatcaacgactccgattctccccaccattgtagccgaactagaagtcgaaggaatcgaagccgaactagaactctgattcgaaatcggagtagtaacaggtctcgtagtctcacccaatctttggtgttgctgctcattgataccaccgcctccgatgtggagcttcctcagtagatgcttcattttcgacatcgatcatcaatcaatcaattcaaagattctctcctcttcttcctcctccgtcgaccaccaccaccaccaaaaccaaactccttaacctacgccactactgactaaagcagattcgcttaacctgcgcacaccttcttcttcttcaagctaacacaccactttagagagagaaagaatatagagagagaaagagagagagttaaattaaccgctcaaccattccctccaataatcccaaaagattaattatgattaattaaaattaaaatggattatttctcttaataaccattttttttttctttcaatagagtcaaacactcttcttctcctttctcttttactgcaaatgaaattttaaaacacgctttatattataccccttcttccatggttgcaccaccactgtaagcttatcgtggtcttcatttgatctccgccgtttattttctattctttctaatcaaatataactcgcttgatctccaccgttcattttgttaagattttaattttatgatcccgtacttggaattttttaaaaatttatttagtgtcaaaatagatagaagatttatcgaaacatctcccttaattagggatgcacacggagcggagaactaacggggagtgctctcccgtcctcatccccattaaagattttaatccccatccctgccccatccccgcttattccccatcggggacggggcggggaatcccctattgtaaaaataaaatttattttaaaaatttaaatgtataaaattattaaattacataaaagataaaatattacatattatttactattcaatatagtaattattatacaaaaacacaacttcaaaaattgtaaaaatgatattaatatactaaaaaaatacaaacgcatatataaaatataaaatattaataaaaaaataattaataaattaaacgggtccccgtcggggcggggagtgtcatccccgtccccgccccgtttaacattcggggataaaatttgatcctcgtccccgccccgttccccatttagacggggaattcccgccccattaggagcaggtccccgcggggtcccatccccactgggaaaaatgtgcatccctacccttaatagtataccttaatgtagacttattcaaaaataatattttaaatttcataattataaacacactctaagcttatctcaatagtttatttcctatattctctaattcaatataacttcacttgatctcaactattcgatttttaatttgttctctagtcgaactttcaaagctagactggtcgc

SEQ ID NO: 380766 - DNA, 2062 bp, Cannabis indica
agaagaagaagaagaagaaggcacacggcgaagaaagagatagaggggattcaagtttgtgttttgggtttgaaggaatgatgtgtgattgggaggggagtgggttacttaaggttaaggctatgtttgagagaaacgaaataatttgaacttaattagatctggattgggtttttgttaaaagcaagagaatctcttacggtttaaaaccgtttgagatactaaaacattccatcaagtttcaagaggtgtggagggagatacaagtagaatgatgtccagtattagaatatgactaaaaacttgtgaataatagtccataaaatttgtaaaaattttcaagtgtggaagaattcttctttccaagattaaatgaagcatcttcacgataacaattattgggaaggagatattagaatttcaatgtatttttttttttttgaacaatagaatttcatggattaagttttggcaaattcgttaaattttcgaccacttcattgtaccatttttatgaaacttttttcaaatttttgaatccgagcaatatttagatacaataaatcacataaattttaagtttttttagcacaaaattcgtttccctatgtcttatgcacccaaacaaaaatttggtcaagtttcgagaggtgtggaggaagatacgagcataatgatgtccaatattcaaacataaaaagctcgtgagtaatagtctatgcaatatgcaaaaaaaaatcaattttggaaaaattcttctttccagcattaaatgaagcattttcacgatagcaatctgtgaatgatatatattagagtttcgtagattaagttttgacaaaattagttaaagttacgaccacctcattataccatttttataaatttttggaatttttaaattcgagcaatatttaaaaataatagatcacctaaatttaagattttccaagcataaaatttgttctcctttgtcttatgcacttaaataaaaataatgtatgatattcaaatatgagtaaaaaaaatcgtgggtccacaaaatttgcaaaaattttcaattttgaaaataaaattcgttcctagcctacattaaattaagcattttcccaaataaaacgtccttattttacatacattagacatatcactttttgtattctttttacctaatagttacttgtgcacaaaccatatatatttttgctttttaagttatttttggtcattttactaatttataatttgtagttattttacatttagacggttattacttaccatctaagaattaatggtatatattgcacattataacttgaaaaaaaaactcaaattgtatatataaacaaaaaaaaataggtacacctaataattgagaccttacaaaaatattctaatataattattttaaaatcttaacacataactctttacctaataacatgcatgaaaatatataaatatacatatatatatatatatgtacttatcactccttcttgtcatggtctctatcaaaaggcttaagcaaagcataagtaacggccatggccagccatcctccaaccacaactctcaatgccgaaaccttagggcgaaaggacccaccaaactcggcgctagcccaaccaaaaagggctaacgccagagtagccaccaccacaatccctacaactctcatcgcgtgatcaacaaccaatgcagccggtatcaaaggaacaaccgaaccactcaaaaacgccagtgctgaagccccagccgccttgtgaggattcggcaacacaatttctcgactactatctaatgcatgatcttctgcaaccactcttatagccggtgacctccccggagtagaaaccctagaatactcgggacacgagggcttgttttcttgaaaatagtgtttctcttcaatgtctcgttgagttgaaacggatacatactctcctaccgccatgctacaagcccccgctaaagctccagcgaggccagctagagccatggaccaacggtcatccttgactgcaccaacaccgagcaatagcgaggctgttgagag

SEQ ID NO: 380767 - DNA, 4001 bp, Cannabis indica
caaaggcatagttataaattagatctaattaaaggtattagatgtgtttctcgagatttttagaaacagaataaaataaaaagaactgaagaaacaataattgaaagagaaaatataataagagacaaatagttttttacgtggttggggcgttaactagccttagtgtacaagtcagttttatttaataatgtgttttcttgtatatattctcaaaggtatacatgatgtatctttgtatgtttgtcagagcaaaagtacacgtgagaattcaacccctaatctgtgagattaattgggtatttatagtagttggagaattacattagggttttccatttcccctctactaaggagcttacaactgaacaatgtctttgggcttactcatgaagtccagcccatgaagaacacaattactgactaggccaatcaggcttgagttgatcatgtcaaaaccgtatccaattataatgggagaatattctaaaataactgccctgcacttatgatattctggcccaatctgatagctggagtttccttatttataggaggaaaaaaaataagaaaattggaagagtctttcaagaacgcaactcctcttccctttgggctcatgataccggagctgtcttccgggattaatgtgttgagggcgaaaggcactgtgaggacggaactaagataacacttggagggtcctatccaggtgggcttggcccactctatccctgatgtgggtttcactgatgagtcttaaatgtcaacttggaggccacatgtccaatcctagaaatgcgggtaacatttagcccccaagctttcaggatgttgcacatggtggaaacttgctctaatctctttgttctagacatgtggagatcggagaaagaaaataataacttttcacaagttactcgaccacagaagctgacttctacctgtgatgatggtgcatccatgtggcaatcgagcgtgttttaggatgtggttatcaaggagtcatcttctaggaatgactatatttcgacgactgctcaccgactgacacgaaaattgaaaaagggcgtcttcattattatttcacccctttattatgaagagcattaaatgcggagatacacatagattgtttatctccctaatctttggatgaagatcgtgctttatgaagaaagatcacagcagtccattccttcttcacgtggattgttgtccatgggtataaatatccctggtaaccttcaattaccacttttactctctttttcaaattttccaactctcaaatcgcaccagactccttaccaccccaaagctttgaatcgtattcaaggagaacttttcttcatcaccctggaaggagctatggactactacattcacctgttgctgagaattggggctcgagaatatccccatcttccttcgatagtgaccaggatggctacagtggaagaaattacaagcctggactttggagaggaaatcgactcattgatcgcctctatttcttgtcttcaggagaggtgcgatcatcttcctgaaccaaatccagcaacaatcaccttgaattttcccttaggtagatttaggaattacaaattgctttactttttgaattttatttaggaatttctccaaatgtgctggccaagtttttgccaaaagcccttaaagtttcgggtcgactgttagtctgtgtcgtctccctttttacattgcccttggtttctagtttggaatgagtaacccctaggagcaaccatttctaagtagtgagtctagttggggacctctccaagcagtttatggggaggatccccagctccctttctatattaggtagttagggtagctaactgcttggatgtccttcttggatacagaaaccatgacgaagtgctcttgtcaaaacaaggttgatttagaagaggagatgacaaaacctcaaagagcttctcagttggtcctaaacgtcagtctgtgggaaatagaccagcatgtccattcgttcaggaattacaaaaatatgaggaaatatgagatccaatggggaattcaaagtgttccatgactgtgtttggaacatgattttcgtacctagagagaggcccaaccatggcgcggaaggaggcttcagtgtacggagttgggctcatatttggatgggggcacatcagcctctgaggtgctattttgatgagtttagtgccttaactgaagtagcaccattccagttcataccccaagtcttccatcttctgtcgagatggtatgtcttctgtgtcaaacacggcaagcctgtaacgactccaaaataggtcttgtacttttaccagatcaaatcacagtcgatgagaggttacaagaatcagatgggcttttacaggttgcaaagatatagtacgagtatcccttgcccactagtcacacgaggcacatgcgtgactttaagaattactacttcttcacctttggctttccattaaggagggttcccaccctcaatttagactgccgtcttgaaagtaagtcttgactccattttgactcaaaaaattctatttttgccctatactcattatattatgattcaccactattttttagtgtgctagaccgccttcctcaatccacctagactccaaaattggaagagagaatcaacttttagaaatccttctcgcccaaggagttgcaagtggaggatctggtgaccatggagaatcttccggaagtgggtctcattgccccacaccaggatataactcatctctccgtgaaggagtcagtccaggaatcctttaagggggacttggaagaagttagagaagccatcgtagtcattactgctaagaaggatttaaaggcggtgaaggccaatgaacaatggctggaggattggagaaggcaattcccaaaaggcctgagcaaggctgaagagctttccatccgcttcaaggatgtgattcctaatgaaggtgctccgagagcgagcactttcagtagtggtgagatgccttttcatataattagggctcccactgtgtctgacttcaagacggtcaatcaatatagatttgatccatacttcttgaatttcgatccacataggtattctttcagtagatatgtagataaggtagattgtattatccaaagtcctgaccacttcatccctcctgtgcaccatcatgttcgagtggatgcatttagcaaaatctatttcccaagattcttctaatacaaaaccaatttaggtcaggaagacatcgctctatttgctggggaaaaagtcaattatgctaggattaatggtttggaccctcttgaagtcttccaggcttatgtgttgtaaaattcacgccttttgctacaatttcttttaatggatattttgtgtgtcttattcagatcaatcagccactctccagatggggcttctaaacaagttcttgggtagcatccatgctcgatttgacgagattagggagatcgcctaaagcggtggtgatgatggaaagaaccaggcctccaggagcagatctcttgagtcagcacccccggtatcgaatccaaaagctgctccaaaggctccaggtatggacgcgacatctactaccatcatggacttgaccgagcccttcttgttagtggaacctctaaaccaagttcccttggagagctctggaggagatagttcttactacaacggacctgtcgtaattaatcaaaagcacaccgattcatctaactgtggcgccaacaagaaggagagggtggaaaccaaagagaatgtcctatagctggcagcctcgaggaggcaagtagcaaactctcaatcccagaagggaacaactgttgggttttgtgccctaaataaaacccatttcaatataaccagatttacttattaataaagatcagaaataatattttatgttgcatggtccacatgatttatttcatgaaaatatatataatgtatgaattct

SEQ ID NO: 380768 - DNA, 2123 bp, Cannabis indica
tatataaatacatacatacatatttatatattttttttgagaactatacagatttgtttctgtatctaaataacacaggtctggagacttcaagcagccctgggggaacagacagaaatcactaaatacagccaacaagagttcgaaagactccaaaatgtaatttatatcattcttgattaatttctttctttgaattcttttcatgaatctcttatgtgaattttattactaagcttccttgggttcagaatgcagggtatgtatatggttagtaatggctcttaaaatatgcacgtgtatggttgttttgacaatttgaattgcatgtagtctgtttaaagcatattcttaacgtagagtttgaagttcagcatataaaattctgtattttgatatgagtcaattactagatgtttgtagggttaattttaaacttttttgttgtacagtctttttagggagcatattagattgtgttggttgatacctggtgcatataaaatgtaagatttgcctattcatcatctcattttctacagagccgctcgaatttggatttgatacgttttgtttacttcactggtttcatcatcttttatttatttttattctttttctgcagatccactctgtctgtctatatctttgttgagatcctttgcactttcttctagtagttctagactttttgtgtgtaagttttttgtcttcctaagtgctgcattcttttgttggtcaggaaaaagttttatgcaggatttgcttcgagagagagatcagtgtggtcctgctgccatgcaggcatcgcgttctttgcaggtattactatcttattttataatgaactgcttcgattttaacctcagcatacgattgcctctggccttgtgtttatcgtcatcttttgttttgttttttgtctttggatggtgctgcagtacttgctgcgagaagtgcaaaaaatgtccaatatgccgcatttctgtcgagcaacgattacctgtatatgatgtttaacttggcttcttctgtgagattaggaattggtgcttacagagaagttggtaaccttacatagaacaggttttcgtacagtttctttgaacttctacagtggtgagtaatgcttatcctattggccacagatggaaggtaatttgacaatgacagaatttgctaaattttgtcaacttttgcaatcttaatctagtaatctgtaaatatactgacccttatacgaaagtaatattatagctggtattgctagcctttttcatatattatttatataaatatactttctccaggtttatatataagacataattgcctcaccaaaaatctatagttactttgtatattttctaactttagagtaagtattaatagaggaagtatcactatcactaatgtcaactccttttcccaacaaattcaagtacaaagctcgacatatacgttgatatgtatattttctaactttagattaagtatcaatagagcaagtatcactaccaataatattaactcctttccccaacaaattcaaggacaagctcggcaaatacattcatatttcatacgcaacaatttgtaacacgttctcttggctacataacaattgtttcacaaaatcctctctacttaaaatagatgtttgttatgggattttctcaataaacttctcattatgattgcttgaaaggtatagcattaaaaatttaaaaaattgtcaaaattgctatcggtagaagatgaactaaagctaaaattatccttttggtagttctgaagattatattagcatgcaaacaattaatttagacgaaaaatgcatatagaaggcataatattttattcaaattttgatattggtttatgtctaatctttgagtaaattaattgaaataatatgtcgccaaagtgatctcttttgtgtagattaatttatttaaatattaggatggttgtgtgtttgtaattgatgcatatattgactagtccctaggtaagtgaatattttgctaaatttcaaacatacctgtggtaataaatatgtgacaattataagatattttgtgtgaacaatacgctagtccaaagattaatctattgtttga

SEQ ID NO: 380769 - DNA, 1274 bp, Cannabis indica
tgcaggttgtggtcctgagagtgtccttgcattgtagaggctgtgaaggaaaagtcagaaaacatctatctagaatggaaggtaataacaacctcacaactttacgttatagttcagaaatttaaattaaaaaagtccatccttttcatgcaaatcatctctgtttagaagacccatgaatgaattttttgattatatgaggaggaggaggaaaggaggagaataaaatattacttaaaattttactaaaaacagataataaagtgtttcgttatggtatttttgcaaatgtgggagtgcaggagtgacatctttcaacatagactttgcagcaaagaaggtgacagtagtgggagatgtgaccccagtgagtgtattggcaagcatatcaaaggtaaagaatgcacagttttggacagcatcatcaatctcatctgtcacaccagcaaatccaaatccaaatcaaatcctacgttcaagcaacaacaacactaaaaataatcaaaggcttttaaaggctaatcacctcagcttatctttgttgtaaatgcataatatatctgttgattagtagaaagtttaaagtagagtaggaaatcacctattggcttctctcattttcttgttatgcttttgagtttgggattcttgtttgttattctcattaaaaagaacatatataataatatatatttgagtggagtcttttaagtaattatataatgtcataaaaaacttaaaaccatgctgagttttggccctatattgtatagtttatcaattcccttaactttgtagctataggccaggcctttgtgcttcccaaatatgttcttccattattacaagtagagttattattctcaaggataataaggctttgaaaattgcaactttcctgattggtggctcaaggccaagattcttgatttttggtcacatttaagtccataagaggtaaaagaaaaatgtacataacagtgctcactgggctatgaaaccacaatccatttagcctagttagtaacgggatgtattttgtaaggatatcctctctattgggtcagggattcaatccaacaaaacctcacaacaaagtgtgaaaatagcacaagtgatttggtgtagtgattttaggtatcccctttcttttagatctgggcccgaaatccgcatcttattatacatacatacaatatatagggttaatttcacaaatacacaaaaacaataaaaaaacaacaaaaatacggtttcacggaattttaaatatt

SEQ ID NO: 380770 - DNA, 3312 bp, Cannabis indica
ttttttagttgtaatttgattatgggtcttattaatatggggatataatcatgcttcttgaaaaaaaatttcgaagaggtcacacatagtaagattactactagttaagaacacttaattttagaatttttaagtgatagactatcagaaaacaagatgaatctcattgatataaatattatcaatcattctatttaagtactcttcaaatacttttcaattatgtggttacttacttacacagtttcagaatcacacttgaccttccttggttgacgtgggcattacttgatatttcccttatagattatgaaattatttactgtcacaccataatatttctcatcttattacttttggttttgctaaatttataaatagtcaaaattttgatttaaaataaaatgtttggcaaaagagttaagtatatcctattaatatatttttatataatgttaaaaaaaattatatacatattatcaaatatttcaatgtataattgtatcaaacatttatagtacattttttttttcaaaagtagcttttaggtttttcgaaactatactaaacggaccctaaaatgtattatagaatttgtgatttaaatcttttttttaaacagagaaagatattaaaacaattagtgttagttatttttagttagacagttatgttgagtcagttggaccttgtgaactctgtacactgtatatatattgtcctatgccattgtattagaattcaattcaattaataatatttttactctgttttttcattgcaaatgttctaatatggtattagatgaaacaaagtgaagctccaagaactcccttgaagcttccaagaactcaatggtgagaatcagagccactgcttcaggtaccaccaccagtaccgtggttgatgccaccatagctcagccaccatcccacacttctgcgcaaacacatactgatccatcttaggcttctaccgatcttcctccttgatttgatcttccaattcaggttcctcgcgttcctccagctgatcgaccggcctatgacgaggtcagatctccattttatctcagcaatgtcaatcatctaggctcagccctcgcgacccttattctcacagatcgaaactttcagccatagaaacacgattttaagctctccattgccaccagaaacaagacaccatttcttgaaggtacccttcctcaaccccctcccaatgattccctctatagttcttgggttagatgcaatcaaatggtgatgtcgtggattctccactctgtatcacttgaaataaaaagcaatatcatgtatcttgatagtgcctctgagatgtggactgtcttaaacaatagattcaaccaaggtaatggtccaagaatctttgaattgaatgagacaggaaaacaggtccaaaaccccactcaatacagaagtctcatcggcaaactcatctatttaaccatcaccagacccgacatctcatttgttgtcaacaagttgagccagtatctttacacaccttgagaaccccacctccatgtagccaacaaaatcctctagtacctgaaaggaacccctggccaaggtctattcttccatgcctttgcactagcaccacttcatctccaggcctttgcagttgatgatttgggagcttgcccggacactcgaagctcatgtttgcatcttccttggcaattctctaatatcatggaaattgaagaagcaacacactatctctcattcctcagctgaagccgaatacagagcaatggctaatgccacatgcgaactaacttggcttcactccatcatgcatgacgtcaacatcaacatcaaactcccttcaacactattctgtgacaacattgtagctcttcacatctctgaaaatccaggttatcacaaacgtacaaaacatattgaaatcgattgtcacctcattcgtgaaaagatcaacaatggcaagatcaagaccaaccatgtctcttccaaatccaacataattgacatctttacaaaacctctctttccaacacatttccataatttagtctccaagatgagtgttaaaattttttccttaacttttcagttttcttttctcattttatttcaccaacagccaaccacacgcacacagtcactgagtcacacactcaggcacccaccctcccaccatctcttctccaggcagatcgacgacaaccaaaggattgacgaccaaatcgatgacgacagcacgcctcctccatgcacgattgcatcacaaaactcctccatgacatcaagtcgtcgacctcttttgctcgctcagttgatcacggctcacgctgtcctcgttaaggtaaggtctttgactctccgtttcacagttttttttttttctgtttttttttattttctgttaaatatataaaaataatatatttttttattaaaaattttatatatattatataatatatttttatattctaaaatataaaataaattttcttataatatatatataaattttattttaattttttgttatttttattagttttaattttttttaatatgtaattataatttacaaataagttattaaatttattagaatttagagattagagttagtaattttttttagattagagttagtgattaaacttgtttaaaaaaatatgtatatctttttaatttatattatgtttgttatgttgttaatttatttaagttttaattatattattattattattattattattattattattattattattattattattattattattgattagttgatgttaaaaaaatgacatgtatttataatttatttatgtatttatgtgtgatagtaaattagtgaatcagtgatagtccggtttgctcgacgctcactttctctaagtttcctttgatgcacgactttgcatttcaatgttagtgtattaaaaaattaaaaatgttcataaattgttagagaagtttgaatatcttaaacattcatccatagagaaataagttatgtgattaattatactgcagtgaatgtcgaatatgcatgttagaggagtttgaatgtcttaaatattcatttataaaaaagtaggttctgtgattcatttgtgattaattataatgtaattaacggtatatatttaaaatataaaaatggtaatctaattaaccaacccatcaacgcagttaatcacagtacctacatatgtcaatatggatgaatattatatatttcagaatataaaaatatattatataatatatataaaatttttaataaaaa

SEQ ID NO: 380771 - DNA, 1508 bp, Cannabis indica
gtttttgccttttttttttctctattttgggatatgcaaagtttactttacccttaatatttaggtttgtatttcatttagaaagtaaaaaagaaaagaacatatctattatctattggagtagtagcaatagtagtagtagtattgtgtacatgattgactaatgttgaaagtcagaaaatttgtaaccccagaatagggcttagttatctgattactactagggagacatctacattattgtgtttttcatcctctaatgatggtggggttacgtttggctgtccttttctggacatcactttattaatatcacgggtccttttaccttaaatttgttgacatttctaagtatgcaatgaacattggtggtggtgtcaatggtgttgtgtgtgttgtttgattttctgagatatgaaagtgaaacctcaaaagggttctttatgctttttatctttctttttccttgctagattgatttgtcatggaggtatcaacggttgatgatcaaccaattcctgacttccaattaactgaaaatgtctttgcatgtggagccttattttccaaaccaaataacttgatactctttttattctttacaaatattccatgtagtatacaaactacactttccactatttgaatcacttcggagtataccctttatttatagcagttgttaatgtatataatctctttgttaatgatttgaaaggattagtacttaacaaccctaattatgacacacatgttctggaagatagggaatgaaataacatttatttatatgctttatttttttttaatgagaaaaaatgtgtgtctactccacatgcggtgtaaactttgccttggaagcatgaaaagaagatgggaaaaggaaaaactaaaggcaaagtggtggggttgttaagtgaactctggatcgtacatctgtgtttaaaggcagtgagaaaagaaaagaagtagaaaagagaagtaggagccatgaccacaatttaatatcacttatgacttaaccccttacagctgtgattgctaaactcacaacacaattacagaatgtggaaaattctctttgaacaactccctccggaccatcccatactgttttagtttgagaaatcatatatatatattttttttatatataaaacattattacttttaaggcatctggtaaaattatagaatttgaaaatattaagagattaagcctgttgaaatcagaattcaaatttggtcatcataaaagaaattagaattgaaattttgttccacacgttaaatatatatataaataaaaagttaatgtaataacactgttttggcacgttaaaataatttttcttcttgcactattttgttcatagtgcatctaatctgcggatttttattttttggattcaatccaatttgtacaatagatcaaatctaattcaaaaaagtgcggattggatcagttattttggattgattacttcttaatattaaattatttaata

SEQ ID NO: 380772 - DNA, 2206 bp, Cannabis indica
aagaattctgaagataaatcagaacgtcaatataagtaggacaaagtaaggtcttcatagctcctcaaacatgcactattacgaaaaaaaaaataaacgacagtatataaacacaaagacattgtttcaaaatctctctttataagtagaaaattaccatgaaggcgacttgctgagggtccctggttaatggggaaacagttgtcggcgagactctgtacaactcaaaccattagattcaaacaagcaaggcgaagtggttagagtcaacaaggatagcaagcaaacctcacagtaatggcgattccttgcaactgctgcaggattgcatttggttttgcgtagcttggtattcgtcacatggtcacaatgtagtgccccacataaatcagctaagcacttgctgccattctgtgttcaacaaaagttaacagcatcatgataggaattttctatcaattttttttcttttttaaaaaaaaaatgcatagtgcacctagttaacaagctaattagctaccatggaagagtcaagacagaaaaatgatctgttctacatacaacattaagaagatcatagtgcctgctgtcaaaatgctggtcgagaaacttttcagcatagaagctttttttacagtacgaacactgccattcatttgtatccacatgaaccttgtgctcctcctgatctctaaagatgtcattgtcatggtgaagtcgacacttaattggaatctgatagtgtgcttgttccacaaatggtgtcaagtactagatgatacacaacaacagctgttactcaaaacacaaatttatacaaatatagataattatgtttattgcatgatgaaaacctgtaatgatactcagcatttggttcttacatcctcaatgattttccatgctactctacttctttctctagaacaatgtacttctagagcatcttccttaccatgtattagtgctctaacataaaaaaaaatacaaaaagattaggcagcctatacttcaaactataagagcagttataagtaatcataaagacagtcaagcactctaaacaatcaaatgcacctttacaccatccaaatttatctcaaaacctcacattactaagaaataaactttattaaagaagaaaattataccttgaatcgtcagatccttctttggcctggatgaaaagtacacaaagcttagtaatcaaaacataacacatcaatagatcatacactgtcctccaatgcatcatactaacaaagtagccaaattatgaatttgagtaaccacaaagaaatccacaggcacttttactgaactgaaaattactatacaaacatttaacaattaactccactgcccaaaacaagacttcattttttcaggggaatcaccaaaaagaaaaaattacttccttgagcaagcacataacaaagttctttgttacccagtttctatatcatccttgtagaatatagtacaaaaataaaacaattgacctcaaaaatcataaacccagttcttaaaattgaagctacctcgtacacataattttgttttcaagaaaacctctaaatttatatatgtatggaggaaaagggtacctgttttccttggagaaaaaggattaccaagaacgcaatggaagtaacggctctagctttcttcatttctgtcaaaggtccaaactttaagctttggaaggggaatcccgtttcacttgggctagtgtaagtttattacaaggtgtttggaagccaagaaaaccccgtttctattcggagtagtagagtttgtagcactgattaagaatagcttgatttcaattcctcgttagagttgtacatctctgtcataacacataattgcagagacagagagagaaggagaagacggggatggtgtgtgttgggcgaaaccagcgaaaactcaataaacgacaacatcatgtacaaaacgacagtatcttaatggataattagtaaagacactatcatgtaaaaactagggcggtaaaaaaaatttgtaaacccccaaatcgaataatctgctgaagttaaaccgaaaaaatcaataaaaattacaaatcgaaataactcgaaaaaattacaaattccccaatctgttaattgggcgggttgaatataggtctaacccacccaattaaaccgaataacccaaccaacccgactttagatttttt

SEQ ID NO: 380773 - DNA, 1829 bp, Cannabis indica
cgccaccttaaatcgtaatctaaatccatataataactcatatagaaactaatagagcaactcaaactataaaattagaaaaaaaataaaaaataatatatgaagtgatttttttaaatacttcaagctattatctttgtcaattttaggtctttctcttcaaagttagtgttttaattttccatcaaaaaatattattttttattttaaatatttttacaaaaaaaatgtatgactatatgctgtaattttctacattttttttttggaaagtgggccataacatgtttaaaaacaccttaattttttggacttgcttgttgacatttgacattttatttttctaggaaggatataaaaaataatttataaagttgagaagaaaaaaaatttttttttttggttttatgttgaaatttgtggacccatgtgttttaaaaacatcttaaaagctaaccaagaagttgggaagcccaataatgatttttacattggtccaagaataacactctcccatattggtatttggagaagtgtcaaattctgaccaaaaatacagatatgacaatttaatgctcattacattccactcaaccataagttggatttaaattgagtttgattagacaaagtgtcactaaccataacataaatgtttgacttttcaggtcttccaagaggtgcaaaatatggcataatcataggagttggaataccaggactcctatgcataattgggttagcaagtttcttatgtggaagagtaagagcttgcgggcaacggcagcagcggcgcggccaacccttctccgagccggagcaacctatgccggtggtggtggtaatgggctatgatgggcccacaattgaatcattcccaaagattgaattgggtgagagtaagagattaccaaagcccaatgataacacttgcccaatatgtttgtgtgagtatgaacctaaagaaactttgagaactatacctgaatgtaaccattattaccatgctggttgtgttgatgagtggcttaaaatgaatgccacttgcccactttgccgtaattctccggacactgacaatagtgtcacttctgcttcttcacaatcttcttcttctcatcttgttagtccttctacttcaatttcttcttcttcttcttctttacaaacttcttagaataaaaattttatttgttttgtacatatttggaagtagatttcagatatgggttgtttgttgttatatgtactaataatatcaatgtggatcttagatgagtagtgaaacatttttgtttaagggtagtgttttacaatttttttgtttaagggtagtctttgttcttcttattattttttttaataacatttgttgattgtgatgtgatttagtgttttttttttctttttcgtaaatttgagcaatgatgaatgcacatttaataatgaagcaataaataaaaatgtttaataataatggtaaatttgtattgttatcctatatgtttgagaaccacactcaatctctacataatttggtaaaagtggaaatgcgtaaaaggaaaaaatctcaataatcacatcactaaaatggggtaattattatttattatttaaaaaataaatgtaagaaatttatgatagaaaatcaaattaacaaatgttattagtgaaaactaaaaatgcagagatgttttgtttttaaaatgtaataattaccacttcaagataatatgttctctataacacccacatataacattaataaaaaaagtaggggaacttacaaaaatattggaatttgacttaacttttataaaatactgtca

SEQ ID NO: 380774 - DNA, 2883 bp, Cannabis indica
aagatgcaataatatatcactaaaccaattacaaaaagagataatatatccaataatgcaaccgtaaatacaaatgacatataattcttttttgaaaagaattaacaacattgatgcatgagagcagggatcgagccacccttatgcaaagggtggccatgcccccctccccaaaaagaattgaaaaaaaaatattctatttcttatgtattttttgtttaattttttcaaaaattataatttagcctcctcttaattttaatttctttcttttgccctccattaatttaaagtctccctccgcccctacatgagagtactgatgaacacaaaggccaattctgacatggatggctggctaaagcttcagccgtaataagagtacacgtagtaataataataatcatagtattttgacataaaatatatgttttatttgagcgtttatagtaaaaataattggatgttaattttttttttttaaaaaaaaggaaaaaaaaagttggatgtcagtttaaaacacaaataataagaagtctatattcaaacatgatttactaggttaggcaaacttaatcaatagtcacgttttcttatggaggatgggggagggtgggtatagttggggttagaagaggggttggtatattgaatatatacaatggtgtctaatttataagaaaaaaaaagatatataaatcaatattactaattatttatatattgtaatattttatttgaggaaaccattgtatctataaccacaataaaataatttttctcatacaaaactagtttttttttttttaaactacaaaaactaagttatcaatggttttgctaacatcatttcataaatttaacgatatcatatcatcatgaaaaaagaaaaaaggaaaaaacataacatacgtttatatgttgcataaccaaaatgaatgaattacaccaaacttcagctagagatattgagaaataatatttctagaattacatactttaaatagctaaaaaaaatctagaaaagcctcctaattaatacacatcataaaaccataactataattttttttaggtgttagatggggatataaaagtttagatatataaaagttgacaatcctttttctttgaaaaaaaaaagcacattatatttttctttaatacatagttatgctataataatatttgtatatgtacttagtgaagttatatgaaatagtgttgaaaacttcttatttgaattactttttgttttgacaagtaaaaaagtttaatttcaattttattttctaagtacagtattcccttataactatttaggactacaaagttctataaaaattctaaattatttagggttttgaaataagagtataatagcttgttgtacagtactcgtaaatatagttatcaattgacatgaaaaataaattagaaaaattgactttatttacaatttttgacccattttatctttggtcaaataaaatctcactatcgaagacaattgaagtgaaaacgtaggttccaaaaatactgaaaacgtaaaacagacctatttcgtcagtgattacaaataaccaaaggcataggtagagttaattttaataatcttgtgggttaaaccctatgtcttcgattattacaaaataattttaataaccaaaaacataaggctatttatgtctttggttattatagaaaaaccgaaaaatatagggctattcatgtctttagttattttgtaataatcgaagacatagggtctgtctcgatttttttttaatttcgtattaatttaattatttcttaatattatttttaattttaattactatatattaatttttgttagtgattatatattaatttttattaaaataattataaattaattataatcataaagatttaatgtgaaattaaaatacaatttaattatattaacaaaattaaagtttacaacatgcaaactacttacaaagtctaagcattaataaaaatttagaactcaaaataagtatttttttttaaattaaaagtctgtctaaaagctagctagtataaatgttctattaatttcactaaccactaatgttgcaatagtagcaaatctctcttctcatcataactagttttatttccaaccttcaaaattaaaatgtataaaaattatttactattataagttaatatatcttattaattagttacctatataaatgagttaacacttcaaaaaaaagctcctagtgataatcttttagttataacataattttttgttactaaatgtaacttttaattacaacaaataattacttgtgactaaaacatagtatttagataaagtagtcattaatttagttttaatcataacaaatattgtgactataaatacattaatcacaataaattgtaatttttgtgactaatatatttagacacatgccttttagtcacaacatagtatttataattaatcacaatttttttatttttagtctcaagttttgttgtgactaaaagtaagattttttgtaatgtaattatgtactaatttattgacttaccttttcatttattttagcatacctatttatggcaagtttactaataagtaatgagaatcaatgttaagttaatcatttccttatatttgtttacttacattattaaaattagaaaaggaaaaacttgattaaataagggaaaaaaggagagaacttcccctaccaattttgtaaggaatgtcattaatggcacgtttactatacaataatcagaatcaaaataaattaatggaaaaatgtaacggaataaataaaaataatcagaatcaatatttataatatgctatttactaaatttttttggaaa

SEQ ID NO: 380775 - DNA, 2304 bp, Cannabis indica
gtttatgtaacttaatccatattatttcttcacaatcacattatttcttcacttaccagacccattaggctctctctccatttctgtcatttcaggtaaaattacttcaaacattaatgtttattgaccaccatgattaagttgttagttctctaaatataattattgtattcccacggtttagaataatacccagttcgttattttatcttcaaggtcgaaaagtagatcatattgtgtggtgagcgaaatgggtcgccaagttctgcagtctaaaactaaaaagcttgctaattttcgattatgcaatgtgtcaaggtacatgggttccttttactttttaatttcttttagttctgttctaatttggttactaatttattttgttttagttacgctactgaaatattggagattattgctgagaagccagtatttcatgctctagtgatccctggaaatccaggtatgtttatttaatttgagtattgggtactggtgcttgactgtaaaattttagtcaaaatgattttattatttcatttatttatttgggatatttggttatttgaaggtgctgttctattttataaagaatttgttgaatcactttatgagtggcttggaggaagtgtgtccgtgacaggtaagaaatgaaagacttacaacatttcttatttgattttccttgtatttgtttttagatttatagctgaatcatttgtgagcttggatcgctattttattaatctattgcattttactgtgtttgatcagctgttgggcatatatctcataccaaaaaggtactatatttgctagtttctccttatatcattgtattgtactaccatgtatgttacatgtttactggtttggccttttgtaaactacaatagtgaagatgatgttgtctggaaaataatttgttaatccatagaaattaaaaaatttaattccaattttatgactgatctgaagaaagcttcaagtgcagcacaacttgtttatatttttatgtcaaattttctttttgtcaggattcggaacgtggaaggttgttctcattgcaagaacaaattgatcataaggtgacaacattctgcatgaccctttatctgttctgagcaaattcctggccttcaaatctccatctaaattcatgcttttgcagatagacttcatcaaacatgagttacaaaataaacaagttcctataatactggtaagaactaagaatgtagtcatcttgttgtttgtttgttgtttataagtgttgttgaatgctcataagctgtttttttggaggacatagtttaaacagcattagtaattcagtttcatattaggtttatggatgaaagtttgattctcataatgaatcctaaaataggttcttataataaacattgcatgatgtttgctaatattatttccattagtaagagaggaaagttctttcctttttctaatctttacagtgtgttttcccttgttttgtttctcttacctgacaatgttgctagttgtaataagatcgtcgctcaatataagaatataagctgttgttatcgatttattactttgcaggttgggcactcaatcggtgcatacatgtgtattgaaatgtttaaaagaaatcaagagcaggtaatgattgcttgttcatttcatttagtgtgttcatgttgctgatcatatttttcttctagaaagtaacctcttcgacacctctttgagcattgtaggtgttatactgcatcggactgtatccatttttggctttagatctacaatcccagaaacagtctatcatcggcaagattgctgcgtatatcttttcttcttactttattctctcctatgaatatgtgttaaaaggaatctagtcaacttcatgtgcactgtgtcacgggccgcctatttggacacccccaagtaggtggaacgtgcggcacttgctggcacaccgagctagcaagtcagcctaaacgcgcctgcaggcaaacaagttcaaaggttaggcacgatacatgtctcgcacatgttgagtgcaaacaagaagcatgagcaagcaaatacaaagcgtccccaaggaccaatctcacacaacccacaagcaaacatataggcaaatggcacgcaatggcccaacaaggcaacaaacaggcatcacaaagaccatatagaagcatacacaagaagcatggataaacatcgttttattaatatatggccttgatagggtaagggagtacacagctgggcccctatcatgctggtgacaaggtgcttcataagtca

SEQ ID NO: 380776 - DNA, 2770 bp, Cannabis indica
tataaacattaaaatcaaaacataatttacatgaaacaaatatatgtagacctgttgatgactatcattgtatcatcaaaaaattttgtaagttagatctaataattttcacaccgtaatcttccaaatcgatctactatacacaaggagtagcgtgtgctactaggataaagtatataactattcttgataaattctcaacacatgagcaacaattattttagagaaattttttttttcttttcttcctatatttcaaaaattaaagtgtgaaaacctttttctaatttcttaaatcaagcttctatttatagtagttaattctcaattaattaaatcatatttaattatttaaataaatatctataaccgaattcggttactgatatttctgatgagggaatctttcaactaactttgaggaaatatctcaaccaacttgaaatatctttaactactttttaaatttaaatatttatcaattcgaattaattaaaaaattaattaacccaaaaagacaaaatagcgtaatatcttgagattaaaaaatagattagtaaccataattaaaatttattaagtataatgactaattacattattatataatgaattatgtgaaattatttgagaatttttatatttaaaccccatttatgggttaagagcatttttgttatgttgacccgagaaaggtaaaattataattttaatatatattgtgctaatggactatattattatatagcatgttcatattattttatttcaggtgacttttgataagttagcgtgatatagtcacaatcaaacattctggctcaaaccgagtttggaatccaaaattcataaactttgtgattagggcataatctgaattatataatatgtgaatatataagtgtagatatgattgactaaattgcctttaattgttctttatattgactttggcctaaagggtataatgatcatttgaccaaaaacgagataaatgaattatgtgtttcatttgtgaaaaaatgaaaaagaaaaatcatttatggtctagactctctcaaccgatctcctctctctctctctctctccctaattcaagctgttcattttgagttttgaagaaaaaatcgaaggaattttatggctttggtgttagaactttgaggtagtaatttaacttttgtcatgtttaattctatgttaattctcgaatttgattttttcaaggtatttagttgtttgttgatggttttgttatgatcttcttttgattttgagagtgttcacaagttcaaaagcaaagaaattatagattattgtttattgtgcttgaatctgagtttcaggtcagatccttagtgtgctattgttgctttcttggctgtttttgagaattttagttttgagctgagtattttgagcataaagttatcttgtgttcaatttgactttaaaaaacatgaatttttgtaacttgagctttgtgttttgtgtgtgagttcaagcatgttaattggggagtgggtaatgcttgaaaaatactttatttggcatgaaaatcaattattgtgttgtggtaggttttattgtgaagtggtgtatgttgaaaatctataaaactggtattttttgggttttaagccagttgtcgtgactagatatggggtcgttgcgacgaggctcaaacctagaactagggttggcccttgcctcaacctggtcgttgcgagcctaatcttgtcgcgacaataattgataattgatttaaacattttaacattacgtacaaacactatagagccggtgagctcgtgtgttgggatatgaattggaaactcacagcttaccatgtcagagacgttgtcgtacttaatataagaatggattaaaatgtctttcatttattctttaaatatttactttgattaatattatcatttaatgtataagcggttctgaaattggtcagttatgtaatcctaaaggacacttattttttatatatatgagtgatccgaatcaaataaactaagttgaaatctttgcaataatggactaagcagaccgagctctgactaaaccattacaattctcttattttctctttgttttatttttttttctctatttagtagtcgataatttgagtacttgctattctaagtgagtactcgcacattttttactgggcattcttattttctttgaatactcgcgctaatctggtcctctccaaattcctccaacaacagttataaaatataaaacaataatagctattttccatcaaatattaaactaactcaattttgtaggttattattattattgtaaataaaatatgagaatattcatttctagaaattatcaaagtgtcaaataatttatataaacatatatatttttataatagaaatttcagtcaagattaatcgcaacaacggtctacatggtcaaggcagagaaaaaattgcacatctcaaaataagatgatcaaacacacaaaaaaccacatcgactataagacgaacaaaaagctttagactcacaatggataaacaagtaaacaaaaatagcccaaagacaacatcacaaaaagtgtaggttgttatgtaatatccgcgaactcagaagagtatttttgtaaatttttcctgctaagagtatttttgttattttatatatttatgggtttaaatatgcatgaaattttcgtgataatataatggttgattttcttggcatgtgcataatgcctaataaatatata

SEQ ID NO: 380777 - DNA, 810 bp, Cannabis indica
ctctctctctctctctactttttctgtgtatgtatatactgtatctatagctgtatcggtttatctgatctttattcttattcagttttgagctttgtttatttgtctgttttaaaaaaatttatactttattatgagtgttcactaactgggttttattcaaatcaccgattcggtttctgtttgttttaatgtttatgttttttttggctcagtattcagaagtagtgaaactggggtgaagctatggcggccccaagatcgaccttgccctcgaggttgcggcaacttctgtccggcgatggcagcttcggtccttcggtcaaactggactcggaccctgtgagtatttgtgtatatttaattatcagtctttttggttagtcataaaactatataagtgggtgaacttttctaaggggaatgtgttagttgtctcacactttcttctttgtgctactcatatagtacttacagtagttgtttcgaatttgggtttgacatgttcaagatggggaaccaaatgatttttcaagtagcttcatcttttccttgctgacaaaaggggttgtggatgtgagattgtgttctttgattgcaacgaggcctcagtttttaggagctccttttttatttatgtccattgattggtgtggttgatcttttagacatctggttgaagaatagcctttaaaatggagttcacttcagagggtgggacttttcttatcactagtcattgtatacttaaccatgtatttttctttttgggaacctgctctgataccatgaagaaaatacaaaggaaaa

SEQ ID NO: 380778 - DNA, 8763 bp, Cannabis indica
aataaacacctacacaaaattaactatgcacaatgtaaaatgttattaaatcaagctaattaaaattaaacttataataaacattttttccctaactatactaaacttataacataaccttaatacttatatgtagatttctacaattatatatttttactaataacaataaataattttatctaaactaaattaaaaaaattaatgtatttttacaatagcaaaagctataaataaatcttttacctaaactaaatttttttttattttaaaatttgtttctaatttttttttacattttaaattttttacaataaaaactagcatgaaaactcataaattttatttgaaccacatcaaatttttatagtacattaacaactaattttaaatttaacacattaaatatatatattcaactaacttttttttttatatttctaacaaaaaaatatatgtatctaaatatatatttaactatatatatatattcaattttataataaataataataaataaaaatatatatagataaataaataaataattatatgtaaaaaataaatatatatataccaatcgtacgtgtgcgtgatttgagatggagttggaggcccgactgacctttgtagttgtggttgcgtgcgtctccgacggtgagagaagcggagatgtgtgggttgggttgaagtgtgttgggttcaaatgtgcggtcgcaggttgagttcggttgtggttgcgtgaggaccggttgacttttttgtgggttcgagtggggataggctggccggtggttgtgggtttgagtggggttaagccagccgtcaaagatgaattttctggttgtgggattaagcgcagctgctatatgtgtgtaatatgggcctttaccagacgatttaaaactatcaggtataatcccgtatatatatatattttcattcttcctaaaaaaatgtcgcctaattttttaggcatagttataaaccatcgagaatattaatttttcctaacggttttaaatagttgcttaatttttttaacgagaatccccgaaaaatatcatttttgggaccgtcgcggattcattattttgtagtagtgaaaaaaaaaagacgcactggagaacttatcctgggagcaatcttgcatatcccattatgtcggtgcaatccataagaccatgtctcaatactctagggaagagtggggaagcatctgaggtgtccctccaatttacttgtgcgggcagttatttcgctcctctatctgagtgtgtctccttttctttctccctgcttatcaatatatttatattgttatgttattattatttttatgttcttaacccctccctttgttttcctatcttcttcttgatggttgttgcatctcaagatgtgcttgcacagggcggagccttcagttcttcctccaactacaagacgcttttgggcgacttggaacctgtcaagataaatagagaccattttttctactctagtggactcccagacggcccatattcagtcattagaaggtgagctcaatgtggccaaggatgatcaaaggaatgtggcaaaggatctcgccaccaacagaaacctcaaggtagatttatcgttggagctgatcggggtcataggagagagagatgatgcgcttgcacagctactgaagaaaagaaggaggttttacgccagctcgggaatgcttgcaaatgtaagaagaagctttagagccaggtagctaggctccaatctcgcattcgggagttggggggagataagggagacccgccaggggtctactactcatgacaacgagatcgtggatcaagccctttacaatgtgtggcgtgtaaaccccaatacagactttagcttttttggtcctgaaaccgtttaataggcgactgaatggaaggcttattttgatcaatctggcgaaggtttctctttatcttcttaattagttttattcgttcaaaaccccttaggcatgttagggcgggttcctttattttacgatattgaataactgtatcaggcctatttactatgatttctccttctcccccctcttcttttttttttagactttatggggttttagcgacctaggacttttaagagagtgttagtcccctggactcattctaccttttcgttggctgctcctaccatatcctttgcttgtttattgttgaactctactagttgtgcttcatttgatgtttcatttttgataagggagcattcaagcaccctgcaatgtgctttttgttttccacctcttgttattatgatgattctgtgaactgaatcgaccttttgcatgtgtttattgtttatttccctacacacattttttgggttgtagtactttgatgagcgcattttttgtgtgcccttattgatgggaagagagaaaagcacagaaaatatgaaaaatatgataagtatgaacagcgtcattcctcggaccatagaggaagcacagaaaggaaaaggaaagaagacatgattctgactaatataattgtaaagaaagaataaagcttttatatgcttcatatatgagattttttaggaccttattgttgttcaaaattgttaaggtgagttgtagtatctggccactctctgctggtacacggctaccttcatttgagactcctccctattttcctccaccaagtccaagctctctgctaatgcctcctcattccttactttctctaacttctagaccttgggatagtttatctgcatctcgacggggagtacagcctcgcacccaaaagccaaagagaatggggttttgtcgatcgtagtgcgggggtggttctataagcccacaacatatttaggagctcctcgacccatgcccttttgagtttttccagcttggtcttgaggttcttcttaatcacttcattggtgccttccactggccattggtctgggggtgcaccatagtttctctttgtattcccctctcttcgcaatatgctcctagtaagtctctgaacggagtaccattatcaatgatgattttataagaaactccaaaccggtaaataataaacttgttgacgaaggtgactactagcttggcagttatgtgaactagtggttctgcctctcacttggtgtagtagtcaactgccacaatttcatacctcgcccctgctctactcgctggcagtgctcctactaaatctatccctcacattgcaaagggccagagacttgtcaggctggcggatgccgaattggcatgtttgtggcacttatcgcactgtttggagaactccatggcatctttctctagggatggccaataatatccttactttagaattttgcgagacatagattgcccccttgcgtgatttccacattcttcctcatgtatggcagacaggacttgtcgtatttctccctagtcaatgcatcacaggagggggttgagaatcccctcttgtataacaatccattgaccattacgtaatgggtttccttatacactatcctcctagattctcttttgtctcctggtaacttatcttcatggatgtatttgaggtattgagccttccgagagtcctcgccagtcagctcacacactgctcctcctaattggttagtttttcgaggtactccacgggtatagattttaaggtgtcgatttcctttatggatgccaactttggcaatgcattggcgttggtattgttatcttttggtatcttctccacaatgtaatgctgcagccactccaagtaacttttcactttagccaaatgtgccatcatcttattccccttggcctagtgttctcctatgacgtggaataccaccagttgggaatcactaaagatatcaagcttggcaattttcaactcatttgccaaacacaagccagctaacaaagctttgtatttggcttcattaatggaatcttcgaacctgaatcgtaccgcacagtacttcttctgcccctaggtgtggttatcaccactcctgctttggctcctccgtcattcgatgccccatctacatgtaacttccacctttcctccctgtcttgagcgctttcgtccaatactccttgacatccttcttcggcaggtcgataagtgaattcagccataaagtcgacaagtatttatccattgatcactatctacggtacataagaaatgtcaaatttgttgagtttgattgtccacttcaaaaggcatcctaaagtgtgggcttgtgtaagacttggcataggggttgttggtcaacacaactatggggtgggcatgaaaatatggatttagtttcttggaggccatcacgaatgcataaaccaacttcttcattttagggtactgagtctcgatgtctaccaatcttttacttacataataaactagttattgatgccttccttcccccttttactaaggctatagtgagtgcgtgccttgacacactctaatagagaaacaacttttctcctttttctaggttttccaacagttgcggcttccctaaattttccttgagtttcttgaaggcctcttctcaatcctcactctagaaaaattgtttgtttcctcttaacacgttaaaaattggtagacatttctctatcaatcgcgagataaacatattaaggctaccaccctccccatgagacactacacttccttccaattctttggtgagtccatatctatccaggcttgtattttgtctaggttcacctttatccccctttcatggaccataaagcccaaaaatttacctgacgacaccccaaagatgcattttgtgggtttgagcttcatcctatacttcctcagggtggtgaagtttcatctaaatctttgatcaaatctcctactttcttagtcttcactagcatatcatcaacatgtacctccatattacgcccgatctagtcggcaaacatcttgttgacgaaattctaagatgtggccccatcagttttgagtccaaacaacatgaattgatagcagtaaagccctctgtctatgatgaaggatgtgtgttccttgttgactgcgctcatggggatctggttgtataccgagtaagcatccatgaaatagcaactcatgcctcactgtggcatccaccacctgatcttttcgagggagcgggaagctgtctttcaggcatgctttattcaagttagtgaagtctacacaaactctccattttctatttggctttgagactatgacggggttcgatacctagattaggtaaaaggcttgttggatgaattggaataggtcaagcttgtccacttcttcttttagagctatgtaccttacagagtagagggcccaccattatttccttacaggtttttcctaagggtctacgctcaaatggtaagacataaatatgggacttagtcccactatatctttatgccccaagttaaagacatcaaccatctctttgaggtattgtcttaactcatgtttgagggcttcgtagagtcctcttccaatcttgaacaccttcagcgagtgtttcgatatcattaattcttcaattttttaatcgagttctccatggacttcctcctccaccctagggtccaagtctgcgtctaccctttgtagggagtattcttgctacgcacggccattactatggactcgcggggctttgtggcaatcttaagggacgtgttgtaacactcccttgcctctttctgctctctttttactgtcgcgactccaccaagagttgggaacttgatgtctaggtgataagttgacatgaagaccttcaagcggtagagcgatggccttccaagtaccacattgaaggctattaggcattccaccaagatgaacgtggccattaccattacctacagtggttgttctcccatagtgagcaagagtgtaatcatccctaagggatggatcgaatccctggtgaacccgtatatgggtgtcgtgcattgcttcaaatccttcaaacttaaccccatttgttctagtgcactttggcagaggatattgactaaacttccattgtctacaaacacccagcggactcttgcgttgccgactgtatttccaatacaagtggatcattgtgaggaaagcggtccctcacacatttttctcaatgaatgtcacagagtaaatctcctctttagagttcttcaggggcctttgttctatgctcatgatcattaggggttgtctcgcctcccttgtgtatctgttcgttcccttacgggtgtctcctcctactcttggtcctccaaagattgttctaatgtcccttaatacctctagggcctcgtttggggttctctgccttcgatcttcttgacaaactcctcaggctgcctatccaccctatgatatcctcccaggtatcccctttgtattaagtcctcaatttccattttaagatgagagcattcttctgtagtgtgcccgatatctctatggaatttgtagaacttattagggtctctctttgacttgtcttttctcattgggggctgctttttgaatggaaaacgctgttcattcattaagaagatgtgctcccttgagcatgtgagcttggtattaataggtgaaatccatgcatcgaggctcctcctccctcacaatcttcttattttggtcactcctacctctattgagttccattttcttttgtggttcttcatgcgtgcatgagtttgccaatccactagggccactcttccctattgtgagattctcgtgtctgtccttgactcgaatgtattttttggctctctcatagaagtcttccaagtcttctagctctctcttaagcatgttgttccacaaattgctttttggatggactcccacagcgatggccatcttgtaatcatccttagtcagtctccccacattggctgcttcagcattgaagtgctggatgtagctcttaaggctttcaagttctccttgtttaatgtttgcaaagctaattctaggtatggtgtatttccatgaagcatggtgttgggttaagaattcatcaacaaaatgtttcgaagatgtgatagacctaggtgcttaccgtttgaaccacttatacgcttctcccctgagcatcaccacaaagcactagcacctcactttgcttgtgacccgtttcatcttcattatttcattaaaggcgtctaggtggtactttaggtctgttatgccttcgtaaggcaacatcttaggttctttaaagtttgtgggtaagggcttagcttgcatctcccttgagaatgggaattcttcattgaagttatcctcgtaccagttacaatcttcagatgcagctaatgctatccttcctcaaagatcctccatctccttatctaactatttcctcatcttagttagcttctcctgaaggtcagttgtggttggcttcattctctttttgttttaaaattaatctactgtgagtacccacttcttggtcgtggtcctctggcaaagcttttctctcaagttgccctggactcctttggacacaatattcttgggtcacgattagggttccagatccttttgggttgaatttcttcgtgggctggattcgggggtgttgtttttgggttccagtacattgatgctaccctgtcctctagctcacttactcctcgttttcttgcttctggttcccttccctcgattaaaggtgcctcaaaatggcctctcaggagctcctctagcgctctttgcgtatttgcaataacttcttctagtcacaagttgcttacccttagctcattcatctcctcattgtgtagctgagtctaagagctagaactcactaagtatactcgctttacctttctcattcagtggtgtgaggtttcgaggtctctcagtcttggcagctgcagtggccttattggggctagggcttcggacctttgcattctgcttccttcctttagcataatagaggcaatcactccatcttgctagttatttgctgagttatcttcgggccgattattctcttctcccactgggggttcataaccattcatgccttctccatcctgaggcacctggttatttttacctcctcttgtagcgataggtggtggcgggtcaggccttgaggcgactgttgaaggccatcaagtcgaacctccacttcttggcaacaatgagagcatctcgacatcttttctacaattctaggtaaagaaatgacgttgcttttgcatgtcaattaccacagacgtcgccaaattgttgacggtaagaactcatcaacgatatgttaagaactcaaaatagtattcaaagttcttaatagaagagcattcaaagtaaattttagactctttacttttcctcagaaaaactattgtttcattaatcttttattcaaagaactccctttataatgatctcaaaggtccttttaatagtgagttctctacaatttagaattacatcagatccctaagactgaggatgtcaagtcactttcacactagataacctagtaattcacgtagcgtgttgtctcagacatcctcaattgcaccaaaacttcctcttctttttgtacctcaaatgaacttaactttgtctcctttaccaatactccttgtgtagtcgctatcttgtctgtgatctcctagcctaaacgaccctaacatcgatattttcactgttagaactttttatttgggcttacattaaattt

SEQ ID NO: 380779 - DNA, 2552 bp, Cannabis indica
gagtatcactcatatggttagtagttagtatattaattaaattaaaatatgtgatatttaataattattactattaactaaaaaaaatactacaacaattaattgaactaatagtaataaaaacatcttagtaacatttatcatgataaaaaaaaattaaaaacattaaactattattagtcattcaatgttccatatatgttgacctttaatttaagtgtcgcttttaataatagtaaggtaattttttctttttctttttatcaaaatggactaataatagtaattagagtaatatatagctagctagtgtgagaatattctttaaggcaaggagagttgatgaggtgtcacacacacacggccataataataataagaagaagcgtgtgagtgtgatatcaacaacactttgaagcagctagcataatcaaaaatcaactattattatttcaatttcaattaatatataaaattaccccacaaacaagaaaaggtgagctagccaaaaaaacccacttgtatataaaggtgggtgcgtgagggggcttcacttgttgttgtgtgtcttgtgtgtgtaccaaaatatttgctatacctaagctaattagtaagtatactatacttctaattaatcaactctctacactagcaataagtgatcatctatctctattaagggaaaaaaaggaattagaagaagaaactatgggaaggcaaccttgttgtgacaagcttggcgtgaaaaaagggccttggacagccgaggaagacaagaaacttgtgaatttcattctgacacacggccaatgttgctggcgggctgtccccaaactggcgggtctccgccgatgtgggaagagctgccgcctccgctggactaactatctccgcccagacttgaagcgtggcctccttaatgaagctgaggaacaacttgttattgatcttcatgctcgtcttggcaacaggtaattaattaattaattaactaacaattttcttaattaatgtatttatagttataagctaataattagtgctgtttttgtatattgtgtataggtggtcaaaaattgcagctaaattacctggaagaacggacaatgagattaagaatcattggaacactcacatcaagaaaaagcttgttaagatgggaattgatccagttacacatgaacccctcaacaacaacaacagcaacaatagtattatcccaaatgaagaaataataaagccttgcacagctacaacaactaataatagtattgatcagaaaacagaagaagaagaagaagaagaacaagaaaagggtattattgaccagcccaagagtaacataagcatcaaaactgaaaattcttcttcgacggacaatgaatcatcccaaccgtctgatttaattaacatgtacgatcatgaccctttaatgagttacttattgtcagagaactttctcattgaagattcttcatcatgggattttcctgaggctactactactactaccactactactagtactactactgctgataactatagtgatcataataatcattttggggtgtattcttcttcctcatcagaagaaacctcaacttggttattggagagtaacaaggatttattaggggatgatggagaactttgggcttggtttcttcaatgactgcatatatacatatgtatattttataccaatctcagtttaattttaccaatgtgaagaataagtttacatacatatatagccaaattaaacaaaaaaagaaaaggcttattaatttgtgtagacttcatatttgggttaatactactcttcaacaaatcttattgggtttttgtttcaatttgctttgattagtctctttttggttttaataagtactattaaaatacagattatgtgtaaaagcatcaacatttataattgcccatgttgggaacaaaattggggatgctagtaatagtatcatatatgctattactttgaataaagtgaaaagtaaaattattattattaattatttttatccttttcctacatggacgcagcggaggctcaccactatgaacaatttgcagcataaatatctaagtttaattcacagttgtaaaaaaatatctaatttgacaattcctgattagtcaactcattaaatttttatttttttaaaaaaattaatttaaatatactaataaaaatgacgtgtggataatgacttaacattaatgacatgtggataataacttgagtatttatttataactaggagttaaacttaagtatttatgccacaaattagtctagatgtattatatttgatatatggttttgtatatatttgcatcgattttgtatgattttgatgcaaaatttaatatttaattattatttttattaaaatataaaaagataataaccttatcattattaagtaaaacaataataacataaaatatatttatataaaatagtacattaattttattgttaagtatattaataaaataataaaaataatttaaaagtgaataaaaaaaaa

SEQ ID NO: 380780 - DNA, 3196 bp, Cannabis indica
atacaataaccagcctcctccaagattgcagcacgaacgctatccctatcccttcctgcagctccaactctctctttatcaacctccatgctttcgttttttgctttaactacaaaacaaattcaagtcttttttttaagtagaacataaagcaaaagtagaagcaatcactcattgacagttctctttgaaaacaccacactgaagaataataatgataatagtaataactaaataaagtttgttaacgatcgatttgtgcagacataccaaataatccatggagaccgcacgaacagaatgatgtgctttgagaccaatccgcacaattttagggttataagcgcgatcattttcatcacgaacgcctgtggatttacaaaacaatattacattataacagatgttacttaaaacttaaaagccattttcatcacaaacactagcagttaattgcaggtgaaatgatgtacggcgaaaactatctgtacaaaaacattcaatttcttgaattgtatacatcttaagaaagtcttggtacatgctaaatgttgccatagacacccaaggggagatgaggctccaagttcttccatgtgaaaacatcaaaaagtaaaaaaaaattgtactataaaaggccttcaaaataatttagtaccatatcatgcatatcaagatttttgaaaaaaaatacaataaacaagagaagaaaatcaatagtataaaaagaagagtcaagcagcatttagcaaagaaccaaggaaccgaatcacacataggaagtaaggcggagctgtaccattgtttaaaactcgcaatacaatctcatctagtgcagagtttgaaggggcacatacaaggacacgcacacgatatttacggctggaattgacttgttctggtttctgcatatattcatgtagttgaaagatgagatttctttaaaatcgcaaagacacgaagcaagcaatggacgatggagagcttaccaattcatttcctgaggttgggaaaaaaccatcgtcaccatcaacaggcactatctcatctcttggattattacctccaagccatggagctgctcgtccccaatgattgtacctacattacatatataaaggcattgttaagaatttagtaatttactagcatgcttaaaaacctattgaagatattaacaataagaaaacacatacgtttcatgaacagataattttggtccacgctttacgttcaacaatccacgcctgcacaagaaggataacaaaaatggcagacatgtaatccatacaataaataacagctccaacacatgacaaaaacgagttgggcgataaacaataatcttcacctggagtgcagtcttgctggagttgcatgcaatatcgcacttagaatcccaaggatggtttgtgtctttcctgttcctggaggaccctaaatgaaaaaactagttcacaatccacataatgcacacgaaaagatattctcgaattaccaaaagttagcacaggcttctttttcaaacataatgcactaatatcaactatcaaggcaaagacctaatttttcagctactttcacactctcaagtctctaacatattataatcattttccacccaatttttttaatgtcagagaaagaatacagctattttaagattttaaaaaatgaagaaagacgcaatttcatttactagtgaacaagaaattttgagaagacataacacaaacctgtatcagaacaaaaggcttgcgtgacagacctgcctgcagaagaaaatacacatttcttgtcaacaaattttgaaactcttttccaaattattataaatgagatacatagcaaagagtttccaagaaaatgaaaataggagacatttctttgtaaacttgtaaagctagtcaacaattaattcacaagtacaactcactcacaaaaatataatagtactatttgtaagcatttatgactataaatagttactaacctgaatagcatcccattgggaattattaagagtgtcttttatatattcctccagaggtctagatattttccaagcatgatcttcaagatcaattttcttttcagttgctgttattatcaaatccttaaaagggagagagccaattgattgcagagctacatactcacgaataatagttgataaactgcatatctgcgtaacagtaaaataataattcagaatagcagaaacagaagatgtgctttataatactaagtgtggcatagttaagcttccatataggtgaaacgatataagagcattgtaacaataacaaagcaaaaggctgagctatttttgttactatttatctagcttcgaattaccttcatactgtaaaaaagtcggtctgcttcattgttagatgtaatcaaggaccgaacacttgaaagccttgaagaaatctcaatgacatcttttttcccaggtgtgaattctccagccagatacattctaagtatgatacgattgttttggcaactttccactaaagcaaatacatatgctgttggaagttttgcaccctcttgaaactgcagcagcatacaatgcctaaaaataagtaccccaatccatttcaaatagatatacctaccgatttcattatttcaaacacagcaggaccctcgagccaaagtgcaaatgtgttacccattacacacattggtccggtcaaaaatcatcttggtgagtaacataacatagtcaagatgatctcgaaaacaaaatttcagtgcctagagttaaaagcatttgtgttcttaataaaatgttgtttaagaatagaatatagcacccttgaaatatagtacataacttatataaaaaggaagatggatttgaaaaaatcaaaaacctgatatgagaatagtactaattacttataaactaattagaaaaagcactaatctgtaattgagaatactaatcccttattatctcaaatgcaaaagaagacattgaattgagatgcaaaaaatcaccttgactttagaaagaagcaatagatcattctgagaaataaattcttcattagcataattaacaactgctaagtgaaacccatcaacctcattacaatccacaaccactctgctctcccattctgtcactgcaagcaattccacaatgcccaatacattattataccaaaaaaaaaaaaaa

SEQ ID NO: 380781 - DNA, 852 bp, Cannabis indica
aatatcagcaatctttctcatggactcgagctcaagaattattacaaatctttattcaaagaatataataaatgaaaaatgaaagccagaaacacgaaagtaaaaacgttttattttactgttaactgctcaaattcaaacttcacaaaacactcaaaatgttcaaggattagatttatcaatcaatacaattcaaatatcaataacaaatcttagcaagcaataataacccagcatccttctcttcactaacaaatcaagaaaagttaagaataaagtccgtagcaatgaagccagagaacaaatcagatgcaggtttcagtataaacaagaaaggaacaaaatatgaaaacaaatcgatacattcaagagaaccaggtagaaagcaaaagggcatttggtgagcttacgcatctcttcgggagtcgagaaattgcggtgacccgtgggcttgctcttgtactttcctctccccatggctacggcagaagcaaagcaaaactcccgattagagagaatgaaatcgatccggttgagaagagaaagaagaaggaaaagaagggtcaccaaaaagttctcttgcttttggggaaattcgacgaatattataacacccacaaaaccccagaaccagatactgagccttgcggccttaatgactcgggcatatcatttttttgtaaatgacaattttatcctggaataatattcagtaacatttcatttctttttagagtaaattgttgtaaaagtatttaagtttgaaatttttacatgaaaaatcacttttgcataatttattaccaaaatactcctacacgcctataggctatatcaacttttttacttaca

SEQ ID NO: 380782 - DNA, 2694 bp, Cannabis indica
acttattatagtaattataacctcttattacaatctcttagtcaattttctatattcgaaatcacatgctaagtaattttttttttttaattttatactcacatctctattacattttttgaattttttttgaatagtttacagtacttagaataaaatttttaaaatttcagtccaccacgtatgttcagaaaattttaaatttattttcagcaatgtaaattatttgaaattttttaaaaatttacaaaactaatgttataactataacgaacacaattataaaaaaaaataaaagaaaatatttcgataagtatttttgaacacaaaaattgacgaaaagattataataagaaattgataataaccttaacactcctttaattattgttatgtgttttcttaaattgtctgcggtcaccactattaactattaaaattggagccaaaggaagaaaaaaaataataataacgcaaaagggaggaatatggtcagtttggtcagattttttgtcccttaatttgtttggctgtattcaattacagaatttgaagaacatttgtgtgtggtttgtaatattccaagcttaaatattacggataaaagtactaaattgcctttatttatagaatataataatatctattcactaatcctttcaagttatatattttaattaaagaaaaaatagattattagtgccaacttttagtttttgtagatataatgaaaatattgcttaattggctgtcttaggctggcaaagaaaagagtacttaattataaatatcatgagaactctacatcaatttatttcaatcagaaatatgagtactacaatttaaaattttaaaatatatatattgggagagattcttatagggtattacttttgtcccttagtataatgatgctatatatatattagttgggatatgattttgttctgttattgtactttcacggattataattcgtgatgtacggcaaccgtcagataagggagttatttgatctgacggttgagattgatgtaggggtaattaggattaaaaaataaaaacgtactttgatactcatttaatgtaccctaaaacttatctaatataccacggaatacattctgtgaaagtacatcacgggacaaaatcatatatattagttatacctcaccaattttcaaatagtctagagtgtaaaaaaaaaagtaattgctcttaccatggctttgaacaacactgattatttagaggtttcctccataccaattgctctgcttatttgtaatgatcattaggtgtattagttctgttttatataaattaatgtttcttttctttttttaataaaaagtagtagttgcacgcatatcattattttttatacatgtaaaattataatgattattttgaactctgttttaacactactttatgttattcaaaatttttgaagaattggtgaagaaacaattgggttataattttccaaaatattgaacatagaaaagaattcatacaataattaaaaacaaaaatgatgtcctttattacatcaaaatttcccaattctacttatgagtcatgtcatgcatattttgttttgtttggtctagcaaaccttgctattagatatgggtccattggatgtttatcgataataatcaatataacgtaattttacagttaattcataactattataggatttatttattaaaatatattctggtgttaataaattttttatatttttttgtagggctggtatatatgaataatcttattataatttcttttgtttttggcgtgtattaagggataatcaaacagtagtagttgagtatcatattctacgtacttatttgacttccaaattaagtaggaaactgtgtgtgttaatggcattttcaattattttcactttccaaaatgtatttaattctttaagtatgaaaccttaatttatataatacatgagtgattaattaaagatagacttggcaagtgatgaatactcatctcctaaccagagacaagatatcttggtttcacattgttcttagctcgatcaattgtccggtgtgtgaagaggtggaggaatcccatgagtatctattttttagctgagtgttgtctcgaaaagtcctggacttgatttttgcttggatgggatacatgggatgggcgactacttatactggtatcattgtgtaattctaacatgtcatattaggattcatcggctcaatatcaccattttgacaacagtgatttacaatatatgactcaacagaaacataggtgtttttaatggttattctagatcagtttatggaatagtaaatgatgtaaagaatacaataaagtatagattgtaaattgtaaacaatatatccaaataggagagagattacttgttgagattacaaagtaggtagtagtgggtttggggttttcttgactgtcttgagccgtgcttttggggttgtttcgctgttttgagccgtgtgtggctttgcctttttgtttgtgtttgtaagtggatgtgttgattaatgaagtatttttttcttgataaaagaaaaagatagacttaagctataattcaattattaataagatgtgatattggcggctaagccacctgaatttacggtttgtaacacttaaccacaaaaaccgaatttttgg

SEQ ID NO: 380783 - DNA, 2128 bp, Cannabis indica
tcatgtaactagtagcgtttttctctagatcatatattagggcttcaagtcatagttaatgattaaataaattatttaggtggcaagtgagttgattatttacttcctttgtttatgtgttgtataactccatttaaaaatcaaggttggtagtcaaattctagtactatgagtcaaattctagcactatgaaaaactatctcgtaatattagtctcccgttagtttcggtcctctgaaactacctgagaagaaacagtcccttcatgggaagggttgagttcgtgcttttcttctctgtttgtctggtgtgcgatttgattctcagtgttagggatatggatatggaattggtgaatcggctagctgaagttttgattcttgatgatggagatggccctgttcttcctcttaataaggtcggggttgaagaaggtaaaaagaggttagatttgtgtttgattgggaaagttattggccctagacctgccaataaagatgggattgagagagcaatgaaaggggtttggaaaattaaccatagattccaggttgaagagttgagttccaagaatatttttcgatttttctttggctgtcgtgaggataggcagagagtctttggtggtggtccttggacaattgataaacaattgatttgctttgttaaaccgatgggtctgggtgaagtttctaagatgaattttgattttacttccttttggatctctatcaataatgtgtcattagctcgtatgacggaactctttgctagagaatggggtgagcggattggtaagctggaagatattaagcttgttaatggtaccatgaaagtgagggtaagaatgaatattactgagcctcttaaaaggggattgagggtggctattgatgatcaaggtaatgaggtttctctcctctttcaatatgaacacttacctgatttttgctatgattgtgacatctttggccacaaggctttagactgtcctcttagagattttgctggagataacccacggtttgatggtgggaggttcggttcatgattgtgtgctctagcatcacctcctcgagatagtctacggttcaacaagaagcgtgcggaatctccaaataacaggccgatcgtgaccatgggggaagcttcgaaaatcatctctgcggtggagaggtctcggccacatttctcaggccttactcaggaacagttggctccaacctctatcttggaaagacgggaacgtgatgaagaagagttgaatggtgttgttgctgaacatggaagcggtggcgatccggagttacgggttcggtcatcatgtgggaacgatgaagttcattcctctgaaggtggtcgaggtgataaagaaaagatggagtgtgtgccgcctgtggtgtgtggaggatatgagtcaagtggtgtacccgagaagttgaaagtcaaggaggtgcttccacgtgagtcagctgcagtgggtgcttcctcggctgggttgattgtggaaagtattgatgagattcaaaaggtgggccccagtaaggagcggatacaacaaaataataagggaaaaggaattttgcatcactcatctcaacaagagttatcttttagccatgcattccaacatacttttgaacctcttatcaaagcacaaaagaccaagacttggaagcgagtcaactcttctgtgggccgtagttcaaaaggtatgcctaagtctagttcttttcctattagcccgaagttgtcccatgttattgtggctaatgctctaaataagcttagtccgcgttcgggaggaggtagtaaaaggaagatggatgttaagtacaataatgaatgtgtaaagaagggaagaaaagatggaatttcggatatgcatgtcgagattatgaattcagtattggcgaagtctgcggagcaggctcgccaggagccatgagtttgttatgttggaacacccggggcttggggaaccctggtgcgttgactgccttgcgagcagtggttcgtaagttctccccaagtttagtttttttatcggaaactaaactttatggtggttgggcggaaggtattaggcgacaagttaattttttaaatagttttcatgttgattgta

SEQ ID NO: 380784 - DNA, 4218 bp, Cannabis indica
tttggtatatttatgcttatgtctggtaagttgaaaattttgcattagatacttttcaagttgatagttgccataaataatgatatcattattcatgtgtggatatgaaaatttgattccttacttttacttcagactccaatttgtctaatttccacctgcttatggtgtttgatggtgctatggtctttttatcattgtttatgtactacatgaagtttgacgatgcaattgttacataggatggcaacattaatattgttcttttttcagaagcaagaaactttagcaaacaaatcaagtggggcaagcgctggcatggagaagctacttagcaataaatttgctcgccaggtatgcttataacattcttttattgtgcaagtttggaggctgtttctaacaaatatcatctattttattgaattgtagcttctggaatcaactcccaagaccaaacaaattgatgtcaagtgtgacccttcaaaatctgattctgcttggaaatggttggagaggtggatgtctgtctcagcagtgagtgctgctgtgacagagaaggaagtttcagttacagagcagcagggagagaagagcgaaaattttgagtctcaattggggaacatcactgtagaacccgaagtcatttctgagtcaatggactcaaagttcagtgttcatgagtcaggtgtagaacccgaagtcatttgtgaggcaatggactcaaatttcagtgtccatgaatcaggtgtgcaatctgaaagtgaagacaatctaattacttatgaggcagacgaattttgactttcaggctggccattcttccactttttctgccagagataatttggagcagcctcagcaagagacacaagcacatctgatgtcaaagagacctcggtagagataaagcctattcaaaaggaatgtgtgcagtcagaagtagattctcaaccggagaacaattcgcgttctggtgtacctgaaacagaagctgaacaaccaaagcgttcaatgaaaagacttgccacagatgaattagagactgagagcaagaaatttgtctatggatcaaagaagacaagtaatccttcatttattgccgcccattccaaatttgaagagctgagtttagctggtaatctaggtcagtctatgagttcatcctatcaagaatctggggacgagtcacacaaggacacattctcttttgagccacattctgaaatcaggagcaaggatgttgttgttatggaaagtccagttcatggatcaaggcttcaagttggtggctcagagtgtggcactgaactctctgtaacttcaactcttgattcaccagataggtctgatattgtagccatagaacgcgagcctgaggccaaagtttcggatgaagagatttgcaatcctaatcataataacaacatggaaaatttagatcttaaggaaattggcgttcctacaatcccagaatctagcttgtctcgttcaatcccagaacagcctgaaaatcttgatcttgtgtatggtgatgctgttagttctgtgattactgtgaactccacgccaccaatggagctgaattcgaagaggaatacaactgattttcagagtgaaccagagcaacactctaacacagatgctcaagctcaagtgttgtcgccacatgcttctcctagaagccatatgactgctcctaaatcccaaggaacacctgctagtcatatgactgttgctgaatctcatggaacacctgctagccatatgactgttgctgaatctcatggaacacctgctagccatatgactgtttctgaatcccaaggaacacctggtagtcaggtttcagtgaaagccaaaagaaatagatctggcaagagcaggtctgatcagaaacgcgagtctctgtcggccattaagaagtcaccttctaatgcaggtcacgaatctggctcaagaagtagcacggaaaagttgcctaaggaccagaaaaatgggaagcgacgcaattcttttggtgcaatgaaacttgagcatagtgaacaagaacctagagacagtagcagcaatagttcaatcccccactttatgcaagcaacagaatcagctagagcaaagctcaatgcaaatagttctccaagatccagtcctgatgtccaagacagagacatttacatcaagaagagacattctttgcccggtacaaatggaaggcagggatctcctcgtgtggaaaggtctaactctcaagcacagcaggggactaagtcaaatggtattcattgaacaactccatctatccatgtgtttttgtctcatttaaaaaaattattaattaactagtccttcttgcttttattcagagagaaaatggcagagatgaagattggtcagacctacatttgaaaaaagagaaaagcaaatggtagcagaacaccagtccttaaaaggcaattcggaggcggcgttagttgatcttacattgactggtagctagctacttatttttatactccagcttcttctgttgtgaactatgtgccttgatctattaatccacactaagttcctaggagcgagtctttctatatatatgggacactgagtgaagtttttgtgtacatttccactgttaccctacttattattattatttcttttatgtaactttctccaaatcatatatttggaattgggtgttatatttttagtacgtttggtatagacacatttggttgaggcaactacaaagtgatgagcttctacaaggcttcctttgtgggtgtcattgtaataaattggatattctctctctctttaattgatttaattttcaccacttttatattttcttcctctatgcttaaaagtgtttttggaaacaattatgtaattattaggtagtataattatacatagtaattatattctattttaaaagagaaatactaaaaaatactaatagtacttaatatttttctcggtgttatattattattagtgcaattaaatattgaatcttatatagcttaagataataacttttaagaaatattgctaaccaattatcgtgccatacactattgatgtctaataacaatatttattttaaaatacaatgtgttatgatatccaagtagtaattacatatgaatttttattttcatatttagaaaatgagctagtaattacataatttaatagtattaattatctaaaattggtaataatttgtaattacacttaattctcataagagccacagaattggagagtataattgagaattttcaattacttctaattacatagttatcatttggtgggatattttctttatctttgggaagccttcatgctttatgcatcttattatattaatcaccacaaaacctctttgtactgtctcttctattaacaaatactccatttaccatgatggcctccccacagcacaggccacaccagagcactacctcatgtcattgctattgatgcaaccagctctcatcattattgaaacaccatttttttaatgaattacaatcaaacgcaaaatttaaatccccaataatgttatttaaaacattaatttaaaaagtttcaaacacatctatgtgatttattggttttactcgttatctgttttagatctaaacctttgcatatttttaaactttgcaatgcttaacgttaattttgtgatagagtcataaaaacttgattttaataataataataataataataataataataataataataataataataataatgttattaaggaattttccatacttaaaatcgtaattagtgatatgaaattttttgttacaatagaagaagaaatggtgtggattattcaaaaatcgatcttaacaatgatgatgatatattgtgatgaaatttgattaaaaactttggcgttgcgatgaaatttaattaaaattacaacaaatcataactattcacttggatgttagttttagttttagtttttttttttttctttttctaattttggtatttttaagatatacgcaattaccagtgggtagaaacttaaatttaaattatgtaaaacacaaaaaatatacaccataatacaccatttttgtaaatatttaatttttacgttcaaagaatgtttttttttacattttacggttttccaaaaaataacacgaaaacaacataaaatcaacaaga

SEQ ID NO: 380785 - DNA, 1327 bp, Cannabis indica
aaaaattcaaaatttcctaatatcacccattaagagaagagagattgaaaaaaaaatgacatataaattgtcacatgacaaattgtgtgttttccattatatatattgattgatatatatatatatgtttttttcattaataagaagaatacttacttacaattgactctaaattatgtttttatgtgttacaaaacacaggttaagttgaagcaaatatttccatataaatattgggcaactctattgacatgtcttactgagttgtgcaatctgtggtaattggtttgtgtatagatagaagtgtaggttcatggagattaggctggaatctacaactccttacaatagtttactcagtaagcttatttattaattcatgtcctaatttgattttgactttttggtgtgaaatctgcctaataacattattatataatctaattttatagggggcacttggtacagccgtcacattttgcttactgacgtgggcaatctcaattaaaggagccacttatccctctatgttcaactcactcggtctcatttttgtatccctatctgaggctgttatactcggtgtggccataacaacagaaatgtaagtatttttatcgtgtcttattttgtgtcttaatagatttattgtgtttttaaacggaatataccaaattaaaagttaaattttaaaaaagatttatattactatatattttaagagttacatcctttcaaaaataataataaaaaaaagacatctactcatgatagacactatttgcaaagcctaaccctcataagtttatatataaatacctgattttttgtacatggctttaggattttaggtggatggagacccatatatatatgtaataagaatgtgaattaaattctaatatttcttaaagtcactttaaataaccatggtgtgaaaattatagagtaaataattcttacctattatataaatatctatacaacacattttgttatgtggtaacaattttattatattttagtatattttgtttatatcttttcaatggaggtgcatcctctcataaaagatgtaatcattcacaatagaagtgcaacaatttatatacaaacaccctatttcataaaaaagttaatttattataatacaatcatcaaaatagtaagaaccaagacacaataatttgttatctatacatattaataagtgacttatttcaaatacactattataaagtttaggcgaattacttcatatattattttttttactttttttttttaaaaaatttacgatttgagtttttaaagtgattgcagcgct

SEQ ID NO: 380786 - DNA, 5804 bp, Cannabis indica
ggcgagtttgcttgtcatactcttgagacaaaagggtattgctttcgctccgtatctttgaggtcctgtcttagcttgcttcaagtcagcttccaaatcactgatctgagagaaagcctcattgtattgctctttgtatctgtctccacagtctctttcaatcgtggtcaccttcttttcacgaggaacatccttgtctagagattcatttactttttgcttgatgatggactccattctagcattagcatctgctagagcttgggtggcctcgtctctcctctgttcagcattggtgcgttctcactttagcaactgaagttcataagccagtttgttgaccaacgagcaacttctctccgcaaccaggctagcctgtaaaaagagttataaatgaatcagacaaataaaataggcagatctcttgccttagaaaagttaagtaaaagttaacttacaatattggcttgggtcctcatagtatctaccatgtagacggggtccctactcgccatcattacaaacctgtcaggcccaagcttacaattggtagtagcactccggtcgaacagatcagacaggaatggagccaaatctatctcaaccctaggacaaagtttcttcgtcatctctactctgttaatgatgtcaagaataggcttatcatatttgtcgtaattagcaaactcaacattgcgcctggaagaaatattattgaccaacttcctcatttcatcatactcactgttatgcctcttcaaataaaattgttcaatgacttccatgtgtgctcttacctagtagtagatgccctattgcccgtggcttaaatgttattttcaagtttatatgaaataaagctttgaacttaatctcaagcactccagtctgatttgttaaactcatgaacaatttctacattatattaagagtccctaacttcctttgttaaatttgtgtaggttggagaaggatgcaagtgaatggtgatgcagaatttcactcaactcaactcaacagtgtacattaattttaaatatttatttatttaaatttaggaataaaataagagagaaaaaagtaattaaattagagtgaattcctattgcctaatatcccaacccaaacgtggtcactctgcagtaataacactctccaactctcttatcaaattttcatggcttcaatgctaacccttttatagaaattcgccgccgtcgccattgacgatacctgcattatcacagacagcaaccagttgagccttatgggcgagcaatctcaagtccagacccagacccagacccagacccagacccaaccacaacaacagacccaaacccaaacccaaacccaccatgaatctgcagtgacctccatctctgctaccacaatatctccggcgagtacagcaccgaccgagctcagcaatgctccggttcagacttcttctcctccttccaaaatccccttccgccctcgcaagattcggaagctttcgccagacgattccgactcgaaatctactcaaaccgttgctgtgtctgaaggccccaaaccctcggttacaacagccgttgcctctgcaaaacccacaaagtcaaaggtcgtacagtcacgggccttgatggttcctagagtcgtcgcgagatcgctttcctgcgatggtgaggtggaaatcgctcttcgtcatctccgagccgccgatccaatcttggctcccttgatcgacatgcaccaacctcctacattcgataactttcatacgccattccttgctctaactcggagcattctttaccagcaacttgctttcaaggctgggacctcgatctacacgcgcttcatctctctctgcggcggcgagacgggtgttgtccccgagaacgtgcttgcactaacccctcagcagcttcggcaaatcggggtttcggggcgtaaagctagctacctccacgacctagctaggaagtatcaaaatgggattctttccgatactacgattgtaaatatggatgacaagtcgctctttacaatgcttacgatggtgaatggaattgggtcttggtctgttcacatgtttatgatcttctctctccacagacccgatgtgcttccgattaacgatctcggcattcgcaaaggggtccaattgctttacaatcttgaagacttacctcggccctctcagatggagcagttgtgcgagaagtggaagccttatcgatcagtcgctgcgtggtacatgtggaggtttgttgaagctaaaggagctccttctagtgctgctgcagtggcagcaggcgctagtctgcagcagcagcaacagcaaccaggggagccacagcaacagcagccccagcttatggatcctctaaatattctcaatattgggtatgattcgtttcccttccatttttaatttttagtcattgcttaattgcagtgttttgtttcgatgttccgtattattttctattatgcgttccataataatgcacgttataaactgcacattctatttcaagagagctgttagtgttaactattgcaaattttgaccaagttaactttgttcccgtggacttacattattttctagtcttaacatgtatgtttatcagttagtgtagtatcaagtgcttgcttaggatgaagattcgttttgttggttttcttcaggctagctgacacagaaatgtatagattaggagtcatgctttctaaagtaggttagttagtgtattcaacaattgcattttagattctttatgtttttgtttcttgcactcgctgaggtcttattcaatttgcttgaaatgtcgtcaatggtcgaaattgtacttctcaaattgcgtagttgagaaagaaagttagaaagtttggcactttggctgtatgtctatgcgaaacaaaacaaatcttcaaccgtaaaatcaatagattattgatgctaacaacaaagagggagaaccctcactttgggcttcgaatatagacttgcattatcctgctgttctcggtgtaactttcaaataaaggtgcagactgtagacttctatgactgacaatcttgctctccaaataggggagctattggttagttatcaatttgtgcgtactgtaattaatcccgataaagagagacaccattttcccctaaagctgagggaaaactctcttgtttggggaagagagtggcagggtggtgtttccacattcttgggtgatgactaaaaaaaggaaaccttatttttctatagagacaggtagaaccgtagaaagaaactagctgaattattgtactgtaaattggtaataaactctgacttcatctgtacaggatgggatgatcagtacagacttaatattgccttttattccatctttttgacaatttttcttagggtctttgtcttgacaattgatttgatttactttttttgcagtatagatcttccctgaagtatttgttacatcatatcttatcttctcaaagagattaattaaagaaatgtatcagaaattaatcttaattagtctataaaaattttcttggatttaaaagcttataatttaaaggaaatggttggtagcatagcattaaaagaaaacatggaaaggttatgtagttgaatatttaaaatgataaatcattgctcattacttctttgtgtgtttgtttgtatcgtgcgtgttttaagggtactatagagtagagtaggtttcccatcaaacttaatcatttccccaacatgtcacatggttttcctttcatttttaaacacccaaggaactgcatacagagttaggttctccattatgctcccatattgacattttcttttttgctgtatattgttctctcgtggacaatagactgtagatataattttgtttctactgaagcaatgcatgtaaaaagaaatcagcactaagcaggggctatgaggatttagaagggctagttatttacaagctacataaaagtgttggttgcattggcatttcacgactcttattgattctatttctctttctttcctaaagccaaattcaaattgtaaaactgaaaagcttccacaagttgatttctgaaaattgtattcaatgaaaatgtagtggaggggaagctgggtgacaaacagtgtggtccttggtacactggtacacctgtttccacaataaatgttggattgttgtcctataaacattatttattatatgtgaatgtcttgttgttatctcttcgttgattttgtccttgtgagtaggtgagacaacttatatatataatactaagcaaagaaattatgtttaatgttgcgtcagaaaattatgtttaatttatatatatttggattgaatttccttttccatctccgagaactaaagtgtctaaaattcattggctgccactattattcatttctttctttttctcaactcttaaacagtattacaattccaccagatagtaaagtgttactgtaatttggtgcaagccttttcttataacttgcaacatattttgctgtgaacagctctgggccaggcatggacaaccaatttagggcgtgtgcctggggacaatgattagaatgaaaaaggaggagtttgtgcgtccttcatctcctacgtaaaaaagattcagttccagcattgcaatgatgggtattcaattggaaatttttggtgctgaaagaaagctccatcattagaaagattaagtatgagtgtactaaattttagccttcttttaatgagtaaataaactttcttccatgatgtattgtagtgttgctgtttaaatacaaaacgccaactatattagagaacttaatagaaagtagtagtttaaaagtaataattaaaaaaaagaagggccttttactgcggaatatgttttgggtcaacatgtgattattctctagtatatctctcatatgtttacttctatcaccagacagacaaaatgatcctttaattatgaactgttgtgcattagtaaatgacaaggttttgtaaataaggagtttaagaaagactgtaccgcaattgccttttgtatttggaggcagtactgcactcgtaatatacgtggatgtcatgattaccacctgtattttgaaaagtttgttagtgcttacaagtctggtaagtattttcgtattgtgtttgaatttgtgtccgtacttttttttaggtcgcaagcttgttttcttatacgaatttgtgtttcattttttttatataatttcatttttacaattaggaaacaaatcgcgtttcgcgtattgttatattttatttattgataattaagttataaaagtatattaaagttgatatatttttttaatagtatgagtaattattctactaaatttttttcatagtttttatacaaaaaaataaattattatggtaaaaaaatttatcatacaatttcttatctaagaaagaaagcaacaaagatattttcaaacgttatagtaataataaaaaaaaataaaggttggaatattctcacacaaaatagagatctaaaaaaaattatttgataaatctatagagaatttattatataattttaaaactattgtcattcaaagtcgatgtcatcactgtatcccacttgtagtcgcaactacattcgaagtcgctatcattatcatatcttatttgtagttatcactattgatcaaaataagtttgctctgtacataaaataaatcatatacttgagtaaattaactactaacttttttatacataagtgaatgattttgttataaattcct

SEQ ID NO: 380787 - DNA, 1881 bp, Cannabis indica
agatagagagagagagagaggctttgtttctctctcctgataataatctgtttgtttcttgagaaatgtggagtgtggtgtaaaagggtgtaaatacaaggaagggtggtagagattgaccagtggctatttgcggtaaactctctcataaattcagaccctcacgccgtttcaggtttttgtgaccaaatacaaaggaatgtgactgacacgtgtcagtgtttgttttttttttaaggatatgcatgagtattgtacccattagggtttgaaagttgtatccagtcaggccaattatccagtttttgcatgcttaaatggaaaaacacaaacacaaaaggaaaacactttgaccaaattgattcccactcttacattttcccatttttctgtatatatattacacatatacccttctatcctttcaatttatttccttaattcttctttatttggtttctatagtatcctactaaattatttcacattttttaactaaacaaattaactgatatgtttctacaagttctgatttattaattaattcattggatatatcgaataatacactccatatagatagatatatataaatttgtgtgaagctatagctcttcatttggattcgaaactactgaattttttcaaccttaaaaaaaccatacttcaatcccgacaataatatggtctttttttaattataggtccctgcactatactattactactattgtgtaaacaagagtgttgaaaagaattataaagatgtcatatagtaagtaatagctatatatatagctagatgtcatgttttattactcaattaactttttgtagtttatcccattcccttctttggttttagggattatttttggaaaacattagaagtttttcaagttcataaattacagaatgacaaacgccaatcgataagggataactcatacaggtgtctatataattggacaacaaatcccgagttgaaagtttataaaaacattgatatataataattaaattttattttattatcccatatatggatttgaaaaatctatggttatttttctttcttcatttgcatttgtattgcatgtacattctattttaaacacgtcaacatatagtaacaacacaattgcatatatattatagatatataattcatatatacgtattataaaaaatgcaagttattcaaatcgattaataagttgaaaaataaagggcggagacatattattaattattaataattaaatagtaaaaaagtggaagtagtagggttagtttggggtgaaagaggtctacgagaatccaaacacaaaaaattgacgaagtttccaaagaggtgggaggaaacgccgggaaagtgctcgtgtcgcctcgaaatgaagcacttgaaaaggaaaaaatatttctgccaaggaacccttgttttcccatgtggaaatcaaaaccctaacattgcttatagccttaattaaaaattgacgggattttagggtatataggcataggtttgtttatgaaacaactaatattacttgatggtggacacgaaaaaattgtaactaaaattgtttacttaattattatatgcattagtactcaaaacataaattgtaacaaaaaactagcacatgccctactttttttttcctcaataattttattgcatacttaattttatgaaaccaacagaggagaatgaaatagcactactacaaaaacaccctttagaggcggtttttaagccctttaggcgtcggttttcgcgaaattcgctaccgacgcctatcagggcgacgctaaagggtttgatttgaaccgacgccatatatacccctatggcgtcggttcctagctaggaaccga

SEQ ID NO: 380788 - DNA, 4944 bp, Cannabis indica
gtgtacacgtggacagtccaccgactgtgctttttggatggtggtgtacagagcaaaacggaactcgggtttagatagttatgctgccaaaatttcagttttgtgattaactgttacaaaccgtaaagttcaggtggtttagccgccaatatcccttcttaaaaattgaaacataagaggaaaaaaaaacttagagagagagaatggtgtgaggatatatatacagtaataaaaaaaaaaggttgagacagaataaagagataaaattaatttgattttaaagcatcgtgttactgtcttatatctctgttatattgattcttataaaaaaaatataaaaaactgaaattttattttctgttttcaaaaataattttatttttttctcattttttttttatatattctttcgcatatttgggttcgagtttggagctggtgttcggggctagagttgggttctgggtctaagttcaggatttggagctaggtccaagtctaaatatgggatatgtggtctaagtttatgttcaaggtttgagatttgagttcggggtcgatgtttggagcccgtgacgaagtaagggtcagagttgttcgcggtgcgggtggtacggtttttgactattttttcaaaccaacccgcacatgcagtttttttaatttttcaaactgcacctgcaccgcgaaactaaaaaaatcgctgaaattgcaccgcaaaaaaaatagtgtggtgcagtgcaatttttgcggtttgaactatcaccaaataactaaattatcacaaatacaacaaagtttgagcaacacttataaaaaataccataaggcttgaaaatatatatgaaaaaaaaataagttttaacaatacaataattagtgggttttgggttggacattcacatattggacctaaataaatataaaaattagtatttttataatgtacggtgtggtgcagtttaaactgcatattaacaattcaaaactgtaaatcgtaccgcactgcgcggtttaggaaaaattcaaaccgcgaccgtaccgtaaaaaatttcaaatcacttttttttttgcagtgtgaacgatttgagcggtttgatgaacacccttaataagagtgggacttagttcatgttgatgtgtcgtttaaaacattgaagttattcttttgatgaaagaatctaaaaatagtggtttgaaatcttgagagagtgatataacttgagtggagtgcaatcactcatttctaattttttcttttgtacaataaacatgggacattatcatttgtcctaagtaaaaaagcacctttatcaacgtgctatacaggcaaaacaattatttggtgggaacttaacaatttataaaaagcaaatcttatcatctcttaacctcaccaagaaaaaatcaatggagactaccaccattgcttcttcttcttcatcatcatcaccagttgtggtgttaatggttccattcctagctcaaagccatctcaactaccttcttcaatttgcccatataatctcctcatacaaaatcccaacccactacattacctcaactcttcacaactcacaaatcaagtctcgagccccaaacccacttcaccaactaacccaaatccaattccatccctacccacttcaatttccaccacctacttcttccaaaacaaaatttcccaataccttaattccatgcttcgaagccttaacccaactccacaaaccagtttctaatcttctccattcactatctcaatccacaaaacgacttgtcgttattcacgatgttttaatgacttcggtagtaaaagatgtcgctaatataccaaacggagaagcatattctgttaactgtggctctcttttttctttctacacatacaagtgtgtttccttaatgagacaaaacgacatcgttctcccaataaagcatataccgtcttgggtatcttgtttcccaactgtggtgattgagtttataaataaacagttacaagagttgaattttcaagctggggatattttcaacagttgtagaattattgaaggtatttttttacaacgtttagtgaatgaaattggtttggataagaagatgtgggcaattggacctttacacaaaatgacaacaattagtagtaaggagattaaggatcaagacaagtggctatttgagtggttggagaaacaagaaccaaatagtgtgttgtatgtttcttttggaacattaactgatttttcagaagaagaggttaatgagattgctgttggtttagagctaagtggtgtaaactttatatgggcattgagggaagctgataaagttgatgatgattcagagtcggtaccaaggtatgttgggctaatacaaaattaagtgggattatttcacaaataaaaaaaaaaaaaaaaaaaaaaaataacaaaaatacaaaaataaaaatacaaaaatacgatttcacggaattttaaatatttatacgattttttttaattttatttacataaaatactatctttttatattgtactattgttaatttgctgttgattttttgttatctgtatgttatttattgttgttgttttgatgttacttttatgtagttttattgttgttttcgtgttaaatctataaaaaaaccgtaaaaaatataaaaaaaaaatgtaaacataaaataataatttttttacataaatagtgccttatgtaactatcccaaattaaattttgggactcaatataaatagtttagtcattattaaaaggaaaattagtctggtaaaactttgtagagaaatgctaaaacactacaaaaaatcttacttttagccataataaaatgtgttactaaaagtgaaaaaattgtgacaaattataaatcatcattcttatgttatgactaaaaggtttgtgacaaaaggtattagtcacaaaaattataatttattgtgactaaaaatatttttagttataatacttgttggaactaaactaaattattgacagcttgtatgtaaaaactatgttttagtcacaaataatattttattgtgactaaaagtcacatttagtcaaaaaaaaattatactatgactaaaaaattattgctaaagtagcaattttttgtagtaaaaagaccaatagtgtttagttgttatattgctattggtgcaaccaaatatcaggtctcatataattcaatgtaataatttttaaagaatatcgtttacttatcatagaacaccatctctagatagtgttagacaccactgatgctcaataaaaatgctcaactttttatgatatctcttattgttgaatattttatatctaatttttttattttttacattttcaggaacaatggggagatcaacacgcaatccttacttgcctcacctaagagtcggccctgtaataatttaagtactcatgaagaagagagttggagatcactacttccgggtgggtttgaggaaaggattaagggaatgggaattgtggtgagggaatgggtaccccaagtagagattttaaggcacaaatcaataggtggatttatgagtcattgtgggtggaattcttgtatggagagcataagttttggagtgcctatagcagcttggccaatgcattcagatcaacctattaatgctttgttcttaactgaagtgctcaaagtaggagtggcagttatggaatgggagcaaagagatgagttggtgagttcggttatgattagcaaagctgtgaagatattaatggaatcagatgaaggttgtgagattagaaagaggactgtggaattgggtgatgaagttagaaaatctacagatgaaggaggagtcactcgtatggaatggcctcattctttcattgctcatatcactagataatttgtattaatatagtaagtgtagctttgcaatccataataacctttatgaaaaatttgattaacaatagagcaaattaaatgtagttattttacaaattttagtttggcaaatttcacaataaagtatttaaccaaaaacaagcttcagctgttgtgattatgttgatttttctatctcaaccagcttttgctactttctttgtattattccttcttgcattgtttaagttcatatgaagatttactagaatgttgtggactaattgagacacggtttgaattctcaacttctcatcaatatcttatcaccaaaatggtgtttttactctaaatcttgtgtttaattataggactacatataatcattattgggtaatatatgtgatgatgaacattgtaaacagtcacctcttgcttgtgcaaacttttttcaaggagcaaaaaacatcatttttgtgtaaggtatctaggccaaaccaatatattttagcacctcctagcatttttcatattcatataaagtatacttgaaatgtctagagtaaatcattctaaaattttgaagaaccttctaatagactccactaatctctaatattaatgtgattaccatgtggaaaaagacttgctattttttgccattgtttcctttcttttactttcctatcaataagactatgtttccttcttatgcacctctttgattttgttttgaaattgggtactcttatataattgattgggattttatcaagaaatcttggaaataataaaaacaaaaaaaaaatggattacatttagaaggagaaaataaaagggtaaataccattttaaattctgtgttttgcaaaagttattaattggaccctctattttgataaatgacaaaatggactatatattttctaaattggtaaaaataggaccctgagctcaatttgcaacaattttattttttaatataaccaactttatgacaatttataacacgaacagataaaaaaaatataactagttttatcataatatctcta

SEQ ID NO: 380789 - DNA, 1445 bp, Cannabis indica
gagctagcctcaagtggttgtttggcatgtactcatagatgagatttttctcctctccttgggcaatagcaaatcctattacactttttgcctattacttctagccttacatttttgagctttgcagcaagatatcaccactatgtcgtcaacaattttctataatatttattaaaaataaattaaatgagagatgattttaattttgttatttcttatatgacccgaaatagaaaaatcattatagaaacaagtctaaagtaactttagttgggcatgtactaatagatgagatttttctcctctcctttggcaataacaaatcttgttacacttcttgcttattacttctagccttcccttgagtgtgcaacttttagaaaaatgcccaacaataaaatcataagggttattgctaactaattgcagtgtgcaacttttgagaatgtatccaacaagaaaattatgtgggttattgctaatcaattacaaacgtgtaaaagatattagacagtagtgtccaagatcaatactcttctttttacagcacatataaagtaatcatcaattattattacttttaggcatatatccacattcgtactcgatacactataaaagttgtcaccaaatttcgatactgatcaatattaattacatctgcataaaatatgacgatatgaaaagaggtatttcaataaaacaacctcttcttcgtttgtacgatttagaaacgaatattttgggaacgacaaatagtcgtacctaatatatagtcgtccccaatagttctgtataatagaaaccctagtttttgttcattgctcacaccacgaaaccaattcctccgcctccaaccgtgagaatcgaccccagaccccgaaatcgacgtctcgcaccgtgaaatcgacatctccattcccaaaatcatcaacctcaacccccaaaatcgacatccccattcccaaaatcatcaaactcaaccccaaaatctttattcccctaaatattttctagcccgtggaacttcaatttctccgccggcgccggagatctaaaagaaggtaacactattcttttgttttttttttattattatttttctttttattttcgtgtgacatttatttatttgttgaaaaataatacacacttaatatatacacaatacttctcaaaaggaaatatacggtatatatacatctcaaaatgaaatatacggtatgtatataaatgtcgtgtatatttatttgttaattattattatttatttcttttttataatgggcattgggcagtgggtgtttctttcggcagtggttttgttctttcttgccagtttcattttccgtcgaggcagggacggagggactttagcccatatgtgggctaaagccctcactcaaatatatacatcaaattttttatatgtagatatatacata

SEQ ID NO: 380790 - DNA, 2897 bp, Cannabis indica
cttttcgacagaaccctccctcccctaacccttgttgttcttcttctgccattcttcttcttcttcctctcaacagaaccccctaacacttcttcttcttctcgacagaaccccccaagacggtgcaacagcctccccgccgacggtgcaactccgacgaggcttttcagccggaggcattgaaatcggtgaagggagaatctcttgcgatgaattgcatgcttaacctccctcacttcagttactgttcgccggagtcaggggcttcatttttaatcggatccaaatggctgaacccgaggctggttgccttagttgaagaggaggcttgtccagtaccgacggcgacggtggcacccggtggagaaggtgctttcgtggcgaggattatggatttgttgtatcactactcggctgtgtacgactcgttggaagtaggtttctcaatgcagagccaggcaaggggtttagtgaagcggtttttcttagggccagaataattcctacccaccattacctgcaagtccttttcaggcagggaatccaaagggttgagattttgagactcattaaacatgtttgttcatttttgaagttgtgtgtcttatggttatggaaacatgtcatttttattctattctatctaagcctgcataacatagtgtaccaatataagagcaccaagaaatggtattatcaagggggtttggtctggtctctcacacagcagaagaagaaaacaaaagaaagaaaaaaaaatgacaatttcttggtaatattacttattttttttataatttatttatttttataatttttaaattattttttataatattttaataagtaatattacatggaccactaaaaatttatcacgtgtacattcatgtacacgtagacagttatatgtggcacttaactgagatttttggatggaagtgtgtagagcaaaacggaacctggatttagtaggttttgccgccaaaatttcaatttttgtggttaactgttacaaacctaaaagttagggtggtttagccgccaatatccctatttattattatatttaaattttattattatttgaacttatttataattgataaattcatatcttattattattagagtaatttgcggcataaatacataagtttaactctcaattgtaaataaatacctaaatttaattttttacggtaataatacctaagttataattctggaatttttgtaggtacctagctattaagtgttaaataaattgccacgtgataattcctgattggtccaagttatcaaatttttattttttttaaaaaaaaattaaatatatcaataagaaaatgatatgtggataatgacttaatatttaatagtcagatatctacaaagttccaaaaatagaacttaggaattattattgccaacaattaaacataggtatttgtttgtaactaagagttaaacttaggtattaatgttgcaaattatttttattattattaatatgttgtgtcgtgcttttcagacttgtcgcatgtcatgcctttcgctctaatctagttgggaaatgtattgagtaaaataattagggctgagcatgaaatctagaaaaccataaaaacccgttcaaactgacctaccgaataccgttggaatcgaaaccagcgaaaccgaaaatcaaaaaaactgctaacggttaaaaccatcattgaacggtcgattttttttgggtaataaaccaaccgaaaaaattaaaactgactgttatacatatatattaatttattaagttttttttttgcttgatgtattgtaattactcataatatataataatatattattattttattaatattaaaattaaaagaataagacaattagtttttaaacaattaatttgtacggttgtagttgtagaatgtaaaataatgtgcttatattataaattggatcatattttaaaaaagaaaaagtttagtttgggcggtttaaactgaccaaaccgagattcaaaatggtcagttttaagataagttctggattggtgggtcgatttttgaattacaccaatccagaccaaaaatcgaatttttaatttttatatagaaaaaaattgaccaaactaaccgatgctcaaccctaacaataatacagtcatataaggttgtaaattgttgaagttgtatttcagaataaaaagcaacaattgcagtgacttcaatgccagtttactcaccagtcaccaaccttgtaattaatatataattacaaattttctttagcattacttgttattcatatttgtttatatattttattataaaaattattggagttttgtgccttaaataactttgttattcattacattgaaattgtattttattatagaaaagaaagcaaggtgttgctctcaggaagtaagtatctttggttgtgaagatagtagcatctatggcaatgaaagatctcgatggtaaaagcaataaattatttgttggggttttacgccctaaataaaaaataattcaatgtaatcctattcatctgtcaatgaaacatctaagatcacttttgactactgtctattgcttgattcacatgtttattttatgattaattgtttaatatataaattatacttaatcacgaacatatagttattcacaatcataatgttgacgctacagtgaaaaatatttgtgattatatacttcaaactatttaagtccaaagatttattagtgcactggatttacacttatgtgatactcgacgatgtgatttacttacacttagataagtggaatgtctttttcaaggcattcaaagtaaacttgtattggatgtatagatatatcggactggaccgatattgacagtgg

SEQ ID NO: 380791 - DNA, 506 bp, Cannabis indica
atatatgagaacattgaacataaaaaagaaaaaggaaagagagaggaaaacctttggtgatcggaatagggaatggttctaagaagagatatctcttggcgtctctgttctcttcggagctttgacttttcgtttgcgtttctacccatctttagaatcaggtatagtgggttaacggtttcagaatgagaaatggaatagggaagaaaaagaaaagaaggagctttgtttgtttgtttgtttgttttgtttgaggttgtgttggtcagttatgttttgttcgaaggaaataaacctggttttgaggcactgcggtggcctggtcgcacgcctactcctatgcaatcgctcaaattctcttttttggcttgcttcaattaaagaaaagaaatatccaaattctaattcttttgccaaattttatcacaaaaatatttgtgttttttttttattttgtttttttatggctcttgatttttttttggtagataccattttggaccctc

SEQ ID NO: 380792 - DNA, 2626 bp, Cannabis indica
tggaatctaaacaatatgtatgttttcattactcccactttgtctggctcaattctctttgttgttaacttgtagtttatctaaatcccaggctttttgaggatactgcttggcaacctgtttgcaaagacgaatttgattcatcgcctgctttgcgcaaggcaattatttatggatatggcccatttcggccatggatgtcaatagctcattggtaatacatatttctaatgttttgtatccttcgatatggaattaagttttaaacttggtttcaccagacattattcttgttactgttctggttccaattagggtgatatgccacttcgatttgaagaagttcagatcaaatgaagttaaaagggtgaagataagtttggcttgtgtatttgcttttatgttcgtcggatggccattgattatatggaagacggggatcataggatgggtcaaatactggttgatgccgtggctgggctatcacttttgggtattactacttattttgtgtcttcctattaatatcttgaaaagttaaatgatgctagtttcccttttgtagttaaaaacactgtataatcaccaacatttgttatagctaaccaattttgctagttcctataacaaaagtgggcatgcattttagatttttatctgcatttctgttaacaagttaccctgtttttgaatgattattagtactttcatacatccaaattatttgaacattgagattcacttaacaggaagaatatttgtttcaatctatacatgatgtgttgtgtaccacaaattcatctcgcaatgttgcaattatttcagaaatttaatttgaaaatgctactgctgtaagcatatcccacttgaatgttggttactagatttgcctgactaatacacttagtgttctgttaagtttcttgtagaccagatgatccttccttactcaagtgaatatatttcaatattcatgtctaacatttcttactctttctcaacctgtagatgagtactttcacaatggtacatcatacagctcctcatataccatttaaatctccagacgaatggaatgcagctcaagctcaactaaacggaacagtacattgcgattaccctcgttggtactctttctgcatcccttatttccattgtttgagttgatatcttctccacaatgggattgttagctgacccttttccttttgtgcaggattgagatcctttgccatgatataaatgtccacatccctcaccatatatcttcaaggattccgagttataacttgcgggcagctcacaagtccatccaagataattggggaaaggtaattatggatttctcactccattgtgaaaacagaaactagtatcgaaaatctaacatttcaagatgatttgatgtcatttgtttgaatcgtgcagtatttgaacgaggctacatggagctggcgtttaatgaagacgataatgacattgtgtcatgtatatgataaggagaaaaattatgttccctttgatgaacttgcacctgaagactctcaacctattggatttctcaaaaaggtgatgcctgattatgcttgagtctcttgtgttacctagtggggtcacatacttttcggcttaattcttatctcttatcctaatctttcctagtcaagatagagcaagcatgctttgaatcaccattttttgtttccttcatgatttctaccattacatttcagtgtactttcaaaaagggttattgattaagtagatgaaatgttacattgaaggaaccttcctggaagttaaggaatagtttaattgaatgttatttttttggttttatataggaataaccttcttgttaaaaaaaagttcaaagatgccttatctattaatacaaaaagtactgggtgattctttttttgagtgatgagaacctcctcattttcactatatattatttatatatatatttaaatagtgtttttagtttataaaggaagaagaacactcttgtttaaaggatgcttctttattaaataaaagtatcctagactagaaggatcctcattgggtgttcagaccctcctcattttcaccatattttaattcacaacactctggaattaactgatcttttaagttaaactacaaccattatcatagtaagcaatgttggatttttaaactcattattgtgaacagcacagcatcttctgactttagttactttttaatataaagattgtagcttttgttacccaatggctgttaataatattttccgtacaaacacaaaacagagaagagagaacttattaatattaaattcccttatgctgcagtgcaggtggtctttgtttaaattggttttcttcacttatctccatttgttacattaatacattgaataaacataattataatagtgtacttgaagagttttgtggcctttttgtactattatttatgattatgagatgagatcataataaggagagctcatctgaaattaaaggctgcaaagtaccaacaactaataactttatgcaaactcatcttcaattcataacatataatatctgtcaaagcagttgcaactgctcacatgctctctctctctctctct

SEQ ID NO: 380793 - DNA, 1662 bp, Cannabis indica
aattatgctatgagtgttttcttattactaattttagtttgtagtgagatggagagattggtgaataattttttgtggaagtcttcttcaagtaatgaaacaaaaaggatacacaatggatgagttacgatcattcgagttctcataaaaataaaggtggtattggatttagacacttgagagactttaatatttctttacttagaacataagcttagagactcataactaagtgcgatactatccacaatggtcttttttagatgcaagtttgggtagtaatcctagttttgtttggcatgcgtagtattatgaaatctcagtctatggtgagagggggtttaaggcatcaggtagggtccaaaatggcaattagtgtgttctgggatccttagttgccagatgagcataatccaagagtgagtactaaccatcctactttggtggatacaatggtgtctagtcttatgataccaggagaaattacatgggatgaggaggtaattttagatttatttaatacccgtgatacatggttaattttgaatattccttgtagtgcaactcagttagatgacacataggcttggggagagaaaagtctaggcactacacaattaaaactgcttataaactattccaagaagagaaggaagatcattttatggctgataaatttggttttctgaaataactgtggcagttgaaagtgcctccaaaggttaaagattttctatggagggcagtctcaagtttttttccaacaaaatttcaattgagaatcaaaaagatggaagttgacacttattgttaatggtgtcttatagcacctcaaactactaatcatgtgttagttgagtgtgcttttgtgcaagatatttagagtagttttggttggtgatatcaggtggccataattccagttttggagcttggttacatgatcttttcaaaaatatggcaaggagaaacacgttgaagtggccatgctatgttagtcaatttggggaatccagaatagtctagtttggaagcaaaaaaatactttagttttgtaaatcataacggcaggagctgtcactcttcaacattattgtactgctcaggcttctaatgaagtctctatggattcgttggaaccagtagttggtcttgagaaatggacgaaactggatttagaaaatcatatagtgaacatggatgctgcactttttgttgaaacaagatgctatagtttcgctttcgtcattagagataataatggcagcttgttggaggcataatcgatgcaaaaatcaggtgctccgcatcctgaagttgtagaaggtatcaatctcaaagaagctctaagttggttaaagcaacagtcgtgtaggaaggtggtgctcgaaactgattatttggtattggttcaagcaatttgtcatcgcttgactgctggcagtgcaccaatgctctctaactttgggaggattgttgaggattctaagagttgatgtagactcttcctttagtttctttgtgttttgtaaaataatctgccaataaggtagctcattgtttagcaaggtcatcttattttatctctaatcgtatgttttataggagttatgttccaatattaatgatgcttattacatagaaaatataaattgacatttt

SEQ ID NO: 380794 - DNA, 2897 bp, Cannabis indica
tttttacccattgaatttatatgcttaaatgtcttgttcctttgtactgcttttaatacagcttcttctttagatatcttgttcagattccttggttcttgtatatgaatcttgataatactggttttaggatagctttaaatccttgagcttctcattttgttttccactatactcgcgttttgagttttttttttttgaccttgttgcgatttctgaaaatggtaagaactcattgagatatatgatgctctgaaattgaaatcccacttggattttgatgagttaaacaaatgttgttaaaacatattgttgttatcatgatctatattgtttgcacaagatgtctgtcttaacagttagtcattattaatttatcatacagctaaaaaaataatactaagcaaagattaaacacgatctgtttgagtaattttaattttagttgtatagaagttggaaatttaattttgttagctatgagtttcttgaaaagtgcaaacttgaaaatgttgtctgtgttaattttttctttttttcattgttggtatccttattcattgcaaatggaccacatctcaaagtttctcatctacttgacaaaagaatgtctagagaaacaagtaaacaaaggggataaaaaaaattggctgaaatttctaaattctaatcctagcatagcttcaacatgatgatctaaacaagacctctatacttagtttgaaataatccacattttctaaaggagctctatcttttgtttcaacagataaagaaagtagtccaaggacaataaatgatctgaagctaattaatgcagggaagatattggaaaataacaggacacttgctgagtccaaactaccagttgatcttccaggaggtgtcattaccatgcacgttgtcgtgcgccctcctctttcagaaaagaaccctggtaattacttcactaaagtactcatctttacctttcacccaatctacatttccattattttatcctgactcaactacagcttatggtttgatttagaacatggggcatggctaacttgacttttcatttcaaacattggaaattaaagaattatttttttatgtatgaacatgggattatcttatgaaacaatgaaacagaattgggttatgtgacagttatataataatagcacttggtaattttccacagacaaagtgcagaatgatttgccaaagaagaacatgaaccggtgtggatgctcaatattgtagccacgagcagctgggacccgaggtgaccagaataacatagcttctttagttggtctttagtatggcttcatgtgtctccattggttgctgatcacactctaatcagaatcacagttctctaatcacaaacagagaagttaagcggagttggtgcttctttgactcctctggtttcatctggcataacacatcttaattcagtgttgatgtgaatgagaaaagactggttgcataatattggattgaatttggaaacatagttaccaaaacatttttttttcttggaatgaaaagaattataaaggaaaatatatatattatagaagtgagttcattggtttttgttttgagtttagtataatcagacctgtgatttctgtttctgtttctggctaatgaacaaaaaaatagcttttaatttccagtgacatgtataaagtactgtgtgatcatttctatattatgggtttggacccaatgtgaattatgaagcatctgttattgtttaatgaataatttgattagacatagaattaccatatcattttctcctttgagaatgagcagcaaagggttatttaatcacatcttactcttcgcacagaaaaagggtaagaaattaaataaatgaaagaaagaaagaaagaaaaaaattggagaaacgcttcctatccttttcgaagatatttaaatagaattactaatgtctattaagaaaaatggtatctatacagtagaagttacaccaccgggatgacccaaaacccaagccttcttccaaaaggaagaagagaaaattagagttgtacattatagggacttgtacttatggtcctataaaaatcagtgacatgaaccaactgatgtttttatttacacatcctttcctttttctttttcatttgaaagttgaccctctgctctgcactacctttagctgcccatgaacattcacctctgatctacataattacataatgcagcaaagcattgttgaaatactaaatcttctcagccgagtgaaagagcgattctggatgctccctccgcaaatgaggaaaacttaagcaattgttacagttgctatgtcaatggacctccaagtggggctgtcgaggagcgatttaaatatggtactttcttggatgcccggacattcttcagagtcatcatgagcttctgtctctctccttcaacctctgcgaattgaagacttagttgagagtatcggtcgtgcatgtcctttaattcagtctcgactgttgtatatctttgcttgatttctaacatgtctttaattagctcattgatgtccctaaagcttttaaatactgcttcctcatcaccatgctgtttcaagaaagaactggaacacagaaggagaatgctatgttaaaatcacatcattctttttcattctgttctctagtatatgacattttgcaactagattattgcatcacaaaattctctggtttcgagatgagaatttggtcttaaatcaggagtcttgcatgtccaaatgaattaaagaaaatttacatgccatcaaggaagaaagtgaaaggtttattgggggaatcggattaaagtttttccagggtctatgagagagagagagagagagagagagagagagagagaga

SEQ ID NO: 380795 - DNA, 663 bp, Cannabis indica
gccgaaacaagtaaagggtgcattaatatatcttttttaaaagagtacattgtagaatcacccaaaaaaaatattttataataaaatagttatataagtccaaagtctatattactctatttttttaatatttaatattttatttcattacattctcatataaaatcaatataataattttaattataatatttattttaattaattcatattactatttttattccattacattaattaccgttgctattatcatcctgataatcatgatgcggtattcaaatgacgtatctaaattaaagaaacaaaatgtatagtagttacaacggcacttacactgtgagtagggtagggacggttgaactaatgtagtcaactcaagacccatgtgatttacaggacttttttattatattttatttattcatttatttttggtgagaaaaaacacctgaaacaacaaacaagtttaacaaacgttcattctactcccctgccaaagtcaataaataagagtatttccatgtaatttactcttcaactacagcttgttacattacctttaataatgtaacgttcgttagttttgttcattatatatagttttgcttgttagataaattaacaattaacccaagatctatttgtatataacataaaaca

SEQ ID NO: 380796 - DNA, 2564 bp, Cannabis indica
  modified_base (5)..(5): a, c, t, g, unknown or other
ctttnttttctttttctttttttttttgttttgaaagagcaatcttaaagtgattcttctaaagaacgtgaattcactcctgtatgtaatttaagttttaagagctaaaattaatctttcgagtagtcaaacggacatcatactaacttgaaagacaatagactaacggaagcacagataaacaaaaaaaccatgggaagagttaaagaaagaactgtgactaacatgctgtctttctcaaggccatttgccacttggttcaggaaatccagagtaaacatgtgcaggcatacctgaaaggcataagttgcaagagttcatgtttatatatataatatagagtaattgatgaaaatagaacgctccccactaacaaatgaccagataagaatagagctcaatttgaggcacaaaactaaatgcaattcaaactagaaaattacttcatttagtatctaaactattaaacaaacttgcttcttctgaccaaagtttgaaaaaagcaagaaagaaaagaaaagaaaaaaaagaaaaaaaagaaaaaaaaaagagaagattccgcatcacatagcattcacaagccatttaggaaattgtgacagtctttccaaaacaagattatgattcacatgtttgttactgccaacactgccacataaattacattccaaacctagaagcatcattatgaacttgaatcaacagtcatgattgagtgtttacaaataattatgtttaaagataggctgtctcctaagctagtataaggaaggaagcaaaacacaaaaagcaaactattaagggaataatgcatgtatggcatatttttcatctcaagccatctcacatgataatttgcttcactttgtagtgtaaatgtacagcacactatgaacctacaacttacctagtttgcaatttatctgaaatgaaacagctttatagatctatgaatgcttacaagttacactaaactagtgtaatatttctcaacaaaaatgagcagcattcacttaatatttaaataaaaaaatccacaagtagaaaatagggcttcccaattatcatctttttcatatgtataagattatgaaagttacaaatctaataaaaatagataaataggatattacattactccaacaataccgaaggcgtccagttccttgattgattgcagaagccatagttggatccaactcactgtattcgacaacagttagaggaccaccttttcctcggcgcacaaagacaccaaccttttcttgggggtatgcctgtaatgaaaccacaagaaacttcagaatctcttaattttatatttcagaaaaaaataaaaaataatctgatttgtatcaatgtaaatacaagtctgagaaaatagactaaaagaaattatagcaagagtatgtaccggttaaagcaaaaataatcatgcacataacaacagacctaaatacaaaagagtttacaaatttaggttaacaagtctcacaaccaccacccacgtagtaggttcagtttgaagatcttagacaatatactgacacatgaattaatcacagtggttcttaagcatcatctatcaggataagctcatcaaagtggccttttatatcatgttatacataaatcaccctccatgatcaccattgtattaacagtattcagattaagactagtaattaattcttatgcatcatataaagtcataaatacaacatgtgtatcataatcggctgtattactctactataccatacatatgactgacttcacggcatcacatgcaattattatattatactctttaagacttgatgatcaagaaacactcctgaagtatagattcaccagaaaactgcaataccgtattttggacctaaacccatgatatatcttgtgatgagctaagaaaacgctaggtgaagatctcatcatatttttcagttaatatctacgcaattcacattccaaataaattgacaacaagagctaaaggtatacaaatcatgcaaaaaatacaacataatatttcatcatgtaaactaaaaatgaaataaattcataaagccttcacttcagcatggttttccaattgaatgaaaaaaccacgaacatgtttcagaatgagtgtataaatttgcacattaaatcttagatgtaccttacggacaaccttagcagcagcaacaacacctttatcaatgaaataacccacgaaagttggatcagctacacgaacctgctttcaagatgctaatcactatggtcttcaataaattaaattccagatattgaaccaattgaaagagacacattcttttgttcaatgtccaaaatgaaaattagatgaattatatatatatacatatatatgtgtgtgtgtgtgcggattagtactcaatgattacaccaatatttatctctctctatatatagttacataagccatagtgccaatttggtagccgacgaaaaggaaaagagaaaagaacaattaaatcaagccaacatggcatctgaaattagtaataatataatatttctttttcttttttttt

SEQ ID NO: 380797 - DNA, 4185 bp, Cannabis indica
tatattggaataatagatattttagctaattcaataaaaaaaaaaaaaaaaaaaaaaaaaaaaaaaaaagaacataaaatgaaagaaagagtagtgggcatcacttttgtccaaaaattattagcttattttccccacctgatctaagcagtgatcacaaatagaattattatcaagtcttagttcttctagcaattaaatgtgaattttttcataaaaaagtgtgtccaaaatgagcaaccctaattaggcctttatttctatgatgattacttttgaaacttaaactcaaacatgtcatggctgtaggaaactataaaagggtgttaatacaattaataaggttgatttgagggttacaaattaatggttgccctactacgtagagacattcttgacttggagcatgtggtgatgtatcgctacataaccgaccatggttgccctactacgtagagacattcttaccttctcgttaccctaagatatgtttctaagagtggaatgaattaaaaatttaaattaattttgaaattttataaaactcaaagataatttatgtaaatattaagtgtaatgcaatcacaaagataaatacaaatataagcaaataacaactgaaaatataaagagtttaggaatagaaattgtaaattctcaattttcacaagattgggtagaattgttggtggaaattctttaatcagaatcttatttactattcaagtatgttatattaatgctaatccaacatccaaatattgaaattctaaaacaacaaattaaatacataagcgttaagaaaaccttacaatggttgcaacataattaattgatttcttccattcagttctcttactcttgatcctttctgttacagagtgtgatcaagaactcaggttggaaaagattacacagactttcacactatcctaagtattaccttaaaatatgtgggtaaatactcaacactcaagcactcaaaattcgatgaacaaaagagagtatttttgaaaattgctaaaatataagctctcatttgatttctatttttctgacaaaagaagagtcaaagtgttattaggttaagagctataagattataattatagtgtaggtctagggttacgtttagaattaatatggatcaaaaaaaagttaaaaagagctttattaaaaccctttgaccgaaatccatagagagttccaatgggtttcaacttaattacttcaatattcaaaaaaaatattctaatttaagttgatctaaaattaataaataattaattttcaacttaaatatatttttctattaaagaaattaaatcaattaagtatctagaaaaattcaacttaatattaattttcttctttaattaaatatcataaaaatacaaattagtttaccaaaaattaattatctagaatttatttcattaaacgaagtgtatttttctaaattaattttaaaattatctaataaaaaattaatttcatatattttaaatttaattatgttgctaattaatttttaattaagttagactaattaatataattatttaaataatggcaaatgggatcaaattactttctaagtattgtggataattactcaagaaaggtatgggtgcacttactcaaaaccaaagataaagttttcaaaacttttaaaaattggaaaactctagttgaaaaccaatctagaaagaaagttaagaaactaaggacagacaatggtttagaatttggctccacacaattttcaaactattgcagagaagttgggattgggagacacaaatcaacaccaaggactccacgacaagatggcttagttgagaggatgaatagaactcttattgaaagggttaaatgcatgttgaagggtgttggtttggaaagaaagttttggggagaagttgataaaacaacctgctacttggtgaacagtagtccatctgctgtaattggtgaacagtattcaggctccaagtctagaaaatttgagagtgtttggatgcattggatatgtgcatatcaaacaggacaagttacagcctagagcaatcaagtgcatgtttatagggtatcctgatgcgattaagggatacaacctatggtgcctagaagaaggtttcaagaaatgcatagtgagcatagatgtgatcttcaatgagaaagtcatggccatgaaaccagaacacaaagctgagacttatactgaggctagacatgtacaagttgaagtaaggttagaagtaaaggcaagtgacaatggtgaacaggaacatgtcgaagaaacaaatcagactcaagacagctctcttgatacctatcaacttgctagagataggatcagaagagactcaagggcaccggccatgtttggttttgtagactatactgcacatgctttaaccatagccagtgaaattgagaatgttgaacctgcaacttatgaagaggctataaattgcaagaacagagacaagtggcttcaggcaattgatgaagaaaaaaaatcactgttgaagaataagacctgaactgttgttagaaaaccagcagggtgtaaattgatctgttgtaaatggatcttcagagaaaatgaggggatgtcaattgatgattgcaagagatacaaggctagacttgtggccaaagggtttactcaaagagaaggagtagatttcaatgaaaacatgcctcaattagagcaatcatggccaaggcagcttttgaggatctcgaaattgagcaaatggatgtgaagaatacctttctccatggaaaactagatgagatcatatacataaagatgccagaaggttttgatgaagatagagacaaggtctgcttgctgcagaaatctctctatgggctgaaacaagctcctagacaatggaatctcaaatttgatgattttatgatgagaagtggattcaccaagagttcatatgatccatgtgtatacttcaatggtacactcttccttcttttctatgttgatgaaatgtgatagggaaaagcaagagtgaaattggagaaatgaagccactcctaaacatagagtttgagatgaaagacctaggtgaagctaagaaaatcctaaagcattgaaataagaagaaacaaacatgaatgtctgactttgactcaaggaaactaccttagaaaggtactacaaaagctcaaaatggataactcaaaacctgtgtaagctcctctagcagcacatttcaaattatctaaagatcaaggtcccaagacagaacaagaaagagagctcatggactcagtaccttatgctagtggagttggaagtttgatatatatatatatatgttatggtttgtacaaggccagacatagtatatgcaatgagcattgttagtaggttcactgtagaccctggagagaagcattgggatgctcttaagtggattatgagatacagtaaaggcactctttgatctaggcctcacatatagtaaaagctataaaacagtggttggtgtctcaagctatgtagactcagactatgcaggttgtatagacacaagaaggtctattacaggctacatattcacaatgcaaggaggatgtgtgagctggaaagcaaatctacaaaaggtggtagctttatcctcaacataagttgagtacatggcagctactaaggcaattaaaggagctttatggctgaagggtctggcaaaggaaatgggattcaagacagacaatatcacaatgttttgtgataaccagagtgcacttcatctaataaagaaccctatgttacatgagagatccaagcacatagacatcaagatgcacttcaatagggatgtaatctcaagcaaggaaatccaagttcagaaaattcacactaatcacaaccctgctgatatgtcaccaaggcagtgactcaagtcaagttcaaacactgccttgatctacttcatctagcagaatgtgattaaacttttcatcaagcaacttgcaaatagatatgaatatgaaatatatattgcgctctttttccttagctcaggttttgtcccactgaattttattgataagatttttaatgagaaaactttaaatcatgttaacatacttgcactttatgaagcaagtagataatgtgtggaagtgagatcattgacatagcatattcgg

SEQ ID NO: 380798 - DNA, 1244 bp, Cannabis indica
tgcttcctcttaacttccttaattaacagaacatcaccagaatcatcagaaccaccagaaagatcttcgttgtcatcttcagaaattgttttcttcattttcttcttgtcaagaagaagcttcgagaaatcagagggagaaagcgaagaacgagttttaaccatttacaataagttttttcttgagaaattttgaaatgaaaaaccctctatgaaactatcactctaaatagagagaaaatttgaatttcaaaactctctctaaaaaattctcacactagaaacttctaaacttaaaaaaatgaaacccactaaaatcactataaaccgctcgctccctctaactatacaatatactaataagtctacaaaatagggtgcaattatcaaaagtatcaaaaaacgtgaaaacttgacgcatgtgaggtacaagacgttggcaaatggacaatgcgtgataagacaaagaatgacgtcacctgcaaaacgcgtggctaaaaaaaaacaattaaattaattacgatatgaaaaaacgataaatttaaccaaaataaaagatcacgacaaaaagggaaattagatcaaacatgaggctacaaatataaatttttctattttttaaacacattatgtacctaaaatagagagtaaactttataaaatgagctctaattaatcatacaaaaaatgacttcttataagggagaatagatagcgaactctcaacttttttattaccaaactttttaatagtattttaataattaaaaaaacacttctatgtacttttttattattttttagattaatttagatttaataaatttaaattatataatttttattaaaataatcaatcttaactaaagaaaaagcataattggggcaattggagtaatgataaatagatctttgttttaacattttaattattttaattagaatttaactaaaagataaatagtacttttggagatactaacaatttaatattgataaagatctataatggctaaccctgttatacttgtgttcaagggaggagcctaggggaacatataatgtaaagtcatgtgtctcattccctcaattaataggtttctaaaagatttatgtggcgtaaatatttaagtttgtcttctagttgcagattaatacatatgtaattattttcacagtaaaaaataccttcaggaaaattaaactagtatccctacacaactcactgttagaaatattttacca

SEQ ID NO: 380799 - DNA, 3491 bp, Cannabis indica
tttttttaaagtggaatataatgaatccaagtgtttccaatgccaatggaagtgggaatttaatttcattgatgcatgtggagagtttgtttggttgcttttctgttaaattattattattctctcaatattatatattctctttttatcttatatttcccatgtggtcctactacgtactagtacttctgcatgtgtattgtaggatttttaccactttaacctacaccaacaaaacacataatatcagtatacaaagtcaaaaccgacctttcctctgtctaacttaagattagacaaaaacggcaacgtttaaaccccacgacaccaaaacttgtgtcgtattgatccctggcttaaagactctccaagaagagtctagaaatcctaactcacacactcagcctctcaaacctgaaaccacgaaaccctagcagagcaagttctctccaagacatggtattattagagccaatcggctccccatggcatcaatagagtgtactagttctaccccacaaatagaatgaaaatactcgaaaccccattcaaaaccctacaatcataaacccacaaaatcctagtaatgtcgccgccacaccctcctcttctcctctgcctttcaaaacttttcttccttcaaccaaaccatctcagtgaaatccaattatctagtttggagaatgcaaatacaaaatattatcattgcaaatggtcttgacggttacattgatggtaccattgcttgcccctcacaattcgcagacccaacatcaaatcagaccgatcctgagtttacagcttggcatcgctacaaccggctgctcatgagttggctttatgcctctatctccgattccatgctcggatagatagtgggcttcaacacggctgtagaaattcgggtttctcttgaaagaacttactctgctgcttcgattgacagaagctcagattttcgaactgccttatagaatttgaagaaggacaggctcactgcctctgcatatttgcagaaactcaaaacactctgcaagtactctggcctccgttggtgaacccatatcttcgcaggagcatttaacctatcttttatatggtctacagccggagtacaatgcctttgtgtttgtgtgtttaatttcatccaacaaagtctaatatatatgtatgctcttgtattgttagaaaatattatgtgaaataaaagttatattgttgaatatattatgtattgcttttggtagaaaagaaaaagggatagttttgtatttattaataaaaaatatttttatattttatttcattaaaatatactcacttttgtgattgggttgtccaatcattataaaaaaaatattacttttgtcagtgcacattatctataaaagtatatatatcttaaagaatttaaaattaaaaataaaaataaaaacaaataaagtaaagtagatatataatgtaattttcacaaaaaagattaatgggccttacatattcttcttcctcgagccttataatcagagcacattagtattgctgttattagggtattgtcgacactttataaatagtttaaactttcagttgttaataaatacttaattttaatttttgacagtaataatatctcagctatatttctggaactctataggtacataaccattaaattttaagtcattatccacgtgccattttttattggtatatttaaattatttttttaaaaaaataaaaatttaatgacttgaccaattaaggattgtcacgtgataatttacttaacacttaacaaccaggaacttacagaagttgcagaattatcgctaaaaattaacttagatatttatttataactgagagttgaacttaagtatttatggcgcaaattactctatttcgtaataattattttaaattaaattatgtgaaacccaaatataatattagaaattctttattacatacacattattgattagtttgtaatgtcaccaactatatatatatatatatatctttaattattgagaattgctaaaaagtattattggtgtttatatcttccttgatgtaatatcgatatgggtttaattactaactacagaaaatattactaactaatcgtgaggcgacagaaggtgttgggcaccactaaagcctaataacacaattactttcgatttatcttcaattacgtgtattaactatttgaaatatttgattagttagtcaatagaggttttattgacaaccgacactataaaaatagttacttttagtgatatttttttagtcacaacataaattttttgtgattaaatttgatttttagccataacaaaaagttacttgtgactagaacataagatttagatacaagttgtcactaatttaatattagtcacaacaagtattgttactaaaaacacatttagtcacaacggaaatgctaaaaagtaccagtagtgcctaacaccttctatacgtgtttatatcgttattggttcaattaagtattaagtctcatatacgtgtcaattacaaaaccgacacgtctagaaagtgttggatatctctatatatatacatgtatagtagtgattttagtgcttacatcatcatgaatgaggtcatagtatttagtcatcatatagtttttttaaagtgtggaatataatggatccaagtgtctccactgccaatatatggaagtgggaatttagtttcattgatatgcatgtggagggtttgtttggttgctttttgttaaattatattattctctctctatatattctctttttatcttatatttcccatgtggtcctactacgtactacttctgcatgtgcatgtatatataacatgtatttttctccactgaagaggtagattaggttttcgttttttttttttttttcagagataattaatgaagaagtagtttaatgctccaattatttagcttaattaacttagtatactatatatgacgttaagatatatatattatttaaataatacaatattttttttaagtgggtaagaattttattgcaaacaatatttgatccagctttgcaacctttataattgagtaaactatcaagttatacgaagactagccaaccaattcaaatagtgctagttgttaaaggtgaaatctgatcaatataaaatcaaaatttaaacacaacacttagaattgagatgaaatatgaaaacgtatagaaatgttcagaataataatggagaaagagaaatgtttgtatttctttaagtcatgtgttataatgatgccaaccacccctcacatcagagaatgaggtgttagacttttatttgggcttacattaaattttattggttttattaaaacttgggttgattggatagttctttgctgtgttagcccatgttgttggtgatcaattgttaatgggcttagcatctgtgagtaaagtctaggtgaagcagaagtgtgg

SEQ ID NO: 380800 - DNA, 1740 bp, Cannabis indica
gagctgagtaagtccaagtccaactcaacctccattgccagcctcagcctcttcttctttaggcttttacttattctcaagccttttctatacaccttcattttttgactcaataaattcatcttcgtccattttttcttttctaacaattattaatttcaattaaaaaaacttacaaaataattcatggtgtataggctccattgacctagctccatctccttcgacgccgtgctcgtcacgtttttattttttatttttttatttctctctctctttggattcgacgcggtaatgcttgtgaattggtccttatggccatgaacgattctcggagtatttcttcttcttcttctgccgattccgcttctgttgctgcacccgatcaggtaaaaaagaattcacctttgactctgatgaggatccagtttgaatttatttgattgatattttgttgggctttcttcttcttccttttcacctaattgatttgaaatttatatatacatagaatgtggggcggagtcggacgagtggtgacggcggtcaaacgctgggctctggaccagcgagtcggcgctggcgtgatgttttttggttggggatttttgtcatacacctggtgggattggggttcctcctttcaattctcgggatcaataggtttaagaagacagataggttaaatatagataggtatatggaacgagtgttacagaatcgaaaggaattgactgaaacttattggcccttttatgctcttgctggtggagttgggactgttcttgggtggatttggctgttgttgttgggttctcaagccaattacatgatgaagatatccgtccacattttgactacttatcttgctgtgattagcgttttgtgtttctggggtgatcagcttttctggggtgtcgcgtttgcgattggtgccgtattgcagttcctctatgtggtatcagttatagataggtaggtacaagcttaaagctatctgccaagaattgaagtcatgggcaaattgtttgttttggattttttggcatcacaatctgtcatgttgtctatggtttttatttgtgttgtttgataatagacttccatttacgatgctggtgctgcaaaaagctgtgaagatggtatggagcctccctgaagttattagagtagcatacgccttcatgtttgttatgcttttatggatggggttatggtccttcggagcagctggtgttgtagcttcaagcatggataatgatggacgctggtggcttcttgtggtgagctggcaagttttgctcttttttccatcagttgatattggataagaattgttgcaatgaaggttcatgtctcaggtcatagtatttataacaatgctatcatgctttaacgcaggttctctctgtaagcttattttggacaggtgcagttctatgtaacactgtacatgttatagtgtctggtatggtgttccttgttcttataaatgatggtcaagaagtgtcaccgatgcctcctccgaattcgttggtaaagtctctgcggtatgctgtgacaacttcttttggcagcatctgctatggatcactctttaccgctgctattcggacgctgagatgggaggtaccagatcttcatttcatttttcttttcccgtatcctagatttcattttctaatattctgaaatatattccagatcaggggaatccgttcaaagattggaaacaatgaa

SEQ ID NO: 380801 - DNA, 3880 bp, Cannabis indica
cattcatgaaagttagtctccattcaaatatttcagttagaaatgtatattaagatctctcttttcttttgcctgtcacggctacattttcgttatcacatgtttgcgatgaatccatgttgtcatgtgaagtcgttgacgtgcatgatctcagtagtttatcgtcgcagctgagattgttgctcttctgaaaagtctctttattctgcagaacttcactcgaccgtgtaatgcacaaccatttttttttcagattcttcggtgcagtcatcagctataggaacatgccatgttcctttctctgattcctgaaacagagttggtaaaactccatgtcaagaatcaaacaaaacagtttctctctgattatcaaaattagcattgaaccagtttaaaaaacatatcaaaattagaaactaacatgggatgaaaattctaaatggaaatttgccggaagggcaggccattcccaatgaaatttgttaagtttaactccgataattagaaagtaaatttcactgtgtctttctcccataaaagtcttcaccgttcaatttaatttttcaacaataaaaatttagaacgatcaaaatttatgcagagctaatttgtttttaaactaagaatcccgactaaccctgtaatatttgggaaccagcagcctaggagcccaaccaaaataacataatacaccctatataccggtgcaaataaatatcggttcccacatacgttcatattttatttccccccgaaaagtaaagcccaggaaaactgttttcaaacaacttgcattgtaagagtgccaagtaaaatcacaaagaccaactatcacaatgcagctaaacaaaccaaattggaattatattaaataacaagaatataaaaataaaaatcacaagaccaactataactggtacctgaataacagaagagtataacggtggcatctgaagttgcaaagtacctttagcaaaggtatatttaacctataacaacgtaaaagaagcatattaaagcaaacataattttagagtgatctctttactatacagatagcaaacattaaatcacatgaatgttctaagtgcacgtacttgatgtctttccttccacttaaggaagaaactgctgccaagaagctcaaaaatgtgatcgcgcatctcatcattagttacaagcaagcacttgagtttcactgttgcatagagccaatacctaaataaataaaacaacaatacagaaaaaacacttggcataagaacatgacaaagagaagcctttgaaacaataatcgacattccctcagcaaagcaaagattaataagtattatgttgtgaaataaaattgcaaaaagtttcactgagcactcccaaggaaggttcttaccaatcatcattggagccattcggcgtcgtatagagaatacctttgtccacccactcatcaacaagctttctgtaagaagcattctccaaaagtgcacgagaacgtttattgtgcaagataacaagtggccatttctttccgcttctattatacaattcttttacaacagcatcaagctgttgtttagtaaaatataaagaaaaatgagtgatttcgaaataactgttagcataatgaaaaaagaaacaatggagctgatgaacaacccaaaagacagttctataacctgtgaaacactgaaaccgccatctgcaaaattttgttggtagaggccaacatttgctccatccacaatagcttcataatcaccatgtttctctaaccaatcctttaatacgtaaataaaaaaacataaataaaagatcaatacgagacagtaaaaaacgagaataacaagaacataaaaacaaaacaattcaaaccagaagcaaattacatatgccccaaaatacaccaatgagcaatgaacaacaaaaggaaagaacttaataaagattacagttaaaaaatttagtcactattgagttctcttttaacacttgttcatgctgaaataactaatcaaaataaacattataaagggaaaagaaccctcccatttctgttcctcaattaaatgaaaaaaaatcgtacataaacaaatatcctttactaaaaaagaagcttcaaatctaacaattttagctatttcaactagatttcatactctactcataaaattcaagtattatgcaattcaataaaaacttgagctttattttctctgtttcttgacataatataaaaactgaaaaactctaaacagcataataaagataacaaatccaaaacctttgctaacttgaaatttcattgaaatttgacataacctccctattaagttaaaagatttagtcactataagttttcttttatcacttgttcatgttgaaataactaatccaaactaacaactttatccatttcaaccagatttcatactctactcataaaattaaagtattacacaattcaactcaaacaataatatgaaaacacaaaactctaaacataacaaatccaaaacctttgctaacctgaaattcactgaaattcgacataacctccctttccatagccaatgaagccatagatttcgcaaatctctcagtctcattatcatcaatatcaacacaaaacaacttctccccacaacaacaacaatgcccactcaaaccaattcttgttctattcacaacccaatctcctttcccaatccaaccaagcccgtgccacccgcccccgttcctcgaaaccgcctcttcaatcttccccacctccgaattcacctcaccaacctcacaacccttctttcctttaaaccaatcctcaataatcttagccgtagcttcactaaccactctcaccaaacttctcaacttatgcaaatactgataaaccctctcttctcttccagtctccgagctcaccttcaacaatgcagctagctccggttcctctgcggtcacccccacagaacacatgtgttcctccacttcataagctttctcagcttccaacttctcacagaaacaatacaatgccgggtcgtacgttctcaacctcggcaacgcgttgtactcgcccattcgcttaaccaacccgaaagcataatctccgtcgcctttcgcggcggcgagccgagccactgcagtgagagtggcctcgttgggaacaatgccgatcgaagacatctgatcgaagatgtggaatccattctccaaagctaaagctttcagagatgggtcggtgacggagtttgagcagaggtagaggagggcattgaggttgtggtgattgagtcgagtgttgttggcgattgcggatttgtatagtgaaattgcgccgtgtaaatctttgtttttggagcagagattgagatcgctgtggaattgggtttctggggtttgattcttcttcttcttctttggggtacccataataataaattagggcttttttttcttttgaagaaaagcttaaaaccctattaatggcggaacgaaaagagtggggtttagtaggctctactatatatacacttggggatctgacgtggtaattattttctactaaaaataaaaaatcactaattatttaagactaattatgatttttgccccctgaattttgacatgtaccaaatcatggctcctgaaattttaaggtcgttaaaaatgctccttgaattcttgggattgttagatttaaggacttttgtctaatttcattcaattttactatttcagtgattgtttatatacaaaaccaaactccccagactttgatatctaccaaaacatgtccctcgaatattgacatgtactaaattatgacccctgaactttcatccatgttagacttttttaataaaattgaaaaaaaatcttt

SEQ ID NO: 380802 - DNA, 1043 bp, Cannabis indica
ataagaagtttttccaaagcttgaattttagtttgacaatgcccaaaaacttgcacattccattcccgcagagctttggccgtcaaagataactggttacacagaataaaactatgaaaacctctaacagccacactccaagcttcctcaatcaccctcctacagttaggatctctactccacgcatccaagtatcgaaaaggcttcaccaccttatccctatccatcatagtatccaacataatagccccatggtctgaaaaacgaattggcaaatttctgactcccgctttattaaaagcaatcatccaatcaggtgaagcaataactctgtccaaacgttcccgaatcagattattcacctcctgaccattggtccaagtaaaaaggacccccgcagactccaaatccaccgcgcccaagttgaaaatgaactccctcaagccttgaccttcagctctagaaaccggtcttcccccaaacttgttatcagaagacaaaacagaatttagatctcccataacaatccaggggtccgttctagcctccataaacgggatgaggtttctccaaaattcaagccgagcatctctccttggtggagcgtacgtaaagcaacccaaccaaggtcccaagtttgcctccccaccaaaccgaaccagaattttattgagatcactctcaataaactgaatatcccaaccacgtctccagaagagggccaaaccaccagccgccccaacagaagacaccgccacgccattaagaaaacccaaacgaaaccaaattccttccatgtccgacgcacttctcttagtttccataagaaaaaccacatcaggattggcactccgaatcaccttccggaggtcattaactgcctcgggtttgccaagcactacaacattaaggaccaatagcggcgggtccctcggccgctattggtctagattctggccgctaaagggcaatagcggcggacctcggccgctattggtccgccgctattgcttggccgctattaatagtattagcggccaaaa

SEQ ID NO: 380803 - DNA, 4917 bp, Cannabis indica
ctacgtaggtggtgcatgccctattttgtaccttttgggaacttgtgcatgccaatagttagctcttaaagactggtttctccttttcttcttcccccaatctctataaatatccttgaaaaaaatttagaaggggatcggaaaaagaccacaaaaaaattctctgtatggaatactatcattgataacagagactcgtggactacggctcattaatgaccgaaccacgtaaaaatcacctgcattaattatccctaggctctcattattatcttatttaattagctgccaaaaatctccgccaacattttggtgctttcattgagagctgtgggaagcatcatccgaaacacgacaacaaaagatctcagttacaatggtggaaactcgaaaccacacgcaccaacctcgccctttctagaatcctcggaacccaaatgatgaagaggcggcctcaccggttaatgtaggttttgaggaacgagacaaatcaaacgacaaagaataagaagaaagctcagaagggtatgatgtttatgacgatggtagctataacgagttactggcctaaaggtataaagcagttgatcatgagtgcgaactgaaagctcagaaagagcaaaatagaaaaatgccaaaactagtggtcactatgcaggaagccatggcgacggctggaatccacatgcatcccaaggttgtgcctaaagtatcagaggaaacagaagaagagtcctcaccaagcacccaaaagcccaagactagggagccaagccccatacggtatccttctgagtacttcattggcccttagaggaaaggtttgtgaaaggttcgctctgatttcctgaaggggaaaggtctgcagaagggaaaggtcccttgagagagcattggccttcaggattgagaggaccgaaagagcctatcactgcatcaggaacctagggaaagagggaggaaaagtgagaaatatcccctagatgacttaaggaaaaaacttaatgataaacatagagacttgaaaaagcacctacaaaggaagaagcagacaataccggtgtcgggagatgccctgaatgagggaatcttggctgagttggcaatcctctgcaaagacattgctagagtcttgcgaagacagaagggagatgactcgtagtttgattgtgaggactggaagccttgcgccaagcacatcatggaagcagaacttcctaaaaattttaaaatgcccaaaatggcaatgtacacgagggacttagacaccagtgatcatttatctcgattcaatagagtaatgaccgtcatgagagttagtgatgatgcgaagtgcctatgctttccactgacactaagcaagtttgccgacgaatgattcaagaaattggagccaggatcggtagactttttgaacaagttgcaggttagttttcggcgacagtttgtggcagcaaggaaggttaaccttgaagtgagtgccttgatcaatataaaataattacccatggagactttgaagaatttcataaaaaggttcaaggaggaggcctcgaaaaccaaaatggttgaagatggacaaaagtttgccctactccaagatgagatccaaacaggaacccccttctggaatgacttacagcaagaaggagtagttagcctccaagactttcagacgagagtctagaaatacattaacctggaggaggcccaaatagtggcttacggaggatattacccgacgagagtgtgaggatatgcagcaggagcccaactttccaaggttgcactctctgttgctcctcaaacaagcggaatacagttctccgctacttcgagatacaaccagaacctcaccttagccgcgacactgtcacactttgggatgcccataggcaatccctctggggcgagcgttcagcttctgtcccaatctgcaccgaccactagcatggcaggagcccaataaagctcctagattaagaggtcttttaaacgtagcacacgaactgaagacaagagacaacagagggggtatacaccccaatacacgcagtacaccgaactcatagactctcaagaacgtgtatatttttccacctgacaatatacacattaccagaacctccccccttgtatagggattgctcccagagggaccccagcaaaaggtgtgaatatcacaacgatattggtcataccacaaacgaatgcaaaaatcaaaaagatgaaattgaaggcttaatccgattgggcaacttgtagagtggatcaaaaataggctgccacacttgaatctagccaaaactggaggattcatgcctcaaggaggaagtgcagttgcgcttgagtgggaagtgcctccctgagtggtgccacattagcaggcgcccagactgccacctcgcccaaaaaggagagtcgctatgatctccggaggtcctcatattggaggaaccaccaggaatgagctaaagcgctatggtggggccctaaaatatgacaaggaggtatgggaagttactcaacttcaacctcaaaggcccagacacatggatcaacccatcaccttcaccgaggaagatgtgaagccagcgcgtttcctgcaccatgaccctctggtcatagaaactcccattgcaagtaaggtcgtggctagaacactagtggatgatggaagctccatgaacttgctattcagttctcggttaccttttcccctgacacccccaaagcaccttcaagtactgcacctttgtggtggtagactggcccaatacctataatgcaattcttggcaggccggccttggtcaatttttgagaaattacctccattcgacacatgtgccttaaattccctaccaaggaggctgagtaggaacagtgtggtgaaattatggagaagtaagacagttttacaacgtcgcaatacatttgtttgtcttgatgctacaagggttaggagaagttttggtagaagaaaaagacgagttggacccttgtattgggtctgaagcggtgttagagcccatgtaggatattgaggaagtgagggtgtgtgacctcgacctatccaaagttattcatttagggaaaaacctagaatcgaaggagcagagtaaaatcatagacaccataaaggcagcaactgatgtctttgcttggtgccatagggatatgactagaataattccgcacgttatcaccaatgtcctgaacgtctacccaaatatgcctccagtacaacataaaagacgcccactagacccagtaaaggctgaggccctggaaaaggaggtggataaattattatccaacatcttcatccgggacgtgtactactcagagtggttggccaatccagttctagtacctaaaccaaatgggacctagcgagtttgcatagacttcactgatcttaacaaagcttgcccaaaggattgtttcttgctgcccaagatcgatgaaatggtagatcccacctcaggattcaagttattatcctttatggacgcctattgaaggtacaataaaaaaatgcatgtccctgatcaagggtctactagcttcaggactgacaagggggtatactgctacctggtcatgcccttcgtattgaaaaatctggagcaacttaccagcgcatggtcaaccaaatgttcaaaggcctcctgggacagaacacgaaagtatatgtagatgacatgctggttaaatcgaaaatgtgcatgggccatgaagacgacctcacagaatgctttgaggtagtctggagctatgggctgaaacttatcccaaaaaaatgcacctttggtgtcaaatcaggaaaatacatagaattcatagttactcagcctgggatagaggcaaaccctggaaaagtacaagccttattgagcatgccttccccgaagagacacaaggatgttcaaagcttaaccaggaaggtcgtcgctcgagacacttcatttctcgctcaaccgataagtgcatcccgttcttcaatatcttaaagaagtgtcaaaattttgaatggactgaagaatgcgaagaggcattcggaaagttgaaagaacacatggctaagccaccagtactatcaaaaccagttcacaaagaagacttatatttatatttagtcgtttccaagaacgtcatttgtacaactttggtccggggggaggataaagctcaaggtatattatgtcagcaaacgcataataggagctgaaattcagtatcccttgattaaaaaattagctttctgtcttttgattgcctcaagaaaaatcaagccttacttccaggctcactcaatcaaggaatttacaaatcactcgctttagcaagttttacaaaagtcgaaggcctcaggaaggctcctcaagtgggccatggaattaagccaggtcaacatacaatacaacccacgtacctcaattaaaggccaggcgttggcggacatcattgtagaatgcaacgagacggaggtcagtgctagtataccaactcaggatgtgcccgcgtggaaagtatacgtcgacagggcatccaatgaaaatgggtctaatgccggaatagaaatgatatctttgaacgggttacgactccaagccgccctgcggttcaagttcctggcctctaacaacaaagatgagtatgaaaccttaatagcaggattgagattggccaaggatgtagaagctagcagagaagaggtttacagtgattcacaactggtggagcgaatcccatgagaaaagatttctcattgagactacttagccaagcaagcctcatatagcgagatcgaaaggctgggggtggtactgttgggttttatgccctaaataaaactcatttcaatataatcagatttagttattaatatagatcagaaataacatttaatgtt

SEQ ID NO: 380804 - DNA, 1013 bp, Cannabis indica
atgttattttatctgtatgttgcttaattttcgtttttttttaagttattaattttttttttttacaatttctttttatttggtttttatctacgtttttttttttttttaataaaactttaactcataggtttaggtgttttttttttattaattatttttatgtaatttttcagttatttttgtgttgttaaagttatttttttcgttgttacttttttttttactctcttcaaataattatttaattattcttaatcatttttatttgactcacagtcattgactaaaagcgagatcaacagaaatatagagcaagagatttttttcaagagtggattaggcagactgatcatttaaatttggttcatttacacattctaattatgttttttttttaataaaataaacaagataaaattattatgaattcattttaaaataattttagtaaacatcatattacaaatatttattatgattctttccgatttatatcgttacacttatctattaatttgttcagattctaattactatttagtaagcgtgccatagtgtttaggaggaagaagcgctaaagtgtggctcatttattatatatttgtttatttatttctttcaatttaaatttattctaaatcttttctctattttaaaatttgtttcaaataatttttttaaaataattataaagtggaccaatttaaatatcacatgtgtttactgattcaatatttaattgtacttacaaaggtagtgcaagaaacactattttggtaatattgattaataagaataaaatttaggtatttaatggtagcacaaacccaaaacattgatatttatgtcgtatctttctcttattattatattaattctacaatttaataaatattaggaatactctaattcattaattcttattaattataattactacctaatatagttgagggaataatattttgctactagtcaattcaaatttcgtgaggtattatttttctcta

SEQ ID NO: 380805 - DNA, 2402 bp, Cannabis indica
gactttggttgcacacccaacatgaagctaagacaaaatgcaaatggtagcctcctaaggtgggagagttgctaattaaagtggatattgtgattggtgaagttgacaggtgttgtagtaccagattggtggttcgaaatcatgttggtgaggttactgcagcgcaaggtatgttcttgaataggcccttttctcctattgctgctgagctattagctataaaacatgggattgagatgactagcttgttatcattagagcattgtataatcttgtcggattgtattttggcggttgctatgttagggaggccaccagagttatgtggagcatgggacctacttgtggtcgagataaagctgttgtttggagagaatggtattgcaggtgtaactttctaggcacgatttgctaaagaagtggcacatttgatagataagaatgttttgagttgtaaaatttctagttttggggatgaaggagttcctccaatggctgtctttgttgtgattgaggatttgcctctccttatgtaatgcttttaatatgtactgttcttgttttaaaaaaagcttataaataatacaacaattgttgaaataaaaatttacaaaggcaaaaagtttggaaataagatagtacgataactgaaaatgaaatcgcatagtaacacatttcttaatgagtgttttggggcaaaacctttccaactgttatttcacttgtatttaacattttaagcttaaattttggaggtaaaactctccaaactacagaattagtagcaatattattactcataatttagtgaaataggcgttgcaaagttaccaatcataaaacaaataaattgtacttttcgactttacaatatggttgctcataatttagtgaaatgggtgttgcaatttaaagtagaaggagacataccgtttgaggaaatggatcaatctttgctaccggagccggattagtttgttttttttttttttacttttacaattagttatgtgtatttatgccctattgtactttcttttaatttttttgaatgtgtctatttgatttatttttttcgaaccctaatttttgttgtttgaattaatgctcttcggcctcttctctggttggaggcacattctataaaaaaaattctcaactttaatttaaatatataaaggaaaatttgataggttgagacctaattttgttttcattgtgggatattttttgtttttataaatagatattctttttcaaagctcctcctattattaaatggatataacactttagctttggttcaagtctaaaggactcccactagcatctctagcatctctattttcctatttaaaatatatcactaaaatactacttacttatttgacatcacttctacaacacatcatacattagttagtcagttgagtcagcaagttagttagagttgttttaagttaattggtataactttatacttttataatctaaattattttgttcggtgtatcaaaatgtatcaagatttgaagagatatatttggtagtgaggaatgaagaaggttagtagaatatgttgcgcgcagctttacttgccaacaaactaaatcagaacgccaaagatcaacaaggacattacaacaatggattttgtcactggactacccactactcgcaaagggaaggatacaatatgggtcattgtggatagattgactaagtccggccattaatttctacttataagaaaacttgatgggcggattgattggcgaatatttacattgcggagattgtaagatgacatggagttcccacctctatcgtttcagattgagtacgaacgacttacgtcaacattctggaaacaaatgcaatgtaaatattcgccatagtaaacttaccatcaagaccttgaaagatatgttgagagcttgtgttttggacttccaatgatcatgggagactaaattaacttccattaatagagttttcttacactaacaactattatgatactgtgaaaatgactccttataaaactcactataaggaaatgtcgatcccttattcactggcatgaggcaagtcaaaggaaattcttgggtacaaaagaaattgatagggccactaaagatgttaagatgatacatcagaggatatagacttctatcactacaagaaatgtcacttttaccagcacagttcgctactgcgctggtaaaagtaacttttaccagtacatttcgtaaactgcgctggcaaaaaggtcaaagttttaccagcatacatttgcagtggctaaaatctaacttttaccagcgcatttacgtgctgggaaaagtcatctttgtcagtgcgtttcattttatgctggcaaaagttctaataccaacatt

SEQ ID NO: 380806 - DNA, 1885 bp, Cannabis indica
aataaatagtgtgtaggaccccccaacatcccacttgtccctcctatgcaatatttgtttatattaatatcagccaaacattctcacacaacctgacagccattaccataatagtcctgatgactctcatttccacattaatatgaatgattatacatactttatgtattaaacagtaaggaatataccttcaccactttgttaaactaatcttaattaattaaataaaaagattgtacctttgggactccagcatagacatcatcaccttgtggatggttaatgatgaccccaggccttggattgagttcactcttggcaatatcatcatacatgaacacaactatgttctcctctttcaacccaccttttataagcaattgataggcgtggcacacatcagcctggatttcaacaaacaaacaaaaacaaaacgattaaaaacacgtgattaatatatactcttttatcaaaatagaattaatcatgaccaatccaatatttgtttcaacaaaataactatgcctgatgcctgtaatttccataaccagatgaaccagccacaaggatagcccatctggtcccaatttctccctctaaatcctcctgattagtcccctcagccatctcagtaggcatacgaatctttgactcccaagggtcaaaacgaccagctgcttttccatttctaaccaagaccaatagtacaagaaaaacccacataacagagagacccttggccattgaaaaaaataaaataaaaaaaattaagcccagaaaactgtgagctgcaataaaaatagaaacttttaagacagagagaataatgtgctgcgaacccaaagagactttagacctgacctcctatataagaggctttatgtataaatatatataaaagtagagtggtaaagcggtggaagtgagtgagatgccatgcaaaaccagaggttgccacgcagagaagagacttggtaatggtgggaccagaattgccctgcccattacaagtggaatattattttgacaaatgtaacgataccatttttttttgcttgtatcttttttttggttaacattttttttctttattttttattgtatagcaaatgaaactgataaagagattgattaagaagctttattgtttgaaaaaaaaagttaaaaatatgctaaggaagcaaaggaaaaagtaattattaagaagtcatttcaagctttattaacatagatattttaataaaaattgttttgtttgatgatatgaacatatatgatggcacctttgtggctcttatgaaatgagttgaggttacttatttataaatttatgtataattttttttaaaattaattaatggtggattagtggtggtgtgggtgcacttattactttcaaatttatatatgcaaccttgactgagatacctttaataattagttatttaattaatcgatcggacaatggtgttgtgtgtaatgaattttattgtggtcattaacaacctaaaaacttttttggattttttttttaagtttaattattaaagtttcaaagcgtatagcatctttaagcgaaaataaataaatatcattgattatatgtgtgaatgagcatggctttgattaaaattaggaaacaaagcgtgcggttatatttatttattcatacttaaattagaaaattatgtggtctcaagtgggtatttttttgctttgttacaatcctagatgaattgggcatggaaaatcaagttggagttttttcctcgtcgtcatcatggttttttcaatcatgttcgtttcaataggttagccttctctccttctctgtcacaatttttattacttagtgacatataggccatcatctcattggtcattg

SEQ ID NO: 380807 - DNA, 2141 bp, Cannabis indica
aaaaagaacctgacatttgaaagcatgctgaagaattcctcaagagctcggacctgaagataagaaagtaaaatatagttctgtagtaagctaataaacacatgaacatgataaagacttttgcttctttttgtttttgaagtgcatacataacacagcaggacagaatagaaaacggttcactactatttgttcacaaaagaaaacaaggcaaaaaatgtaaaccccactgataaacaaaaatacctcttgtgctgctttagtatccttgatcatattcataacatttggagcttccaaaacctctttcatactatgcctgtgtatggaaaggtgatataattatctttagaagcaaagtgattatattaagaaaacattatgactaacaaatgccctaaaactgattttgtgacattgccaaaccgagaataaataaacagaggtttaaaatttataatggcgtgaacaagaaattcacaaaatgagaacctagagaagacagattacaagaacacagggccccaaaagaaataaaatgttaaatgagcatacttgtagcctgaggttgtatgcacaagaattatgcgagacttattctcaataatagtcctcagttgctttctttctgcctccaacagtaaatgtcgatggaactgatcctaaaatgcattaagagaaataaagaaacaaaaagttctggtagtcagatttctaaatataattagttttaaagctaagttttgctaatagagagattagtaaccaacactgattctaaatcaattggaaagagactatgttaggcttatctcataccttagtaaaacctgggctagcaatcacagcacatcgaacaacattaaaatcaacattcttcaggaaagcctgaaaaagaaagccggatctgagacagaagaccctttgtagtttgtattctattctaaagaataccaaaatattcttttataattgaaaatgaactaacctgtaaaacattctcgaagaatttattcaatgcctgcaaaatgacaagatgaaattattgaatctgaaatctatactttatgctacaatatagtttttttctaaaatttgttcatccaatataaaaacagcgacatacagattcataaccagcaataccaggtccatgcttgcgtggaattgatgtttctattcttgcacgagtagttgtcatactgtattcacaacacttaagttagagtaaaaattgtagtaacatcagagtaagcaaatgataagaatgaccatgaaagatgaaaataaatattgatattaaagtagcaaactcgccgatataaattttcaactgttacaaccatcaactctaaggagatttcagatgtaccttttaccaatgagcataatatgtgctaatccttcttgcattaaaacaacagctagatctgcgcttgcagtgggatctgatatttatataaaacttataagagtcaatacttgacttaattatttaggcttgataagggatacttaaatgttcaagcatccacacaacaaagaatagcaccagaattttcaagaagaaattgatcaaaagaacttagttgctgatgttgtagttttcaagattttgataaattcaaataactaaaggatcaaaaatgcataccagaggcttgttgaagtacatgtaatgccaatgaatcccaattgtcctgaaaaataacgacacaatataccggaaggcagtaacaaaagtcagtaagtatcattaaccatccaagagcctacaaaaaataatcacagacatacaaaatgtaaccaacaccaatctgtaattcaacaggaccaaaacacaattacaagataaaagatacttaacaacaaaagcaatacctttcttaatacaaaaggtcgattcagctcaagttctaatgtatggaaagctccaatctgccatgagacagtcgattaacgataagttcaaagcagaaaaccatgagaccaaacatatgacatttagttcagtttgatactaacctttacatgttcattctccaaaatatttttaccacgtatccgcaagacagaaccaaccttgtcataatctgcaatctacacaaaaaagaatatatgttagagagagagagagagag

SEQ ID NO: 380808 - DNA, 3732 bp, Cannabis indica
agagagagagagagaactgggtgggttgaagtggaggtgggtgttggtcatcaaagagaacaagagagaaaaaagagggcaagaactggattttgtttactttagcagcgagggcagaaaatgaagatgataggtcaaggctttataatcgtcagggaatacctaaagattttaaattattaggtattccccatttgaaaaattaaatttaaacacttaaaactgtcgctgattaccctcacgagtgttctaaactgtcgagaatatctatttttttacggtttaaagcactcatttcattttattagtggcactccctgaaaaaagttttttaaggactgataagaatgtccagttttgtaatagtgcgatcattttcttcatcttcatccaaaatgaggaaacatgtgcttttggggaagaaacaaaacaacctggaggctagaagggggacctaatgcccacgttgacattttatcaaccttagccattttcaaggagttttttcgagaatttttttcgagaagtcttccaggaagattctttgttttcatcaaagattaagatacaagtgttctcaggaatcaaacggggccatttggtggccaaaagctggacccagagcccaagttgacatttttccaatcatttttccaaaaaattgttctagtaatttttttcaaataatgaagatacaagtaaactcagggagaaaatgggaatcccaggggcatgaaagttaagccatgcgcccaggttgacctggtgcgctcgatcacttaaatacaatttttgttctgaccattctcttcggtgtggttaaaaacggggtaggagacctcgtcctcaatttcaagaaccttataagtaacaaaatgacatctcaaaagctccaaaaagagcgcataggttgaagtatgacctggtgcactgggttctgcttatctgattttgattttgtcacgaacattcatttagtttttcacagtgagcaagagctataaacccagacaagtcaaattcataacttcatattttcaattttttgacaaagtgacttagtcgcaaattgggtagtttcgagtctcccaaatcagcgaaacagtaatctctccgagaaatggtcaacgacttcactagaacacaaaaattagctaagtgatgtcaaaatatcacttaggcctcaacaaatacatattcaacatgattttcccttggcccaacttccaggttggcatcatatgtctacctaggcgttggtatcagagtaacctttagtaaaatagccataactcactcaatattaatccgattgatgcgactcaacttgagttttgaagctattttaatgctctatcaagtcatgtctcaaaatccaatcataattctaaatttatcaaatccaaatttcttcttttaactacaacttacttgaagtctcgcaaatatgactcaagctccagaaattgacgattgacatccagagtcaattttaatattagatcatcatcaacggtcaaaactggcataaatatattttttatatatatcttttgaatatttattattattttaataggatctccttccctattaagggagagctcccctattttattttttacattcagaaaagtatctctctatagaaattagagctttcagaattagttatttttcttgtaatcattctcgcgagaataaaaaattgaagtagacgtagctccattattgtcatgacagacaaagtgaactactataaatacttgtgtgtgctctctattttactaagttacttctaactttcatctagtctatacatatgagtgagctgaccaaatttttgcatcaacacttacgctttaatctgtttaggcaatccaataatagaaataattttagattgctccttagtatcaaatcttggttcattcttaagacttctgaaatctaacatatcaaattaatatgtgagaataaccaaaaatggattccaagcctccattgcaaatgagtcatacatacgaaacctaagagaattgtacaagaagatcagcaaccaaattatcatcatttttgataccttgatcattaggaaaaggatctttaacactttcaacattcttcacatcgtcttcaacatcaacattcacttcatccttcattgaatgataatcaacagacgcaacatgtccataattctttctgcccttatcaggttcattatgctcattgtctttttttgaattatccccaccattctcattcctctgatcatcctcttctgcatcatcatcttcttcagacccattatcgtcatcatccccatcatcttctacttcctcatcatgagatattttatcatcattatctgatgtatgtagcatatctattgagttattttgaggttgactcatctcaacatgagaactctggaaaatagataaaaaatttgcattaagataaaatcaagataaataaaaatataaaacacatataaaaaaaaacataaatacatacttccacaaatatcaatttttttattcaacttagccataacaaaaataagaacttgttgctggctaagaaccaacgaaacatcttttcgtaaatcttcatattcaagatgagatacatattcataagcctttgaagaagaaagaccaacaatttcaagatttaaaacaacattaggaataggctcagaagaatcgcctttcccttggctgaaggaataaatggtttcatccaagaaatgattagaaaaattcaacaggtctttctccttagaagtttgattgatattctttaattgcaatagtaaccataataaaaagaataaaaaaaaaatttataataataataaaataaaaaaataaagcaacaacaaataatgaaacaacagtaaataactataaaacgataataaaacactagacaaatacatgctttaatggacgattaaatatcatattattaatatgatgcaacttcaactatttaacttcagctttggcattttactccaattgagaatcctaagaatcacaatattataatccaaagcaagcttgccaacatacggtcaacactcgaaaaatcatatttggagagtatatgggaatcccaacaacctttaacaacatttgttcatattttgctccttatatttcttaattcctgcatcagtcttactcttcacagagttaatagtcatttcataacactctctaccccaaccatactcattatatggaccactatcgataaagtcaagctcctcctcagacacaactttcttaggggtaccagctatcaattagcactgtacaaagtacaatacatcatacttgacaacaagctcatcattatgcccaaagttcttaacattgaaagcaacttgaatagaattttttgtgattttatcgttgcccttcaaacactgttctacaagagtgttctctctttcttagaccaaaaaatatttgactcaatatgaaaatctaaaccaatctgtaaagcaaactcctcaataataaacctaagtactttcccagcaacacttgcccaaaactccatctcattgggctgttgaaattccctcaacaacaaactgtaaatctgttgaaagtggattgaatactcagggagacaaaaaacaagaccaaacaacagttttcgaaaacaactctttttgaaagaaaaaaaataaaaaaaaaaaactgttataaa

SEQ ID NO: 380809 - DNA, 2404 bp, Cannabis indica
cttattatatctcacctattccgtaaagtccaaaacaaaccaatccacccatctgtcatcaaaatcaagcatacctccttaacaaactgtgagctatgaagcttacttcaacaatacataatgttttttttcggtagcaatactatggttaactgtacctacttcttacgtaatcatgtgaaaactaaaaccagacaataggagcactctacgaaaactaaatgttatgacaaacacataattttaataattaatcagtgtagattgcatgaaagatcaaggtgcattctttggactcagggaaataatagaaaatgacaatgcagacactgtaatagacaaatttaaaaggatatctggatcatagtctgtacgatattcgtcacggacctgcataagtacaaagaagaacaactaaataaaaagacgtataaattagtaactggtcaatgcaggaaaaaggaagaacagttcacctgtccaccacttcgacctcggccccattgcctgccttcttggaatccccaatcaaaatccacacggataggacgatcatcaagaattgtcccacttatatatttgacagaatcctctgtatcctctctagaatagtatctgctaggacaaatttataaactcgaagacattaataaatgaagaatttcgatatataaaaccagaatagaaattaaaatactcaaagtgtactctatcaatgctatacaaaatttataagaaaattgcacacagaccatgaatgttagaaacaaatgaaatgtgaaaacaatgcagtatcatgattctaaaattagcttcaagatacacgtgaacacatggtgcactccaaccctaaatagcataataattgaagttcaatagataaagaaaatacagcaatgggtactatcagcacatgcatgtcatcagtatctatcaaatgattatagattaagtgttttgacatagaaagtatatataactttgacttgcaacaaacatttttcagagattccatctaataaaaataatttataaactttacttggttacagatttcaaaggccgaattaatattgattataaggagaatggagcccttacattacaaaacaaaaaccacaaggtgtttttgtattcttatccaatcccataataatcttcttaatttctccggcacgggagaaaagctcataaacttgctcttcagttgtataaaaggacatattcccaacataacaagtattcgatgccaaaagtgcttgttcgaattcctcttgcgagccgggaaatcttctatcccgatatgctgaaagctttgttagatcctaagacaaaattaagaagaaacaaattaactaaatacgcatgtaacagagtactaatagtccaatgcacaatacattgaccactcattagggtaatgatttcataaagaaaccaacattctgtctggtatccaaataaaatttgaaattgttctgagtacataattgccaatgaaaaaagtcccaagtatcaaaatattattatcaacaatacaccatacatagtcttcccggaatgttatatgaagcatgcataaattcccaacatgatgagaaactatacaccatcactacaattagcatatcatttctgaaaaccctaaacccttagcacatctttatttttaagcaaatttaattttagatagttaattctgaccacctctatgacattcccattgcaatattcttccgacctttcaaccagtattaccattaaaaaaattatacaagaaactaaaaaagttaccttgaataaagaagccatggcgttgtgtgacttgggagaatcccactaagcagaatttagagaaaatcagttccacaatacgcaaagctacgccaaaacaaaacacaaaccaaatggtcaaaagcacacccagaattcatagaaggagatcgtacaaacacacagaataccaaattagagtggagatcgaagtggggaaataatgaaaggagaataggagaaaaatgggttaaaggaaaggagaggtgtacttgaggctggctccacttcgtctggttctatggggttgtcggaccctcctcccttaactctctcctcattcaccacggacggagccctctcaaagcttacacagccgtagcggtaggtctctttgtctctgtattgcttttggtaagccaacaaacggcgtcgtatgctttaattttttggcttaatttatagagattttttgccaaaactttttatttataatactacaaatttaattttttattaagtttaaaattataaaaatataacatttttttattaaaaaaaatagtgtgaaaaaacaacataacatcaaacacgctacaatatgtaaatcaactagaaataaattataaat

SEQ ID NO: 380810 - DNA, 1665 bp, Cannabis indica
tgttcaatcttaatagtgatacagtcactcttaacccccccaccccagccatacacacatacatacacaagaaaaatatgagatacgtgaacagtgtgtaaagattacattttccgctccttttcattaagcatcaataaaattcttaagttcaaagtcttgaaaggttcatatacagaaaaaagataggccatagcacaaaaatcatacctcaaaaggtgcaagaccaggcagtccatctaaattcagcactgaaaatcccattatcaatctgaacagaggctcagcagcagaataagcagccaacgatgccagcagataattataaagattggatttcaaacggaaccgctgaacagtaacatctttcttaatcctccatattcgatagaagcacaaacccagaagaaccagatgagaaacagccaccacaagggagtcaacaccacatggtgtgtaagcaccaaaggcattctccactgctttagtccaaaacccattttccacagggcgacaataccacaccaacggcccaaaagccatttctgtttaccaaacctctctaaagggaacaagaaaaaaccttcagttgaagctcaaatcaccatagccatactgacccttcttaatattattactctaagaaggaaagattgacttctcttacagctcccggattattctaggactcccacctacccctgcaacagaaccaaattcaaaagaaataaacaaatgaaggaaaaaatctatttgctctccatgggcaaccccaaaggacaaaactttcaggaagtcaactgtgagcagcacataaatatatatgtataaacagtggttgaaaggttaatccaattttttacttgggaagaagagagatagaatgaatcaaccatgtataatatattaattaaagcttactttgaaaagatcaaaattaaaataaaaaaaaaataagaaaacagatttacatcagattcttatctcaaaaacagagaatcttaacataatggtcaccacaacacaattccactcacaatcctactttacataaaatatacaaaccaataatgaacttgtgttacccaataaaaaaaaaaagaaaacagtccattcaacgcattaaatcatccttagttgaaagtaccaacttaaccaaaacaaattcaaacacaacttaatataaaaaatacccaaaaacacagcatctctttactccaataaaattgcagtgagcttaaaacctcctatacttccagcaatccaaatcaaatacgggaataatgaaagaaaaaacaaaaagtaagaaaaagtgtccacgacgacgatgttgaataatgcaaaaaaaaaacgaagaaaaaggaaatccgggaaaaagtttctcgggaaaatatcgaaaagtttctttccgggtccctttccctctcggtagttggaaaaagttaaaaacaagattgagtggaatagaatcaatgcttactgagtgccttattacgttcaaaatccagtggagcaaagagagagagcgaaggtcgtcgtctcatttggcgaaatgcagagctctcatactgcgtcaccgcttacgatgcgtcgataaccatttttggtttttttttttctatatttataaaaaaaaaaaaaacaaaaaaaaaaaataaaaaagta

SEQ ID NO: 380811 - DNA, 1504 bp, Cannabis indica
aaaaaaaaaacaaaaaaaatcgtgttccaagtccaacttaactagactagaaaggagttcctagcgtgggatcgcttttcaagtctagcattgttggactaaaaatattgttttagtccaacaattaagtttcatgttgtgggactgctttttaagtccaattctaaaaatatttttctaattcaacaatgttggaatagaaatattgttctagtccaacattattggactagatatgttttctagtctaataatgttggactagaaaaatacccattttatgtcccaggctattatgtccaacacaaaaggactttgacaaatttatgtagtacaatgtatggacttagggatttttctagtagtgtagggccaaccaaggatggccggccagcacccttgaggtgactggtctgtcacttgtcgtcctgtttgagtgctggtacccctgttgtattgacttgtcctccttgttggtgagctaaactcgacgtgttgtcgatattgtttacgtaagcataccacgtcaagtgaacaaaaaatagaataacatagacaaaagttgattcatgggtctttgtgtctaaaatctgagtttttgcctatgtttctatttgagttttgttctgtttttcttagaagctttaatatgactgtaatgaggaatatgatacaattgaaaaatcaatgaaaacttattatttttatcaaaaaaaaaaaaaattcacatccagcgaagctagggtcctaattttgttggacatggtatacatatttttcatgtctaacaatgctagacataaaaaatagactgggaaaaattttcatattcaactttgatggccataaaaaggagctttgtaatagttttaacaaaacaattattaaagagaaaatttgcccactaatcattttgaatgaatttgttgtcgtaaatctatattttttttgacgtagtgattagaatcacgcatgaatttaagatgtagatatccgcaaactgcacaggaacctccttgaattaggatagctcatcgtttaaccaaaagtcatgcttctcaaactatgaactgctaatgtaagcgagcaacatgagcagtggcggaactatgttatggtatggggtggccatgcccccgccccccccccccccctaatattttgggaaattatttttaatatatataatttataaacattaaatttaattattaaagaaatatagttagtttagtttacctcaatgtacataaatagatgtgtattattatatatgggttgtataggtgtattctatttcttatatttatttaaaggctatgtgtaggaattgtccctcaaattaatactattatcaaatcgtcttttgaaatatttatttactattccctttgaactatgtcacaatgctgaaatataagacttataataagttttatccaatgtggctaataaaatagtaatgggacttgtgtgtcattgtcacataactgccacatgtata

SEQ ID NO: 380812 - DNA, 2426 bp, Cannabis indica
tctttttgaaagttgaaaactgtatgatcttacaataaaaataacatgtatatttaatttatatatgtgtgtgacacatttaaatttcgaacatcaaaaaattttgtgggaatgaaataaaatggacactattgtatatgatgattgttatcattagtattaacaagtaagcccaaatattgattgtagtgagtggagaaacaagggtaacgtttccatgaattggcatgcaacttaaacatcttcacaaccttatctttggttgagcttctcccatcaatatgaagcagagccacaagtttctttaccgctccacacataaccatctcctccaaaaccttctcattcccatgaaaactacacaccaagctcagcaccttcacacccaccttcgttgccgtccttgaagcctccaacatcttcttcgacactgctgctattcccataccgtgctcaaccagttccgtccttccctccgcgcattcgcacagtagctttgtcaagtaaagcattttctcgcatcttgatctgttcgattcggggagaagctcgatgagcacgcacaccgcgcctgcttcgatggctcggagcctgctcttctttgatttgcttagaatctctatcaaaacctctaaagctgatgagctagccttggtgctgatttgatcagagactaactccaacaacgacttgaagaaatctgttccttgtgatgcgtgatctgagttccaatcgtaatttgtcttctttgctatgtttctgagaattgaaagagtgtggagcctcgtatctgcgctggctttttgaagcatcgttaccatagatctcattgtgtctggttgagacaataaatcaaacacttgatgttcttcttctttttctgataacaaaacaactacggaaaccaactggtataaaactgctatagcttcttcacaagctcgaaacgtaacgaaatcagatccgtccgaaaagagaatctgtgtaagaattttacagaggatttgtacgccgttggatttgataaaatccgatttggcagcttcatcgccgtcgatttgaagaagagaacgcatttctttcaacgatcggaccttaaacggagaggaatcgattgcctttagaagctccaccatgtgttcgtgtttataattactactattcgaagaagaaggagatgacgtcgttgtggtggtattgggagattgccaagagagaatgaggcgattgagagtgtgatttggggttaaggtgaaatcggaggctttttgcatggtggtcggacatgtcttcttcttgtatgtaaagaaccatttttcgatgcttgttcgatcgtaggtgacgccactgaaaatggtgacgggttctttcattacctctcttgagattgggcacaagaaatggtgcggtggatactcttccatggccgttgatgtaattattattattaagcaatttgttttgttttgggaggaagttgagagtaacacattcatggagtttttatatagaaacgtaaatatagtagttgaataaacaacaagatggaaagtccaaagtttgaagttatttatttattttttatttgaaaagaaaaacattaaaattaaagtcaaatcatcaattggaattgatgatctactagtatatatattcctagctgttaattaaatacatgcaatccatacatacaagaaagctggtgatcatgatataatcttagttgaactctttttaaatctgactctatctatttggatatattcatatatctgaccccaactattttatttatttaacattttagttagatggattaggtagtattgcaagcatgtaaatataccacgcccattcactgggtccatacccgacccatccactgggtccataaggattgacttacccgacccatccaccaaaagataggtaaaatcagacgtgttgtccggtttccattaacacttagcaggtgaaatggcgtgaacttaaggaatgtgtcctcttcatgtaatcaccctatatttagacataaaaaattaacagtttattaataattgttatcaaatattatttatagacgtctaaatcaccatattaattattaccattattttttgtattttttttttactacatattaatttaatttctcgttctcttaatcaatacttttatataaataagagtttatcccattagaataaacaactgagaaattcttattcactttctgttgctctcttcatcttcttcttcttttttctcatctattttatgttattttataatatttgtttatatgggtttagacaaatattgattcattgtgatatattgaaatccctacaagtgtattaatattattacatatcacaattttttaaaattctctcgatcaaggggagagaagcagttgggatcga

SEQ ID NO: 380813 - DNA, 3295 bp, Cannabis indica
aggatcccactgcattttgaaaccatagaaactgttaccattaacgtttcagcaccattacatgatgttatcaacccacattctgttaaagaattaaatataagaacatgatacctttggtgccaaatctttctccactacctttgcccgaaccccctgataaaacgcatgcagcaagtagtgattaatttaatgacttgtcacgagtctatgcatggccttgatttcgtcccagtaggagacaaattcttgtagcaagtctacgcattgccttggattttatatatctataattttcttttttaaaatgtacctccgtaaagtcccctgaaatctgcttagataccccctcgcaatgacattcgatattcccgaatcaagcattgatcaagagtctgaaatctaccttctcgtatctgaggagaccaatattagaacagttagccaggtcataggtatgatacaatcaagtttcatcaaagaaaacttcaagaaggtagagagagagagagagagaaagacctaccgatctcaatgaaaccttcaagctcaatggtgaaacttcttttagtctcttcgcagtggaaatgcaccatgcatccttcgttctagctgcttcattctcctgagaatatgtttaaagaagttagataaggaattattttttatgtcttatatacaaaatctcaaatttagttgggttaatggttaaaaatcagcatatgtttaccatagcatcaatgatttcttcaacagtatcatggctgaaacacttgtcaactacttcaatcctaaaaatgccagaaatacaaaccaagtaaaatatttaaacaaacgatgttatcaaatattaaaagaaaagttgatattgtaaacttgtttaaattgacgggaagtcatagggtatagattttatacaaggattaggctaattaaacctgctgaggacaccattctctgagtctggatggataagttcaccatagttttctaaggttgtttcaatcactgaaggatcatcagttactaaattcccaagttgttcttcaattaaaggaactctctaggatagaataaaattattaattaatgattaaaaaattgacaaggaaaaagaaagaagattaagcagaaaaacggtatcctaactgagctatgtgaatagtgtgtagcaagcccacaagcaaccatttctgctccattgagtttttctcctgttaaagccaagtactcgcctgcaaattacataaatttacaaaagtaaaaatccactcacccttggaatatatatacatgaaaacacctcgttctaccttgtacctgttgattaacatatccaacagaagatatttattatattataaaagttttctccttgatcaaaattccaagtctacttctatagattacttaaatattccacaaaaactatgaaaacatacctaagtgaccaggtagatgcgagagataaaaagatgctccagcatcagggtgaaaaccaatcagagtttcaggggtagcaaaaacctgcaggaaggaatacggatataaattcttccagctgagatcaagagaatattttgaaaatgtattttctctctataagacaagtttaaaagattacacaataaaacaggatgcgtagaatcatgttacatttaagaactccaaaaaaggaaaatataaattgaagcacacagttttaaataacagagaaaacaattcaagcatttacagttttttctgttgcaagacgaaacatcccagggattgatactccagcaccaccccccattgtaattccattcaaaatagccacctgcaaagtgattgatattgtaactagactcattgaaagtgtagccaaaaagtttatgtatactataaagtattttcttgatggtaaagtggcaaaaggaacacaacaagagctatcatagaaataccgttttttgataatcacgtaagaaaacattaacaaaaatattaccacaatcccaattcaagggtggttatctaaagtaacaacaaaaaatgttcagactaaagatccataaaaattgatttacttacatggggtttcaaataagtaccaagtatgtacataaacgtgtacaatgacctaaagaactccttacaatcttctatcttccctgcaaatattaaaagcttaaggttactcaactaactacgaacaacaatgagattaggtacttaactgaaaaccactgatttccaactacgatacatgaattttggagaataaatcaacaaatagagaataacagacaagtatgcaacctttgtttataaagtgataaagagaaacgatatccccaccggcacagaaggctctaccgcggccctttaaaggttaagaattgtatgtaaggttaaaactgttttatgacctcaataataataataataacaaacacgttagtaacaacagaagatcaatttttaatgtgaaaacagtgaaagtaacccagaagaggggcagtacgggaaaagaagtaccttcattactacaaagccaatattagggtcattttcccagcattggtatagtttctgtaacctagtcccctagatggaaaaaggttcatcctataagaagtttatcacttgatttcaaataagagagcattaaaaaatataatcagaacaaatacaggaacaaaaaagaaaaaagagatttttagaaatcaaagcacagttaagcaatttagtcaatcaggaggttgggttctgaccggatatcaaaactggaccaattgcatttttagctataaatttaaggaaacgggttctaacaataaagttgagaaagaagaaaatggaagccatgatattgaacataaatacgtaccattacagcagtgagagcattgagggctgagggtcgattgagaatcgcagttctcgaccaaggtttcccttcaaccaatacctacagagagagagagagagctaattattgaggtgtaaatagagaaaataatggaaagggcaatctgaaaacttacttggctgtcaaggacatcggccgaagcagagtgtggcacggaagagagggctctgtgatgggtatggaagccataacaatgaagattttgtcgtagtaatgaagctgctttcttgagcctctgcatcgttttccctggttacagcctaatcaaagtatctatttaacttcttgaccctatgttagcattgattttgtacttgtgttgtatggtaaatttagtattggcatttaagtggttaaattagaaaattggtatttttgaga

SEQ ID NO: 380814 - DNA, 2765 bp, Cannabis indica
agagagagagagagagaaaactgtatagaaatgtatggaagatcatagggatataatatataaaataataagacctacttaccttagtcgattctccatttcttttaattgcaacctaaagcaaaggattacttgctgaatctcctgtaatacaattgatcagaaaacatttcaattaatgatgaattttattttatcataaatcgatctaagaacataaaatattaatttggttagctcataatccatatatagatcttgagtacctcaagctgagaatcggagctcgtacggctgcaaattccaatgacatcaattaattaatataattagctatatacgtaccaataatggggaaatggttgcttagaaagtgatcagaagaacctggtaattgtacgattgttatgttggtcaccttcattccttatctgactaatcgctcgcttcagaaacttcgtacccgcagttatttaatcacataaaatactctctgttattttatttttattttttgaaataagaggtaaaatttttatattttaaataaagggaaatttaaaatactagaaaaccaaatggttacctcttgattatgctgccttaattatggttgcattgcgcatatgacaagtttaattaaacgaaacgtaggatcgagtttcgaaacaaaacaagatgatgaagaaagtcgttattaattggatattacgtatttgtaataacaatatatgatactgaatatttccaaaacgaaagattaattatattcttatatattaccgtccttggtcattctgtggaaggttattaacatagcgtccaagaatctcttctatactttttttttttattcatacgataagaagaagaaaaataataataatcatgtgttagaattaatatattaattaaaagggaagaaacagtagtactataaaatcttatgtatagatcatgatgagcagaccttttattgcgggaggagaagaaactgagtctcccagatggagaaaacatgactagagctaaatcaacatcacaaagaacagaaagttcgtaggctttcttgataagcccatttcttcttttcgagaaagtgacttgcctattagttgtgttttcaattctctttatctgaagcttaactctccccatttctgtttgttctactgaatcaaaaatttaaggtatatactgactatgactaggaataaactaaaaaggatgagtcatgaacgaatacataaatatccatttgtagttgagttatattaattttgctgatgtagaaaaggaaaccctcattaataggtagggttagtttgggaacatatataatgacgaaaatgataatagagaatatcgatagagacgaaaacgattgtctttatcatgtaagataatttataaaagaaaatgtgacgtacgtatccgtagacagagatatttaggtaactagaaaataatcatgagtttaggcacataatattatctcacaacatgggtaataatcatgagtttaagtttctgacaacagatttctttgtaaatatataagtttctaaaatgaacaatatatttggctacacgttaccacgtagtggagaaatttttttacttataagagtgtatatagaatgatcgcgaattataatttgagagatgttttcgcaactgtctacgtacacaccttctaatctaattacctttggagttaaaaacatatttagcgttatatcaaacaaatactaattaattaaaaataattacacgatttattttcgaacacgtttggcatactataaaagaattggattttaatatatatgtttggaggtaattactatcctagtaattataccatttaataattacagtggcttaatttcaaacaggcgtagttaattaatttagttaccgatacataatataaatatgataataaggcttgaaaaactgatgcatgcgtagtgcagatcagagtgcaagctaggagaagcaaattaaatgtagaactagaaggcatatatgttgttgtttttgaactttaatttttctataatgcaagtgtgaacagtggggaatgttgttttttagttttgagaaggggccaagtgaagagattaaggaagaggtgggagggagggtgggtcctcgtgcaaaagtgtagatggatggatagcacatagagatggtgtttttgtaaagtttgagaaatgtggttttggggtaaaagacgaggatgattctctgccgcaaattatatatatatatttgttcattttaatttcagctctcactttcacaatgccgaccttctccccacgtgggatccactccctcaccatccttcatttccaccatctcactgctattattcaacattttccttacagtccgaaacaacatccacacacgtggcgcctcaattttgtctaggcattacagaaatgattccttccatccattaattaataaaataaaaataaaagaaatcgatcatcttcaatccatatattattcacaccatgtaatcatgttgcccatttgcctaaattatgagctgccatgttggcaattgatttacatgatacaaagtgataccacagaaggaaaataatgctattctaatttgattaaccatatctctaaaaacagttaaatttgattcgaaactataaggtaattcggtctttacattttattggaaattcttggctaaaccattttgaaattcggtattttaatattcccagtttgat

SEQ ID NO: 380815 - DNA, 4264 bp, Cannabis indica
aaaaaaataataacaaaaaaaagaatcatataatttaaaatatctatttaacacacacttgacccacttagactttataatattattgataattatattttaattgtgtcacatggtatggttttaactatattttatttttaattaatttttaccaataattatggttatggatcatttcatactctatgaaaagtagacactatgtaacttgttataagagtcatgagagaagttaatcattttttaatgtcaaattagattcaaactcctcaaaatattcaaaagtgacctaagtagtcacaaaaaataacctcattattcttacctaaaaaaattgtaaatatttttttgaaaaaaaaaatcaataaatattaaaataacaaaagtaacatggttgaacaaaaaaaaatggagaaatttcttcatctaaaaaaatttatgatctatcctaaagaaaaaaactaaataataaaactttgatatcagaagaaaaaaaaaaaatcaaacttgaaagttatggcctccatccttataccaatcaaaaacctttaaaataaaataaaaattaattaatatcaaaaaatagatattaatcaatttttaaatgaaaataaattcattactttctcttctttctccacataatgtttttctcttcatgccaccatctaatcacatttgattggaatttttgcactctttctcaaagtcaaacaattattattgtttttcaaaagttgtcaaaattgaaagaaaataaaaattgataatgagcaagtgttatgttatgaccgtgttttataaaggtatctttaagttttaaactaattgaagttaaaaattcttctataaaaataaataaataatttgaagttatgactattagcacattgaggacaatataacaaaactacattaaaaagaaaataaaaaatcattacaattgacaattgaatattgatggaacatttgtttattcactgtaatcttgcttagtgcttactatttttggaggtcctctcagtgaggtatattccccatttcgggttctagtgtatgtatgggactggataaagttcatttggaatttgaacttgagaggcttagatgtccacgaagttgtcctatatgcttctattgtgtgattgatacgatttggcaagcttgaaatgataaggtatataacaataacctgtttaacattgagcattatattgatacgatttcttactgttatgtagactatggtgtttctatacttcccatccttcagcgattcttggccagggttggtctctgcctcctagggactggattaaggtgaattgcgatgtaagagtgagacagggtgacatgtgtgcatatgttgttgctggaaatcacttggaaaagctctctcgggttgtaaccaagcgattttaatttttcgatcatcttcaaggggaagcagaagcttgtcttttggccttggagacagcaatgaagcacgacaactcctatgtgatggtggaaagtgattatgaagctactatcaatgctcttaatagagttacttctcggtgagcaattaataatttttgtaaccattgcattaggatttcttgtactgttttgggttgtaatttcgctagtataagtaaaatttataattttgttgctcataatgtggctaaatagacttataaatattatgagttgctagaagtctctagtatcctaataaatattttatgtaacaaacgagaggcctaattttaaatctcatctatgaataatcttcaaaaacaaaaatttagacttgtttgtctgacaattccaccaagtaagatgaatcaatgcatttatcaatattggccttaattagcttagaataaccgatcgaactccaccaaaaagtgggagcaccccatctcccaaggttgtctctagtttttatggggtcaaagataaaattaaaaattaattattttattttaaataaaattactagcaaaaaaattttggagagacttatgaactaatgttaaaatagttcataaaaagaagtagaggttgggatgcttcttagggtgaggggccttcgacaacgacccaacccccaccctaaagatagctttgtcatctgcctacacgtcttcaagctataacggaataccaatgctacagtaatggaagcaatcgaatcaccaactgaagactaagtcgcaaacctaacaataataccatttgtgttacaaactatcttcctaagtctgattctcatttgaaaaattacaaactgcgtcacagtttaacttcaacaaactagtaggggatggaataatcttaaataaactcttttaattttgttgagtaactattattatggacaatattatagtgtaaatttcttgcctagaaatatgagagcaatctcgtataaaattgacacgtggacccagttcttgagggaaagatgacgtgttaactgatgactctcatagagttggcctcgcttgatctaaacttgcgagatgatgcgactgtgacagtgtctagtcgcatactatacatcgcatagtcatagtaagcaggatcaagaggatttgatactgatcgcacatacattgattatatgcgacgaccaagtaaacctctcctgcgaccagcaaagattgcttgtttacataagattggtctaaatgactaaagtgttcgacgacttgttgggaactcgcatgttctatgttgtcaacgcataagatgtccgtgtatgcgattaaggatgaacgcataaatccaaataaatggcccgaaggtcaccgtgaaaatataaacaccttagagtctacaagcttgtgtgttagaatatgatcgggcaactcgcggcttactaagtcgtatacattgttgtacttaatacaagaacggattaaaatgttcttcatctattctttgaacatctactttaattaatatttgttatttaatgtgttctgtaactgattaattatgtaaatttaaaggacacttactttctacataaatgagtgatctaaatcaaataaaccaagctgaaatctttataacagtggattaagcaaaccaaactctaactcaaccactataatttgagtactcgctactctaaataagtagtacacgtttttaatgagtgtttttaaattcattgaacactcacacgattttagtgttgtctaaattcatccaacaacagacattagtatgcaacttgataaaattatttagatggaatttattacctaaatgtttcaattaataagatacaagataatgaaaatcaagcataaccacctactaaattgtctactaagacaattctcacttaattttcattgcatattggacacatttcaattataaataaatcatcatgctcctaccctaccaaaaaaaaaatcactaagttagtgttgactatcatttccatgatcatttttctccaaagtttaaaaatataaaaaaaaaaagtcaatatataataaattatagagtagtcattcaacaaaggtcaaaataaaacaaagtgttatataatccattatacttgccttggtgggtccatgttaaggccatgccttagggccaatttgtgaaataatgaaaggacatgacctaaagttggggatattttgtactcaataaaaataaacacttatgaagattattgctatttttatgaaatgatatattttatttttatttttctataaagacatgatttttcatgtcaataatgccaaataattcttcttagatttatgggtgagtggtgacttatgtatattataatttttatgataagataagataccaaaaatattgacaatcattttggacacaagttgtagtggattgtagtgtgaagaaatgagaaatgctataagtgtgaaattgaaatccattcacaaccatgtaacaaaagtaaagataagctttattcatttgttatattttgttttgtttcactccaaaaatctttcatggtttttcttcacattttagcaaaaatgattatctgatatttactcaaatttagatatttataccatgattatggtcaatttagccaacaaaataataataatgaattatgataacttgtcatcttaaattaataataatccaagtttgtaattatatggtggatatgtaatcttcaaaataattcttgtgtatatgtttatataaatttatatatgtcataaatggtgacctctttattttttttaaaaaaaat

SEQ ID NO: 380816 - DNA, 2444 bp, Cannabis indica
tttataaaattgtattgaattcatttcaaggaataaatttttatgttttttggtgctttactttacatacatatgagtattgtttcgatatgaagtttggtttttaattgacttgatcaactagggagcagctggtggagcagaagcgagaccatttgttacgtaccataattcgctaggaagagacctttatttgaggatagcaacagagctccacttgaagaggatgctggtgaggatttaaaccatactaatatgcataataccctttaaccgtaatctggtgtcataattttctcgtaaatctttctcgatgacaggttggagggtttgaaagagtttacgagattggtcgaatatttagaaatgaaggaatttcaaatcgtcataatccagaatttaccaccattgaggtaaactcgttcttaattttttttttttcgtttatttgatatgctaaatgatgtttacaaagctctgatctgaattgctattagtttgatcttagatgtacgaagcatattcagactatgaaagtatgatcaacatggccgaagaaattgttactagatgtgcacttgcagttcaagggaagcttacagttgattaccaggtaattatgtggtctaaacgtttactacatctgagattctttctgtttaataacatatctatatgcagggagaggagatatgtctcgaacgaccttggaggagggaaaccatgcacaaccttgttaaagaagccactggaatcgatttccatgaattgagcagcgaccttgatgctgctaaagaagttactctcgggactcttaagaatcttggtaacaaagagaagtcctccatcgaagcatgcccttcggttggccatgttcttaatgaggttaatctacttttacaatcaagaactcttgagtttccactactctgaagtctcgttatttttgttctaagcaatttgtattcactactatttaggttttcgagatagttgttgaatcaaagctcattcaacctacatttgtgttagactatccggttgagatatcccctctagcaaaacgacaccgaaggtaatgacattctcatgttctttattgctgtattttttctcatgaaagctttaattttcgacttattctatgttatttcatattaggcatggcgggttgactgaaagatttgagcttttcatatgtggtcgtgagctggccaatgctttctcagaattaacagatcctgttgatcaggtaatcatcaattcgagcaaaatgtcatatgttggttccaactagagagatgattttgattttgatttcctttcattcttgcagcgaggacggttggaagagcaagtaaggcaacacaacgagaagagagcagaagctatttcaaaagctgataatagcaccgaagagaagaaaaaggaaaacgaggatgatgatgagtcatatgaagtaacactcgatgatgatttcttaacagctttggaatatggaatgcctccagcttcaggaatggtactgtactgtcatccttttatctatcttctttcgactttgaaattatgctaagtttatctatagacattgtctagtacacaacacataatcgaagggttggcctagtagcaaagggtgaaggtttagaacttgggatatgtggttaaagcacgattccaagttcgattcttcctagctcaaattctcgaggttactcaagcagattcccggttgaaaacatcatgtgtcgtattcattctatacccgacaactgtttcatgcatccgtcgctaatggtaagaatttgtgtttcagggacttggaatcgacaggctagtcatgcttctaacaaacgcagccagtatccgagatgtgattgctttcccagtgcctaggaatcaagagtaggtgcccgacgacttggctatacatagattggattcgagttgattagatgagcctcgtacactagtaactttttatatattgagtgatgagagattatttaagaggcttctcaattttttttcaatataagaatagttcaaataatcagacatgtggtcgaagttcgagttatgtcgagtaacttaataattgctagtttcttcattcccttgtaagcttgtttgtcccaattgttctgattaaattcaataaatttataagtgattgactcaaaatcatgattgccattgccatggattgtttgtacttcaaatagcatttttccttttagataacaaatacaatttatgaactttgaatgctgaaatattgatactagaggacataaacgcaaaagggtgataaggattcaattgcaataaatacaaatcacatgttctcaatatcatatttcattcttgtccctccaataaataatggacacgtgtttttttttcttacattaaaattacattgacaagtataaagactt

SEQ ID NO: 380817 - DNA, 4523 bp, Cannabis indica
attattatttggaccaataatgattcaacacgtgtcagttatgaagaacttaacggatctgccatatttaggactaatggacttacaaaatatgtgaccttgatgactattgccgctatttttttaggttggagattaatctgcatcatagtaaactttttaagtacttttgccgcaaatctccctattatttaaatatatttatcaattagactcacaaagtgtcttaattaacaaataaacttctatctttctcttcttctcaaatttgtccaaacttagtaaacattctcaaataagacatagtctcattatagaattatatttgacttattaaatcaattaattgaatctacaaagtagtattattccagataatgtagagatgatgacctatgtaaccaagctcccaataatttaacatgccgaaaataaggttcatacaatctatttcacaggcgtataaaataaaagagtctcgcgtgcaacatatatactgttttaactatttttcggcatgttatatttttttaaatcccttaaaattttacaagatatcttaaataattacaacgtatatgactgaaaaaaaattgaactaaaaaaattctctcatatgttaaaataagaatgtatcgataaatcccttttaaaagtgcattggaagtgttgtttacttatttattttaggactttaaaatatttaaattattacaactcaaacatttaaatatctaagtgtttttttcttaaatattctgccattttgggcatccaatatgcttaaccattccattgttatggttttttttacaggatcgtactatgtaatggaaatatcattacttttaagtgcatgaagatcaatctaaaaatctaatcctaaatctaatagaggcctatgtatataggcggtaaataaaataatccgatgagaccgaacaagtacaaaaatcattgtaaattatttaacgagtgattttagagaaatgctaaaatggattattattggtttaaagaatattattaactaatcgtgaggtgtcatctataaaaactattgactattattagtgtcaaatattactggtgcctaataataatctagatcctcttaattttaagagtaatactattaggcaccagtggtgcctagtaccttctcgacatgtcgcgttgcgattggctagcgatactccctaaaagttattatattaaactatataggactcgatacttaattggaccaataacgatacttacacataagaaggtactaggctttacaatactctaattttaatattgagattagtatagttgttagtacagaaaattagattactaataatgagttaacacgtggtgtaaagttcacgagacccccgacaagttttattactcatctcatctcatcacggacgtatagtactacatatatagtatagtgcaaggaaagttgattacacaaacggtcgacccacgttatatttgtctccaaaactcttcatcttatttccccaccaataaaaattaacatatcacatattatttttgttaaaaaataaatgtatatgtaagtataaaactgtatataatatagtgagcatgtatttcctatgtatatatatatatatatatatatttgtctaagaccaaataaggcgagaatcaatatgcctttgtttatgaaaatagttgaacaaaatagatatagccataaggctcggataaagcatgagaaattatattatagagtagagcaggcaattctgatagtaaaaacattcataattgctaagtcttgataacaagttctaatctaatatcatcattaatacaatttgttctaatcttgaagggtcaagagtattttaattgtatataaacaaaaattaaaaataaaataaaaaatacgtattgtgtaaaagttttataattttatttttattataaataaacaaaataagtatgaatagatagaaatgatagaaaatagtaactttatgaaaattaagtgactaagcagaagtaaattatgttattaattattaggatgaaccactatatataaactttgtttctatattttcttctcatatggttaatatatgtgcaatcacattacttatttacagtcttcatatatgagttaacgagtgaacaataattagtcatctccaatatcaagtcataccatataccccacaaggcttagaatataaggtttcatcaattttttatactaatactattatgtatagagtattgctattaggcactattggtgcctagctagcaagtactttcttgacatgtcgtattgcgattgttaacgatattaaataatatgagatctgatatttaattgaatcaataacgaaacgtaaaaggatgctagacaccacttgtatcctttagtatttctgttgtgtataatattatgtagaatttggtttggttatgattggcgtatgacaacgtgtatatatatggtcgaatccatttaccaaagtaataactttcaccgattacataaactgtcgaatccatttatttatttatttattgcatatggtaatatatactattttttttgtcagaagtaaaaataaaatatatataactatttagttttagttggtcgcctcacgacaagtcacgggcacatttttcttgcgaaagaatattgaagtggtttaactactcgagtagtcaaactcaaacataataataactatttaaatgtatttgttagaaagttgaaaggaaatatatagtgatgagtagtgttattttataattatttattttttttattaatagtataaatactttctataaatagttttttacgataatattttttaaaaattatttttttaaattatatagaattgatacttaattacatcaataatggtatgacacaaaaaagctactaagcaccaataatacttttaacaattctcttacaagctatatcatgccactggtagaaattaaccgaggataaatatagcgagctatataataaatgcatcaaaacttgcatgaatttcaaaaatacttattttttatgttttatttataattttacacttataaaaattttaaattacaaaaatatatttttttaacaaaaaataagaaaacgactaaaaataatgagaaattaacctcacgacaactataaataaactgtaaataatataaagaagactgggagatttagatcgagaagtgagattgacaaccacatctttatattcagatcccaatcctccaagaatataaggaatgaaatcatcattcattttcagaatgtattcttcaattgattgtggtcctttcttggtggattgaagtaaaccctcttagttgcaaaagtcttgctcttgatcttgtggcaaacagtgaggcaaaggtgctccaaatctcaacagaagtacaacaataaataacatgcccaagcatgttttcagtttcagagttcatgagccaatatataagaaattgatcaaatatcatgatgatctagattaggaatattaccaacaagagtataactggtgatgttggaagtaatccaagaatgtatccatccagatcatacatctccacgggcatatcaacagttaggactaaagatctctaaattgtgtagttcgtacgatctagtcgaaaattctagaaaaagcagattattgtacgggaagagccattcgagttgtatcatactgttcatgttgtgctctttgtagttcatgtggaatgggtctttgatcagacatggctctgataccatgaaaaaactctaagaaaatagagttgttttgagcagtgagagaaaacgaaagagaaagagaaatagacaaagtgaagatgaaaatagactgctcaatccaacaatgatggccttgatctttatttatattaaatcttcataacataatacaatagaagtagctgaagagaaaagactgctagcttaataaaaaacagttacaagagaagactaaaagctaaaggcctaattgtctaactaactattttcttcttgtactctaatatttatacgtgtaaaattgattatttttaactctaatttttggtattataattattttagaatttttcgaaagctagtaaaatgcttactatagctagaatgtagaccgttatgtacatattaaaaaaattgataagtagttttccctttgaactttgattgagaaaattctgtctcttaaattattattgatgttaaatatcttctctgaactatcgccgttagtgaaatataaactttctgtaagataagcagtaactttaccctttaaactatgatcactattatattttgttgtccaaattttgatcattgccaaagtatacctctttaataaatgaagacaagatttggctgtagtaagagtttaaggggcaaaatacgatattagccatattttgggagtaaaattattaaatatttaacaaaaaaaaaaaaactaaattaaagt

SEQ ID NO: 380818 - DNA, 3376 bp, Cannabis indica
gaagtgagtctacattaacatctatcagttaacaaatataaggcaaactcaagaaacctttttaaactttgttgctgggatatattgaacctcaaatccactaagatcctgatatgataaggcactctaatatcaacagctaaaggctccttccaaatagtattcagaaataatctcttatggtgatcaataatcctgcactgaacaaggtttttttgtgattaagaggaaaaataccttgaagatcatcagtaatgtttcctggataaatatctttcagcggtggaaaaattgcaggttggcatgtctaaacagaaagagacatacaaaagatatgagtggaactacagcaacggacataatcatagagtatggtaaattaaccaactacagaaaatgcacggaaacacgcggaagtaaatccaagttaaaatgaaagatatgtagatgtattacttagaggattctacagaaatgcaaagaaaagctaccagcattgattactttccatagaataggtccacataaaccatcagtataagtgaatcataaatcattacgccattccttggttagttaaaaaatgggggtaaaaaaatccaatataacttaaaattattctgactcacgcatactaaatttaaagataaagaatcacctgaaaatggaagatcacaagcaaacacagagaatatgaattgaaagtcccactcttcggattattgatattacatgatttcgcccattcctttacctacagagactagaagaatgcatcttatagaatgccctttaacttacaagaaaaacaacttgtagcaaacattaggattgtaccagtaaaaccatatcacgaaagcgggtatctatttcattaatccaaagcaagagtttggacttcatttggccttgcagattgtcaatagaaatatcacaagagatgttctggatattgctttctacttttaaaatgggaactcttgcattgcggatcaactgcaacttcttccatccacctgcagatcaattttgatatgaaataaatataggataattgtaattaggatgaatcaaacaaactaataaaaatgttttaatccaccctcctggaaaagaaagagcaggatagtagtcgagaaaagtcttatgactgacacatatcttcataatgatttcttcttacagatgacaatatacgtataaagaaattctaagaaccataactaaagaaaatacaactctacctttctgtctcatggccttagtaagatctccaagcaacttctgtctctgctttttacccgaagatgaaataaaagaaccattggccagttgaacagatatgtccaagtctccccagcgagtgaagagattcgacacaaatgatccaaatggctccacggttgcacctgtttgtgccaattatgttcatgaatctgtgtcattactaacattctaaaaaaaaaatatctactaactcaagacgactgaaaattcattgtcagagtgaaaattccatcaacgtcttgctttgataggtaccaccaagaactgctgaagaagaaatctttataagaacatttcacactcaagcgtaagtagcttaacctcatttaaaaaatcttctaaatttggtaaaccagcaaagcatttgtggaaatttagaaaatacaagtttatatggccaaaaccataaacactatcaataaaagaaatagatacattgttcaaaaattaataaataaaagaaacaaatacgaaggaaattcttgcactgcacctaacgaatgaaaattgtatagtgaaaattacaaagcagctataagctactgatatgagttctaatttcctaacaaaaattcaatacattccttccattttttgttaaatgataatgtccatacgccatgcataaacgctaccaatggaaaaatcaaactactgcattcatcaattgatgtaaaacaacagataccaccacgacgtcccaagttcctggaaattactcagatctcataatcatcatcatcatcataaaaataaatggataatttcctgacaatgccatggagaatggaaaactgatactttcccaagagagtaatttggcacactgaaaatagcgtaaccataaaaaaaaagagtaaaactcacctctcaaactctgcagagattcaacaacccttcgaaactcttcaattacttggaaccgtgccacccaatcatcattcttaggcttaaccaaatccagtatttccactagagtaggctccaaaactccataacccttggcactcatcttttgcccctgtaaactattgaatatgcaaattaagtatgccaaacacctcaaacacagcatgaccttcaagaaatgacaaatgaaactacaaacaagtagatacacaatatataccactcaaggagaaatttcgattacaacttctcgctttcattttcttttgttcttaattttgttttcaatcttgataaggggatgataatagcaaaatgtattctgagaaaggcaaacaaaccaacatctctataatctgcgcttaaagcaagtattgtaccagttaagcatcgaagaaatttacagaaaataaacagttaaggttcataaatccacttaaacccatgaaggtataaaccaaatatgcaataattgacctgtaaaattccaaagcaacaaaagccacatactgaaacgaactctctccaaaagaagcataaatacctaaaattgaaattaacgaaaacctacgattaacccaaaaataaagtaatcagaatgagaatggtctattaccggaagttcagacggtataaattgggctcagcaagacttgtttatcatttgtttgatgactttaaggtacattgctataagaagtccaccatgtaaaagactacatatatatatttatatgtgtgtgtagtttccaagaacgtagtaaaagttgaaattgagtaaaggctttgcttagtgagaagggtttctttgtcgtacgatgttgatgttgatgacgacagttgtatgaactatgaagcgggaaaaagaggatcaaactgaagtcgggtcgctgagcaaaggatcttctttgaatccttccgtactatattttcttgagtttatgccttacatgttttcggctatttgctatatattcaaggaaaaaaaaaacgagaactagtagctattaaaaaaaaagctaataattgtgccctgaactttttttgcctttagaaattctcctaaactattgagattgttaaatttaagaaattttgtctaatttcattcaattttactatttcagtaattgtttatgtactaaaccatgctccccaaactttgatatctacgaaatca

SEQ ID NO: 380819 - DNA, 3331 bp, Cannabis indica
gctgacaaggtcattgtcttaagcaagatagaaggtgccacatttcctattttgtgtagtcaacggccaagtagtcaaattgtagagcctatatgattgaacatctggtatttaagtgttatgacttatgatgttatctagaaaattgtagaaaaaagaacatagagtttgtcaatagtttataattaacttttataaatggtttctgactagtgcatttattttgttagttggatgattgtgctctgacagaagtgatgaagaagctcttcaagaactacaaaaaatggtgcaagtacttgggtcgtaaaagtagtctttggtgagtgctttttgtgctgagctatttgtcattagattttgaatgactttgtatttggttcattgtgaatgcctctaatttgtaattttttgtaatctagttaatgagaataggaggttacagccttggggattttgttaactttgtgcattatttaatttctcaatgaactcaattctttgtggatttaactgcaggttaccaaccatacagcaagaagttcagcagcgcaaacttctatacatgggactgtatcttttaatttggggggaggctgcaaatttaagatttatgcccgaatgcctttgttatatatatcatcatgtatgcatctttgtatatatatatatatacatatctctctaaatcataaatatagcagcagctccagtgaaagtgttttaatggttaaactaaaatatgatgtagttatattatgaagtatagtgagtaatattcaattttattttttctttcccttgaaagaacataaattctttcaggagtttcgactaaggataagaaataaagataaggaattagacaacttctctctagattgacaaagaaagtttcctataaaatagaaactaaatgctatatttctatgaaccagtgctaaatttaaaagcgttcttctatcaaatgcacaatggatttattgtactttttttcttctgtttctgttcttagatggcctttgaattgtatggtatgctagctgggaatgtcagtcccatgacaggtgagaatgtgaagccggcctatggaggtgaagaagaggctttcttaagaaaagttgttactcccatctatgaagtgattgccgaggtagattatgaatttttttttctagtatattcattttgttgtttagaatatttgaatggaagacattaactttgtgctttctttaattttcatcttatgattctgttttgggtggcaggaagctgaaaggagtaaacgaggaagatcaaagcattcacaatggaggaactatgacgatttgaatgaatacttttggtagtgcattagtctgtttataattttcctcgttttatactagtcatcaaattattcacagcaatacattacaggtccgttgattgcttccggttaggttggccaatgcgggcggatgctgatttcttttgtatgcctcttgaacaacgccgccttgacagaaatggggtaagcacttgctttattttgcactaatactttgtactctagagtgaagtcagtttggattcctggggatcagattttatcataatatttttacattctctaccaccccttcctgcatttgatgggatgctcttatgaacttgttatgaaatcatcatatatcagtcagaattttgctatattacggaacctgctagtcatattactaacatgtgcacacaatatttgtcttcccatttgcttttaattttctgtttccttgagagttgggcacattattggttttgatacaaagaagaattgaacccgtgtctcttcccccacaaactcacacacccagcctcctgaattataggctcaagtagttgtgtacattcttgtttatagaaggaaaataataaataaaaaaggtgtgtgattggagtcatattattttgtggatggtgcacaggaaaacagcaggccaattagcagtgatcggtgggttggaaaagttaattttgttgagatacggtcgttttggcatgttttcagaagcttcgaccgtatgtggagtttttttattctttgcttacaggtattaactttgtgaattttcatcgcgtttctttcttattcttaatattgtgacatgatgcgaaaaatgggtattttctacaaggctatgattattattgcgtggaatggtactggacaacctggtgcgatctttagtggtgatgttttcaagaaagtgttaagtatctttataactgctgcaataatgaagcttggccaaggcaagtaaagtgtgcttttctttttccttacctatttatgaaataggcctaatgacatgcttattctctatttacttcccctgtgaagtataatagatgtgtatgacaaatggattttgaagacgtagctaagagtttgttggacttgagatttctcattgttttgactggcgacactgataatttatgaaatagctgtgatatagtttttccattgagcctgatggtaataaaaaaagattgaggtatcctactaacttaaaatttaccagacgttaaatccattatttactaatacatattttgctcaaaaggattcaaatgaataaatatctttaaaattttagcaattaagtagccaaaattttactctactacactgtaaactgatatcccattaaccacatggctggtattgcacacaaagaagttggtagagaagaaaggctaagttccttagtaccatccaattttgtttctaatttttcaactatgggtctgctgaagtcaaaagaaccctattcttgtttcttcatttatctggcattgctgtatgaaaaatggatttatgaatttttaatttgttcattgtgtaattagttgtattgccatgtgcagcttttcttgatgtaatacttaattggaaagcacaacggagtatgtcatttcatgtcaagttacggtatatattgaaggttgtttcagctgctgcttgggtgatagttctaccagttacttatgcttatacttgggagaaccctcctggatttgctcaaacaattaaaaattggtttggaaacaattcaagttcgccttccttgtttattttggctgttgtgatctacttgtctccaaatatgctggctggattattgtttctatttcctttcatccgtcgtttccttgagagatcaaactatagaattgtgatgctaatgatgtggtggtcccaggtaagcaaaattatgatattttgacatatttcagtctttttaagatggagtctaaccttttgattttttttttttgtatttgt

SEQ ID NO: 380820 - DNA, 3248 bp, Cannabis indica
aaaaaaaaatatactgcttaattgaaaagtaacatttattaactaacataacatttatgtgaaccattattaaaatagtttttagatttagcttaacaaatcacatgttttattttgttctattatctgattatcaactaaacacatttattatattcgatttttgagaaattaaaatagtcaaattttaagactttgaataagacgtgagaagacttgatgggtcagaactcaaacaatggactagatggcaccttgtttgagtgccacatggcgcatgaggagtgttaagtgagtactgacatccctgaggtgtcaatactcgctccttagggttagcattattcataaatctgagataggattatttaatatgaaaccctaattatatgagaagaaatccaacaagtagctaccaatacttaacttattggagtacaagagcatacatgacaagatgacatcaccaaatgcaaagagaagcagtcatacacgactattgacacttccttggtgtcagcatatcaagaaattctcaaggagaattgctactttaacaaaaatatcacatgcatgcaccaagtcttgaatcctatagtcaaaagtgcacaagaaatgaagggaaatggtgctacatgaacactccccaaggggcagttttcgcatagcacaagtgaagtcccaaaagggtataggagtgctatacatgagtactgacactctctttggggcaatactcgtgtaggttagggcgaaggaggtccttgggtgtttaaagcataaaccctaggaaatgtactaatcttcaaagacttgtcaaagacaatccaagaagtccaagtagagaagtgccacacaagtattgacaccaacatagttttagtactcgcccaaattaataccacacatactaacactctcttagttgttaggaatcgcctgagaccacttctctccatgaaggagcctaaacaagcacgccacacgagtactagcaccttcctagtgccagtagtcacccaaatagtcccttacaccagtaataacacttctttggtgtcagtttttgctcactatggtgctctccaaaggagaagccctttcaacacatcctcaacttatctcttgaagatgaagtttctagaagactttcaacgcttaactatctccagtaagatatttaatttttacgtaattccttattattattaaatgttaaagtgcggaataaatgtaacattcccccagattatgggggaatgagtagcaaaccctaagcgtatatagacataatgtttagacctaggaaaggaaggagatctgagttgattatctgacttaagacctggcgcctctctttttctctctaactcttatgcattcctagaaatattcaatcgttcacatcaaatagaattctgacacgttggcctattcttctaaagtcaatcacaaagacactccaagagatcttatttttaatcttgctcgatctaatctccctaaacgcactcttgagaacataattctggtgtgtttgggtcttgattaataaaacaactagcccattactgtcaatcaaatagggtgaattactataaaaattgttgtctcattttttacgatttatttctgacaaccactaatcttagtctaatctctttttttttaacgacctccttaagttagattgatgaaaaaccgcgttattgttgaattaaaattctatttatgggcacatatgtataatgtatttattatacagtgatacaaaagtaagtgaccaattactttatgggtatcaaaagggtattaaattgtcatggaaatatgttgtgtagataccataagttaatttataatttgttgaggggtcaaattaaaaatactcaaaactcattctataatgagcctgtaaataggtagtagtctccaagaaacactaaggttcttgtattttctccatccccataagaaaaaatacataaagtaatagtgtattcttggaagattataacctcatgagcaatctccacaatgttttcagtttagtgcttctgcttatttgtattcatattatttttctttaatttagcaaaggttatatagaaagataatttaggggtttttttatgttaaaatactttttgaaatatgattagatttgtgtgagatatctccaacaatgacttcagtttagtgcttctgctcatctgtatttatattatttttctttaatttagcaaaggttctatagaaagataatttatgatttttttatgttaaaatactttttgaaatatgactaaatttgtgattattgtatttctggagtgttttataaattctaacatgtgatatcaaagccacatttatcaaattgattaaaaatctgatgattttctttatgaaattttgaaattttgaaaattaaggttatgatttttgttcgaataatactgccataaagttttaatatatttgctgattgatatgatattttgattaatgtatatatattggcatgtaggccggcaaaatggtcagatacgataacatgactcgaaacccgcatgagagttagtgggtttgggtttaccttaatttggttcgggtcgggttcgggccgagcttgagttgactcgtctaacctgtttaataaaatgggttgtgttcgggttgacatgacttacatgaaattgacctgttaatgacctatttaaagttattttagtactttaacatgttataaatgtgttataaacgtgttgaatattttataaacgtgttattggttgacatgtttaaataaaatatacttataaacaggttacacgggttgtgtcgtgttaacctgtttataaacatgtcgtgttcggattttattttttgacacgattattaaacgggttgccttcggattgagcatgtacttgttgtacatgggtctcgacatgacactaacacgacctgcgattataaattaccacccctattggcatgtatatagataattataggtgtattgctttagtttccttttgccttcaataattatttgtatatatgtctcatgaaattttgtttattaattaatgatttttgaaatcattcatatttttgtttggattgatttatatatctattctatataaaatgtggccatataacagaattcctggtttatgagaaattattgggtgacttttttttttaaataaaaaatataacaaattattagatgttgc

SEQ ID NO: 380821 - DNA, 5521 bp, Cannabis indica
tctattggaggcttcccatctttccttgaagaaatgaaggtaaaatttagtttccacagaccaaaaacaatgaagaactattcagcatatcgatcttccaatactcttgcgttttattctttggctatgaaacaggtgttcaacaaggaaagactgaatggttattatggggttggtgtttatgtcatatcgaacttcctatctgcttttccattcctgcttctgatgtcgtttgccacttcaactatagtttactacatggtgaaatttaggcctgaattcgaatgttacctatactttgccctcgatcttctatgctgcattgcaactgtggagagtgccatgatgattgtagcttctcttgttcccaacttcttgatgggggtcacagttggagctggatatctggtaactcaaagaagaaacaaacttttttcaccattattctcacactggatagttcaagtattcttcatcttcataccagcaaactaaaattatttttcatatggctgtccattatctgcttatgcaggcgattatgatgatgacttctggctttttccgccccatacctgatcttcccaaaccactctggcgctatcccatttcatacatcaactatggtgcttggggtttacaggtaattatatatgaagaaattttgttttaagcagagactgaaaaaaaagaaaaaaggactgatgttcatatgtttttgcaatacagggcgcatacaagaatgatatgattggccttgaatttgatgccttcatacctgatgggatgaagctaaaaggcgagtttatactcacaagtatgctaggcataaaactgaatcattcaaagtggtgggatttggcagctattgttttccttattgtgtccttcaggcttatcttctttgccatcctcaagttgatggagagagcttcgccttatgttagaacattttacaccaaaagaactttgaagcatctgaagaagcgcccttcgttcaggaaaacaccatctttcccttccaagaggcatcagtctctccatccattgtcagttcaagaggggctcaattctcctctacattactagcaggcaacaatacaagttcaacttagatataaaaaaataatagaaaaaatacaagttcaacaaagtaaaaaggcggttgtgaaatggggttgtcgttagagttcttctctacaaagaccacctatgtagtttagcagaggtagtgtagaaagacttaaccatggagcctatatgttgttttcaattatagttgactactcgaaacccacttgaagtacgtagttttaatttgtattcagtttattttttttttgagggaaagggagcccactaaagggaaagaaaatcactaagattgtaggggtcgtcgccaatccaaattgctacttcatctagccccgaaatccaatttgccagcttatctgcaaatgtattagcttatcgattaatgtaagagacacgggccgcagggaggtgagacaaagcttccttgatttgacttagaaggtcaccaaaacacgaaatatcctcttcggggtgatccaacgcatcaataatagttttacaatctgtttccaccacgtggacagggaaatgctcttctatacactagcgcagagagacaaggagggatttagcttcaagaatggctacattttctgcctcctgtgtagggggaagcaactgccgcaacaacgagacctttactgtttcgaatgacaccacagaagccgacttttgctctccccttggaaattgctgcatccacatttagcttgaggcgactaggatctgggggagaccaggttgtgattgcagaagactgccgatccttcttgctaggaattaactctattgcatgttttcatttttaataccgatgtccaagttgactgttaaaatcgcaagattatgacatgcaattaaaagcataatagcatacatagtttgctcaaaagtgttttgcataaatacttgtttcaattcaatttaacaacagaaagatgttgaaaaaagtgagagcaaaggagaattttgactctcaaaatgaacaaatctactgtacatggagattcaagatcattttgctgacagttttatccgtcctttcaactacgatcaaaagaattctaccaatctcagcatgttcctttcgttcattccgctgaaaattcaagatacgttgcacttgacaaccaacctcagtgaagaacgctgggtctgatgtgaacttcctgtcaattcagtagaatatctataacaatcacaactgccaccaagataatttcccttttaataacaggagaaaaatatgcagtacacagaaaagaataaaaatttagagtggcagtaaaattactcagtctgaatgttgctttcaatttcttttccattgataagcgccagtctaaactaacaccttaacgccacagcacaaattgtcttcacaagctgttaaaagagcattatctccaagtaagaagcacttaatcactacaagatgcttgtttcaataatatgggtatgagaaactgggagttgataagtttataattgttaacagtgcatgtgcacctataatagaaagaaagagaagtgtgtttaagtgcacatggaaagaaaggttcccatgcatgtatcattttcacattaggtctctgaaaacaaaacaaccaaagtataccccctgcataagacagaccaaagtacaccattggacaattttagcccactagctaaaacatgggatgggacgcaataaaaaaataaataaataaataaaagagattcattcaaaagaaaacagaagaaggacaacatgactggaacagttagctttaaaattaatgtgagaagagagctcttgagcaaatggtatgtatacagcgtggtcaaaaatgattgtaacatgactaatttctgtaaggaccaaattgatattaactaaacagcttaaaagacaaagacgcaagtgcacaaaaaactaaaagatcatgagttaaatagtttcctatatcacatggagatttctctcctcttgattagtgtcctaatccatatctctataagttaacttcaatccgcaataaatggaggaatgagaactcagatgacgagcacacaatagtagggttgagtggtacagcattttggctaaggtttcttctcctcggttgctccattttctgttcggttgtcaaatccatgatatggaacttcaaccatgggtttaggctgtggacgtccttcaaagtcctcagggaaacattcaaattcagggccaaagttgaacttaaccagacaatttggttggttgggaagagtgtacattgaagcagcagggtagtagcgaccgccttgtaagtccctataagcaaccccttggcatactccatttttgaaaaatgatatctcactatctgcacataggaaaataccaatatctactctatcaaacaagacaagtatacagatggtaacagcatgtccaagcaaagaatcaaaagaccaaagcaaataggaaactgaaagtacagagctgcaaagtaagacaagctggtcccaaaacaaagaaacaaattcagaaattattaaccaggtaatctaattctattaagaacatatggcctaactacttaatccattctggggacattcgataaccatctgaaatacacatcctacttgcatagacgcttaaaagcttaactaggcgtggaaataaagacgtaaatttgcctaataatactgagcctctcgttgctatttctagcactgaccctatttccacaatatattatcacattaacaagaagcgaaattaacacttcatatacatggaagtaaaagataaagaacaactactaaccagttactactttgggaggatcctcctttgagtctgctgcatatagataacgctgacccttgtaccaaaccatatgcggctgctgtggggcacagttacctccatctggtaagttaatataaaatccaataacatcaccttccctgtatccttcttctccatatttttccctcaaagccttgtgaactttacttccatcaatatccctatacccaaaactgttcccatcgtacccaacaggtgcttgaaggtctcctttttcagtcgaccaaccgagccgcgtatgccccgtctcccccaacttcactatctttatctcaaagtaccatgctccttccacaactcctctagtcgctctcaccattctataccccttagtactccccgcactcaagcggtcctcgctcaattccactttctcagccttgtaaaccttcgacaagcatatttgcatatcaggggtatcgtcgcttttatcaggaaatcttggcacgggagtaatcaatacagtgtcctccacaggagcattgtggttgttagccttagtcttttttttccctttacgggtagatttagtaacccacacattgttattcttctttttagacttcttcgaattcgtggtagtaatcggagccgtaatcgccgcactaccagggccatcgttacttgcaataagatgagatactggagtttggtccaggtccgaatgttgctcagtcaaagctgatagatgtttctgcttctttggaggtggatcttcgtcgtcttcgtcctcattgtcttgggacttaacagactcggatagatcgtcggaggcttccgcgtcggtcttgacgccgtttagttgttcggatggcggagggccgagtggcccggcgcccgtagcttcggtaggctcgacggagatggcggcttcggtagtggcagaagcagaatggtttgaaggttcatcttcttcgtcgtcttcctccttgtaagcggcttgaagagtgtccatggcactcaaacgatagggaattcggggagaaacaggaagctagggtttagttagggttctgaaattaaaatcagaacgggaatgacagtcgagagaacgggaagactgttcagaaaagggggggaacttcagttagatttattatcggagagtgacagagacatataatcataatcagagagtccattatttgatgggccctaaatgggctttcaaatatggacttggttcggagtcttttcaaaatgggaattttatgtagggaaatttacaaaaatactgacttttggctcaatatttacaaaaataatgatatacggcagaaattacttttagactgcctcggccaattttttttcttttataatgtaaacaccaaaaaaaaaaaaatgaggcatccatcttccaaacccatgaacagaaccactacaagaacaccagaataatcggaaaacaaccattaatttcagttatattgagaaaaaaaataatgaaatcaacatcaaataaataatcatatggcaaaacaactgtaaaacaacactaaaacaaatcaaacaaaagaaaggaaaacatgatttaaaaaacaaaaaaatattatgcacagcctcaatacccaatgc

SEQ ID NO: 380822 - DNA, 3916 bp, Cannabis indica
tgtgtaccatatccactaaaacgaataatgatgtctagactcaaagggtacgttaaaccatttacacactcctataacacgataattctatatttacagtatattgaattccagaaaaggacaagccataatgcgtacttgaactttaatatgtttatgttaatataggtttgtttacagtttcatacctaaacagataggacattgaacctctttccggatttctgccaattttacaatgataaatctgcacataacccaagaacattagcatagagcagatattgagatacccaaatttatattataagaaactgaatggcattacgagcggatacagtagtaaccggttaatatttttcattatacagacatataacaaacatattacacacacacacacatatacatacatacattaagtatctgggtagcatataaattatgtaaaatgaacggtccacttacggttgacacttatttacacaaatcaatttagagaggaaaattcagtttaatttggacgattccaatgcaccaaacttcatcgatgaataacaaacacacaaaggaactctttcaagttcaacactcagatgagctaatatgcttgaagacgcagtttaaaccacgaactgaaggatatcttatcagaaactccatgcaagcatcatcaaagtactatgtatttactggagctactaacagatcagaaaagcatcgacatgcttgagatattcatgcataacaaaacaaattagaccccgaatcaccataaaccaaaagatcgaaaacccatcacttcaaaatttcgaattattacgagcacaagaaaacggcaaagaaagatgaggaaagacaagtcaacaaaagccattaaaacacactcgaataccctataaatccacaaagctcgcccctaaactgcttgcgtattacactaaataaaaacttgcacgaaccaaaagatacggatcgcgaatcaacacccagcattggaaactatcaaaacacttgcagaaacaggaaagaaactgtttgaaattaagagagaaggagaagaagatgaagatgtccaagaaaaaaaaaagagagaacaataataagaaaaagaaaaggcaagctcactcgtctttgtcaccgctgctcgacgaaggacttcgatcggattctgagaaagaagaaggaacccatgagaactccatgaacaaccatacaagaatcagaaaaaagtaaacaaagcaaaataaggagcatgaagaagaacactctgtcagagtaggacgaaatttggcgttggtatttgggtattgaccgaaataagacgtaccctcttcgtctccgggttgttcatggctgtcttcttggttgctctccataggatcatcttccgatgcatcgtgggaccgtttctgcgccggcattgctttggttttaagtaaaaattcttagcgaggatcgaactcgatcgaacagccggcgagcttacacagcttccttacaaatagttcctacggagttagctccgccccttaaggcggtgatcttctagaaaagaaaaaggaaaagggtcgaaggtggcgggcgagcgtggctgaccagcgcgagcgagggagcaagagagagagagaggcggaggggtagaggttgagtttcagagagcctcgtctcgtggtcttaccgaatttctaattttcttttctttgattttttcttatttaaaatgaaaaagaaaagaaaagaaaaagttcacgcgaggttattcgtcgacacgtgtagcaattagggagttattcgtaatttcatcagttaagatatgtagttgtttgataatttgttaactaaaaacaggtgaatgaatgatttacttcctcgttttataacttcgttattacaatttgattttgactccagcttagttttttcaactcaaacacaatagaaataattcaaccattcgttattatattcgctccttccaagcattttcgtctttttagcacttgtatttttgtgaggatattttagctatataataataatttaaggagaagagttcctagcggtactgaaccagtatgattttagatcatcttcatctaattatgatactcgatgcagtagtatatattctgttgagtatttaaactaaattttaggcaacttgcttacatgacagtacggttgacagattaatatctgaatcggaggaacgagtgccgtttgtatggccagagtcatcactttgtaaaatcaatcaatatatataaagctcgttcttcacaaaagtcatgtaacgtatgtccattattccataacgagtgacaaacaacagctccacttgtgttgtagttaaaatcttttattagtgtttgataaattagtgttttgaataagaaatgatatatcagagtgctattatagtaaataatatttaactaaaatacggttaaatataaaagatccaaataaatgtaatacttattttgttttagtttatgaaaataaattacacacgtactaaaataaatattgtatagataaaaattaaaaaattaaagtataagacaccaataaaatgattatggagagaaatgttatataatatgtaagagataaaaataatcctcaaggtaaataagtaattttaagaaattaataaaaataagaaaaaaagagcggatgttataacatttcagaccataaagagaaaagtattatttcactgaaaaaaaaaacagagcaggaaactcaaaaacggaagagcagaactctaaataaaaagagatgtggagcagagctcaaataagaagagaaagacacgattaataaattcagatgatgagaagaggaggtgtgatgagcagcttatgacaattagcgcacgtggataaattagaatagaaaagaagaatgaagtaggcattcttgtccgctgataaatagaatatccccttactcaaaaagcagacagattcctaatcacgctagacttgctgaaactctatcggaatacacccttaaatccatactttagctctgaatgcaagtgaccgagactcgattaagagaattaagaggaaagttgtgtaaaacgattgagaatataattcgactagatcaaacctaatgtaaagaattcaaagtcttaataaaaaattattgttgagccaatttttgacatcaacagctggcgtcgtctgcgggaacctcttgaacaaaaagctggagctaaggatatgaactaagatgaggacgaaaaaggtaagaaagcaatagtttcgagtgaaggagatacattgaatccaatcattgatctgactactgtgttagcattggaattgagaaaagtgaataagagaatgattgcaagagacaagcacaatgaagagatgtgacgtctcgcagaggaaagattccagtaggaacaatgtacaggtgaagcaaaacttcaacaagtttaagacgaaaacagacagcatcaagaggatgttcatcgcacaatgaaaaaattcatggctgaaatggccgacatgcgaggtacaatggatagaactcaaattcattatgagcctaggaaaacgattgggtcagatcctcaacagacgactgatcaaatgcaacctattatgataccttagaactctgaaagggagatgagaaatctgttggaagtttactaacaagtatattgattatattctgtaatctaacaccctaaacatgaatttcctaaaataataaattaaacacgtataaagctgtagaaaaccttacattggtggcaacgaaataatatggttcattccgctcagatctctaactcttgttcctttctatcgcagagtaataacaagatttgagtctggatctcctttgggtgttagaattcttcacaatcttccacactatgatt

SEQ ID NO: 380823 - DNA, 5459 bp, Cannabis indica
taattatatatgtaacattaagcgttgtattgactatatttttatttgttatgtagattttgcctcttgtttgtttcctacgtcggtgatatctacgcctccagtttggtccctcgctagacgattggactaaaatcaactatgacgttaaggttggtagcgactcaatgtgtgtggtggccttagtaagagatcataaggagtcggttttgtgggtggctagcaacattctcaacttctctaattctctcattggagaagttgcggcctgtttgctagccctagaatcagcaactcgtaggaagcatttgtttgtgatgataaatagcgactctgagacggtgatcaacacactcaagggaattactttcatttggtaactatgtaatgcaatgtaaaatgctctcaaatctttccactagttgtaattttttatttgtttcaagactttataattttgcggcctataatgtagtcaaataggcttttgtcggtaatgtcattggtatggttgatccgtcctccatactggttaacttaatttgtaatgaccacgagatctaacttcttaaaatctaatatattcatttagtttatttttttttaagaaaaggtttgttttctcacttcatttcttattttagttaaggagtgtgtttagaatagaaatggtgtacatttaactccttagagattctcttacaatcaaacctcacacggtaaacacaatatagtacaatcgtccatataatatcactctccccaaaatcgaaaattgaaaccctaaaaatacacccaaacattttccttctctctcctcgaaagccaaggacccagccgcctctggctttcttctccgttgttttctcattcatttccgccttcggctacggcatccacggtgttcggagactcggtgtttggtgatcccgtgttgagtacgatctatttttgtttgactttttgtttttcaattcattgttttgtattttgtgcgtggatgtgtttgtttgttccccatggtttttgtttaatgtggtgaatgatctttgtgttagtataccgatttatgctattcattttgtttatgttttatttttttttcttttaattattgagatgaaaagatagcaatttacatttctatgtctacatacataaatgcagtgtatggaaactttgagatttatataaatatattatgattaatatattcacataatttctaactcttttcaggtaaaatgaggcctattttctgtggaaactttgagtatgatgctcggcagtcggatctggaacgactttttggaagatatgggaaggttgatagggtggatatgaagtctggtgagttctcaaatcgacttctgtcggttcttttgattattgttttcatatattatagctgtggctttgctgacgagactaaatctgcactgcacggtagctttgtcaaaatgttattaaaaatattcgaggtttgaagtgtatttacttgtattagatattttcgaagccaatctacatgcttttcagaaaattggaactttctgcttcatgcataagtaatagatggcttaattggtaccccatccactgcgaattggcatttatttcctcctcagcttaatctactttgtgggcaaggtaaggtaatgcatgtcttgatagtttggaggttgagttgtcgccgtaattacatgtttaccattttaaaataaattaaaattaaaatgactatttgttaaaggtatttttcctgaagaggtaacactattcaattaatattacccgattgtgcgttctagctttagtgataatagagaaaaatattgttaaaaatattaattcgtaaacaaactagttaaaataaagaaataatatattagaccttattacacacttcgcgaggagcagctactgagtcctagcagtgaggcaatttggctctggcagacggcatctgtaaaagaggcagcttccttttcagtggttctacaaccagaaatcattcacagtagctgtccaagatacagccatattctctctgttgagttctgctgggggttcaggatatatataaaaaaaatgtattattgaggcataaaccccccatactcaacattttctttgacgcaggattatcttgggatatccattctcttccaggctaatggatgggctcttcagaattccgttacatgcctgtgacgagcttcctcttctttctttcaagaagagtcactctgatctgcaatggcactaccatcccacattttccacagatactacctatgactttcattcctcacgacttacggcccagcctccaatttcagacatgtttcaagtttgaaacattgccaacctcacagcagaggccacaaaccgatggagaaggcacattcttttcactgacccacaatgagacatccacttttggattattgttccttgacatcacttagttcatgcacaaggtctgttattaatttactggtcacttggtttaagatttcgtagaggttaccaaactttttgttctagatagaatcttaggtggttgatttgtatgtttgctgaagggagaatgcacatcataggtaagatttcacgggagaaatcttacctttctttattcttgtgaatacatgtaaggtgagttaatgtgaatctctttgctttactggttatgtacaggattcgccttcatttacatggaagatgacagagatgcagaggatgctattcggggtcttgataggagagaatttggtcgtaagggacgaaggcttcgcgtagaatggactaaggtaatagccacttctttgaatatttgtcattttaagcttatgttttccattttgaaattcttgtgtgtcatgtctatacgaaatttcctgcattaattagttttgttttattatctttgttgcttttaagtttttataattttctttattgttatcattgtagcttttaaggtttataatttatttaataatttctcgtcgttttttttaagattttcaaagttggcaaaatcgaatttaattataaaagttcttataattaactcaattttactaagttcttcccaagaatcttgtatgtatgtaatgtggtggtgaaagtaagtgatgtgtagaaaaatgaaaacttggtgtcaagagtggttattatattttaaatggatgtcagatattaatttatctccttatacatattcataatggttatatgttaattatttcaatagtgataggatgcagtgtactttgtagaattagataattcctgttctttgagtggcacaaggcagaaaaagtgcgaggatatgcaaatgagaggatgacaaaagtctatatagagtggttattataaattaaaatggatgtaagatatgagaaggttaatttatatccttatacatattcataataactgttgtatgttaattatttcaatagtgataggatgcattgtacttcgtagaattagataattcttgttctttgagtggcacatcgcagcaaaagtctgagggcaattttttaaataattactggaggtagaatttgtttgatactttaacgaggttatagaactaaagtgtaatgtggtgaatgctaaactgcaatactcttttgatatatcattttttgaataatgtgaagagaaactgaagacctttcatttctatatttcagcatgaacgaggaattagaaggcctggtggctctagaagatcatcaactaatacaaggccgtcaaagaccttatttgttataaattttgatccttatcacactagaactaaggatttggagaggcactttgatgcatacgggaagatagttagtgtaaggattagaagaaattttgcatttgttcagtacgaaatacaggaagatgctactaaagcattggaggctacaaacatgaggtggataatcttttattactattagctaaaattatgtgttaaacgtttcttccaatgtaaattggaggaaatatatggcatgaaaaatgtgtttttttctctttcctgaatttcaattgttttgtaacttgatttaaatttatgaattggttttatattatcttgtatttgacatttgttgatgatatttggtatgcagcaagttgatggatagggttatttcagttgaatatgcagtacgggatgatgatgatgaaaggagagatggagtaagccctgatagagcacgtgatagatcaccagaaagaggtggccgggatagaagacgatccccaagtccctatcgaagagagagaggtagccctgattatggtcgtggcaccagccccagtgcatacagaagggacaggggtagtcctgattatggtcggggtcgtagcacaagcccctataggaaagacaggggaagccctgattatggtcgtggtcacagtccaaatccttataggagagacaggggtggccttgagcatggtcgtggtcctagccgtagtcctcatcaccgaagagaaaaggtgagtgttgatcgcggtcacgctcctagtcgtagtccttatgaaagggagagagttagtcctgagaatggtcgtgttgctagtgctagtccttacaaaaggaaaagggcgagtcctgagaacggtcgtggtcttagtcgtagtctcagtcccatggaaagagagaggactaaccttgataatggtcgtgaactaagccccaattctgtacctgaacctaaggacagtcccagttatgttggacccgaaagcccagtgaatgagaggtaccaaaggtttgtgccataaagtaaattctatttgaagttgtgtataaaatttttatgctaaacccagtcttatctttgtatttaatcctgataatattgcagtccctctccgcaagctgaagaatgattttaatctggggacgttggcattgataatatggtgtctcgatggcattgatatgttgtaatatgagatttttatggcaggagtttcgtttatttaagtgttataattatttatgctttagtttttgtattagtagttcatgagaaacaatcatgtagtttctacaaaattttatggatttatcagaacttgtactcgctcgttgattgaacttggattcaaaatcacaacttgattaatcagtcttttaacaattttggattgcaatgtaaaatttgtggattaaaatatgttcattgctctctaagaacttaccagagacctattgttactgtaatgaatacatttgtgtgaaaaagaaccatgactgaaatgttccacagtccacatacacattaaaagaagtatgtatcattggctttgaaataatattttaaaaaagttttggtatattttggaagtaataggttaattaggatttttattgggcatttgtatactaacttttgttatttttttataaaaatactgccaggcgg

SEQ ID NO: 380824 - DNA, 1052 bp, Cannabis indica
tatatatatatatatacataccatacaataaatacattcaaataaacactttcttctctacttcaaaaaacaaaccaccaacatttcctcacgcgccgccgcataattacacacttatatatatattatataatgaagccacactttctaatagtcgcattcccggcgcgtgggcacatcaacccggctcttcaactcgccaagcgcctcatccacgatcacaactcccaaatcaccttcgtcaccactctcttcgcctaccgatcaatgatcattcaagatttgtcgtcgttacaacaaaacgacatgtcgtttgttcccttttcggatggatacgacaatggccttgctgacgtggcagattttgattactaccgagccgagctaagtcggctcggctcgctagctctagccgagctcatcgcacaaaaatcgtacaaatgtttagtttacacccttggcctcccttgggttgctgacgtggcggcggagcaaaatattccggtggcccttttgtgggttcaggcggcggtggttttcgatgtagtttattattattttcatggttttaaggaaataattcaagaaaatattgaaaactctttttttaaattgtcgtttttaaatctaccacatattaattttactattgaagatcttcccacgtttttagattcaaaaaattctaaattttttttagttgaatttttccgaacgcagtttggaaaaattgacgagggatcgaacccgaaaatattggtgaatacttttgatgagttggaaaaggaagctttaagttcaattgttggtaaaaatttgagtttgattggaattggacctttggtgagttgtaatagaagtttgtcgtttgatgtaaacgacgtcgttttgtggttgaactctaagaagaaaacgacagtcgtttatgtgtgtttcggcagcattgtggttttgtcaaaggcccaaatggaggaaattggtaagaggaaattatactctataccctttttatattgtcctcttttatttttaccttcttttttaaaatctat

SEQ ID NO: 380825 - DNA, 1194 bp, Cannabis indica
agagagagagagagatagagcaaatgaatatgagatttgatggattttggggttttatatacatcacgagaatctctaacagttttaaatcgaagggtatactatacccaatgttttaaaatcgtcgggtataatatatctgacagttttgaactgttggggattccaattaaaatacacaccattttaattttatagttgttttaattggcaactattctcaatgactgtttaaaatcgacgactattctcagttataggtgttgattttacacagtcacttaattttattagcgtcggtacctaaaaaaaaaatctaatcaatgataataatacttttgtagtagtgaacgcaccctaactgtatcttatatattgtgattcttagagttcgatcaaggagaattctcacaaattctcaattggagagattagcttgattttttgtcataaaatataaaggttaattggttggcttgatttttagaaatcaatttttcaatttttgaaactccaaaattactttgtttgttgtttggattttcaataaattttaattttaaaaaattctttcaaaagaaattaacttaatgacttcttgagtaagagatctttttttgaaagatgaaatatattcaacgggaagaataagttttaacaagttaggaaaaaataaaactgcatagatcttacaaggaaatgaccaaaacaatagcataccataccgacaaaaataggaaatcctaacaaaaaaaggcacaaagccaacaaaggatatagtgcaaaacaccattataacacggaataaaaaacacccgactacttgcacctagagaaggcctcaaacaaccaaacaaaatgatcgagacaataacacaataccaaatcggaacccccgggagcaagagacagaataacacgagggtgcacttccctgagggccagacccacattttaccctttccgattttaacctccaaggagtgcccaaggttggaaatgcaagaaaggatcccaaagacataccatagtggattcataaggcaaaaatcagcaagtttaggaagaaaactatggcagctgttgttgcaagcttggtttattccatttggcatgctagaaatgaccaaatttggaatactcatctagaaagtaaagaggcaattgtacaaagagtcaaaaatagtgtaaaac

SEQ ID NO: 380826 - DNA, 1634 bp, Cannabis indica
tgggttgggttgggttgggtggatctagattaaatattcaattgggtggtgggtggtgtacagtaaatgaattttgaagaatcaaaaggatatcattgttgtattattggatcggtggtgagaattgcataaaaaatggatcatagaagaaagatggagtatgaatatcatcatcatcatcatcgtaatggaagcatatcagagggagggaatggaaaagggtccatagggattgggattgggattggattagggaaagtgggaagcagcagaagaagctacttcagcttggagtcattgctgttgctgctatgcctcactgcttcattgctcattcttcccttgatactgccgcctctgcctccccctccattcatgcttctactccttcccattgccattcttggggtccttatgatcttggctttcatgcccactgcatcatcttcttcttcctcctctaatctcacttacacatacatgtaacttattaactctaaataatgtaactaaattccatttatttctcatcaaatacaatttttgtatctttcagaatcacaatacaaaatgaaacaactacaactacagtttcattctaatctctcactttttgtatatatgtataatcatttttatattattaacaataccagttggagcatccaaaaccactactttcaattaagtaattaatctcaagtgttattattattggttcatttatgcaactactaacatatatgagcaattcaagttttgggggtggggaaggggttaaatgttaatactaatcaaaacttaaaaggccattcatatatgagcattactaacataatgaacattggataatccaattttgtagagtataatgtttataagtgatggataaacatattcttagagtagaatttaataatttatcatgaggtgactctaaatcttaagttttctttattttgtaggaatttatttatgatcatgtgtgcaaatctcatcatcactatctttacctcaatgggttcatgactgtctataggaagaatcaaagaaagttcaacttcaagcctaatgcattttaacaatataaaaatatttatatctcaaccaaaccaagtagaccaatgatccatgacgtaacattcaattacaagttaaattaacataaacatcacttttacaattagtccatggatttgaacatttagtattgcacatgtcatgttgagaattttcatagcaaattgtagaaataattagtatttgttgcattaacaattagttagtggttcatagttgagatgtaattaatgtctatgcctagattatttcatcatactcttaggttcaatcttagaaaatcactttgaagtggtcttctattctcacctccagcataaggagattgctcagtcttcgatcagcaaaaccctggcgtcccacctccacgggcagccgaggcctagccccagatcctataattttagaggtcctacaaaaattaaaattgatatattatatacatgaaagttaaatatgttataaaataatataaaatagatgagaaaaagaagaagaagataaagagataaagagaaagtgaatgagaaagttgtttattccaatggggtgaa

SEQ ID NO: 380827 - DNA, 2150 bp, Cannabis indica
gtggttggaaaggatggggtgagatatcttatggaggatatgagtgtgttaaacgtgcagaggctgcagagtttctggtagatatgtttcaagatttttgtcactgcttatttatttatatgatagcctattcaaatgagggaagaaaaactgaatttcgaagtgtttgttattgtcttaatattcccttgaagattcttattaaagcctcgaagtcataattgatttaactttaatttttgatgatttattaggtcagatcttggttagaagaaatattgcctggcatcagcagttctgtattttcttatataattggcttggatagtctgaaagcaactagcattgatgatgagacttcatcttcagcggctcgtaatgatgtaagattgcgtatggatggattatttgagctgaaagaacatgctatcctatttactagagagtttacagcattatatacgaatggaccagctgggggtggtggtatcaggtcaagtcaagttcttatcagcttctgaacctacttcccaagttactttgaactttgacatttcttgatgattaattatagttagattcatcactagtactagtagcaataaatcttggttctttattatgacaattggtttcctgtgctaaaaagcgaatgagaagttttttgaattcacatatgttgcccttgacgctcatgaagttagttacttactgatcagtgtgccttgtaatatcaaatcctaaagacatatttaatagggattgacctttttgtattcaccttatattatgagatttgtattccctgatatctgattgatcattttccactgactatttttatatttgcttctcattacagtgttggacacaagagagaggtcattcttgaaaaacaattggtaatactctctctaccatatatcatatatcatatgtcattctctcaatttttaaatttagtacttgatatctcctttttccacaccacaatatgaacttccgagttgtgtttctctgtttccgatcattcaggtcgatcgtgaacatgtttcttggaggacatcagtaaagcgcactgtagaaatgaaatcaaatcattcaaaagttagctgtgaaaaccatataaaaactcctgtttttcatggatccatagcagatgtttcactttctgaaagtgacatctctcctgctccctcaggccaaaaaattccactctatgacatagcacatagcagggccggagacaaagggaatgacttgaacttttccattatcccacatttcccttctgatattgagagattgaagttaatcataactgctgagtgggttaagggtgtagtctcggctctccaaaactacccttcttatctaaatttggagtcggatgccatcaacaagagaaaaaagtggcagaatgaacattttaaggtggaagtttatgaagtaaaaggaattcattctttgaatgttgtggttcggaacatactagatggcggcgtcaactgttctagaagaattgatcgtcatggaaagaccatctcggatctgatattatgccagcaagtagtgctgcctccttgatgaggttgttccaagtttttattttgtaataaccttttgtacaatcaaattaattttaataatgtgtattacaacaaatgatcttagctgattctccaatatactgctaggtaaggtagagatatcaaccatattcatctttgttatgtaactttgtacgaggtatatgcatatgaatctatataaagtttttatagatattatttacgtatttggactacgccgtataagggtcgtattgtattaaataataaataacactatatttaaattaagcaatgtattatattaattattacgatcaaattttttaatacaatgtatattatattatttaatacataataaatggttcgtattagcttgtattataatatttacaaagaatttggggtcaatatcaatctccgacccggacttgggacagagactgggactcggattcgggtccagacctgaacctggacccaggacgtggacccggtactcgggaccggacccatagttggtgttgaaatcgagtgtattaaaaatatattataactttacacaattaattaata

SEQ ID NO: 380828 - DNA, 8120 bp, Cannabis indica
tttaagaacttaacagacatccacaaaatgaaaatagaagccacgaaaacaatttaatttgttgacaatatagtcaactcgaagctatacagcctgtataattgtactaagctgcagtttttacataagaaagatagtgaatctgtatataagaagatgacgggaaattatcttaagttacagcaacattaatccacaaaatttggaacaattttctactatatcaaaatgaaaaatcccaagtataagaagacactttggaagactatagaagagaaaacaaacatatacagctccaagttataatgtattgtgtaagaagtgattttaacagataaaattagatcatttctgcattgagggagctaacagctcaccaattgcactttttctggcttgtttatgttaggaccacgacgaattccacccttgttactagcgccatctgtaacagatgcagctgagaatagagtttcgagttccgatatatctatttctggagccctgcaaaacatgtcatgtgagaatgcaacatcaaaagtggaaaagaaacagacataaacttaaatgacattacattcaaaaacaaaacaataggggaaagaattatttggatactgacaaaatggtttcaacatgataatattgagtatcacggccaagcaatcttgaaaggatgcaaatgtttgctaaaagaaaattcaccttgactgattgtcttgtttgtgagaatcagcccataaacttccttgcattgcccgagtaactttcacccaatgtagaggctttaaagaagcttttttgggggcattagccgcaacacttgcacccttacttcttccttgagttgttgatccggaagagacttttcctttcaaaggtggtggtggtggtgcacttgattgcttagcccctggcagtgggggtgggggtggggatggtgcaacaccatgagttgaccgtggaggagcattagggagttttggtgcaggaggtggaggtggcggcccaggatctggcagcacctgaaggaggtgggggtggaggtggaggcgcagatctggcagcacctgaaggaggtgggggtggaggtggaggcgcagatctggcagcacctaaaggaggtgggggtggaggcggtggtctagtagtattaccagcagttggtggaggtggaggcggtgggggtgctttaacacttttaccagcaaatggagggggtgggggtggagggggtgatggtgatggtgctttagtagtaccaccaacatatggaggaggagggggtgggggtggtggtctagtagtatttccattagacaacaatggtggaggaggaggtggaggtgggggtggtggtagtttgttagcagagttactattagatggtgggagtgggggtgggggtgggggtgggggtctagtagcattactagttggaggtggaggtggaggtggaggtgatgacctagtattacttccaggtggaggtggtggaggtgacctagtattacttccaagtggaggtggtggaggaggtggtggaggacctttggtagtatcaaaagatggtttagtatattccttattgaaggttggtggcggtgatggaggaggtgacgacgacggtggtcttgttattgatgttgacgttggagataatggttgttgttgaggatgtgagtgagagggaaagggtgattgagttccttcacttggaaatgatgattgtctcgattcaaccatcacttgatcaaaagatgaaggaattgaatcaactgcatctagtatcaatggctttgcagaatccattgaagtctttgaaacaatatcaaaagtttcatcagtactatcagcagtactagatgcattgttttcttcttcggagtcaccaggtgaagagtacaaactggtcttattttgaaactttgaaaagtcttttgcatcactcatgatagagagttgtttaagtaaccatagtgcagcatcatcattgccatcaacccactcaacaccgttgaatagttcttgaacccttgaaaaagcttctatgggtaagccacctttttcttcaccatttaaaattactgttggagccctaggtgaagagatgttctcaacgtccccaaacaacacctgatcaaattatcaagtaatcaaatggactgctagtacttatatctacaaaatataacttaaataattagggttaccaacatatgtatctccaaaagtataaaactctatggctcgaagatttcaaggatccattattttaatcaatatattttatctcattccttctagatttcaatcataaatacttaattacctctgcccgaaatccttttggataccgctcctttgagttccaaagtatgtccaagttatcagaatttaacattaatatgtttgaacgaatgaatgcagtgttgaacattatgcgaaacatcataacttctctttcagaatccaggtctaaatggacgcactccatcacaacatctccttgaaccaagcactgaatgtcaattttgatcacatcgcagtctacctgaaaagagaaaaaaataactcaaaactagaggaacattatgaacgttggaaaaagcaaagaatgtgaagcaacataggtaaacaaaccataacaaaagaagcctcacctgacagtaatgtcgcagagtcttctttttcgacatagaaaatacatttgggtagtaaccccaccttacttaagagattcctaccaaaaatacgaataattggtctacagccattttgggaatcaaagctaggaatagctcgaagaatgatacagtctaaagacaaagctcgctcaggaggtggccactctgaagttatatttcttcttgtcacatactgaagataacgaagttgagatggcaacgggtttaaaggtgatagcagctgcaagaaacctttgggagcttctcgatgaacaatttgaagagtcttgcgttcaccactgttaatctttttgaaaatcagaaaactagctaacagaaatgccaagagtggccaaccccctctctcacagtgtacaagaataatattctgctcattcccaagtgacagccaattatcacaaacacgaagaaaatgttgaatcaaagccaatgggagaagagggcaaccctcatattgccgaggatagtccataacggtaacatcgtattcacatagtattttagcaaattggcttcgcttttcaccatcgcgaaaattgaatgcaaggaaagatgaatcggggaattcttcatgcaactcattaatgatttcgtgcaagtatatttggtacaattcctcggtcaagacttccgttgaaaaacacgaatcgaaaactgcaaataccataaaagaaagagaaaaataaacacagaaatgggaattaatagcatccaaagtcaaatagaaacatcaatctaagagcaataacctcacattaaataatcttaataccatatactcggtcaataaattccagcaacccatctgggggtctcttgtaaaagaatctactaagaagagtcatttcctcaaatagatagcatatgggtgatcaccaataagctagctaagacctgaaaggagtaagaatctaaccgttaaaccaagctttacctttcagtgttaatattattaatatgtacttgcctatgtcactccaacaaaacaccaacttttcctataaatttaaattttcttcaaaagtagacatatttcagctcaatgaaaatgagaaaatgaatatattataaaatagaggagaaatttacaaaatcaataaattaggttttgaaacttccaaccttgtgggatgacaccacaaacaacatacacgaccgtttgggcaatgcccttctttgctaagaaaattttcctttcatctatccttgttgggtaattgaaatctcaaaataaacaatggaaaaaaaaaataatgcaaaatccaatctttccttcctaaccataaaaagttaatttacttcaataattatataaatataatctttttcatccctaattacattaaattagacaaatgggaaggagaaatctactccattaccatcaattactacaaaattgttcaagaaaaagataccgaaacaaactagtaagctaacaatattctcaattccacctcttacgtgtatcaaacgcaataaagccaaacctgaaaaccctgcaacatttgaaacacaagggcaagaccaaaatttcacaaaagacaaagctttacatcaattttcacacaaaagaatccacaaattccatcaaatacaatacttaaaagcataaagaatttaataagaacaaaatcgtagtaaataccagaatgtaactgaaaaaaataaataaataatgggttcggttcaaaccagaaaaaagccacggtcagcttcgctgcagttcagtccaagatgtccggcgaagatagtaaagaattaagataaaatccaaaaaaagttaagagagaagaagaaaatggcggtcggaagtgtggagaggagggaagaagaagaaggcgttttgtttgtgagatttgaaactatcaaagctttctctctctttctctttgtctttgaattttgatataaataattaaattaattaaaaataataaaaattgggaatttgaaaaacaaaaagctccaaatattttgtgatcgttgtgactttttgtgtctaacatgtcatcacggcgcctcatattcttaaaataaaaattggataatgtcttttttatttttaaggatttattatagggacggatgtaatgtagttccgacatggatggatgaagaaggtaaaaataatttttaagaaagctaaaaaaaaaatgatacctaaaaatgattaagttatttttgaataacataagagtatttaattttgttatgtagtttcgtctttactggtatctgtattctttgttgtttcaatcggaatagaaggacttcatcaaaaatctataattatatgttgattagaagaagaaaaaaattactataattataagtaatttttaacaaattaaaagtacataatcattatttttcttaaaattgcctctcactattatgtatttatgtaattaccggcgtcggcgttatttcattctgaataaatcaacatcaaaacagaacagtacaaaaaataacatttaaaaatgactaaataaatcgtttttgaataaattaagtcttatttttttatgtagttctgttagtgtcaaaagactcaaaacgatattattttattcaaaataaaagaatgttaatataaagcagcacatcatcaaaaatgtataatataagtacattttatgtattaaaattttctaattacattcatttagaaataatattatgataagtgcaaatgtcaacaagagcatgaagccaaattcataggttaaaatggtccaaataagtcgtaaggtgtcaggttaccaagagtgtgaaaatttacctagtttctattcttgtgtagaactatgaacgtagacttgataaatggccttagtagaatgtgatcggtgcagaaaacacaaaggtaaattaggtataaaaacataccattttagcttaggacaattaatgagattaatgactcacttttgaattcttataaatagaagaacgagagttctcatttttcacacagcctaagccttcgatcatagcttgaagaagaagaagaagagatcgagatagttgtaagcttgttcttataattctcttcttctcctaaaaatttaatcatctttttcatgttggatctaagttcttggtattgtgtttaggctctcatgaacactgagaacacactcttaactctctagggtttcgaccaattgatcttcaagggtgttagactagttttagtctacttttttttaccgttttaatctcttttatcttcttgtgaatatacatttttggagcaaaattatacttgtttttgttgatttcaagtttatgcaatacacttggataaatggaagtgaaaagcaagagtttaagctaagttggagcaaaaaacacatcaactggagtaaaattagagtcgtggcaccactgatggtgccatggcagaaatagtgccacagcgggatatacaggcgatgtggcacgccactacaacaaagaagactgccatttttctattggtgtcaggcgtcgcagcactagtgttggcgtcgtggtgccatcgtccgtacgcgtcactaaattttaagggtaattttgtcttttttgagggaggaagagagattttcacttttaatctttgggaatcgcaagttggagaagggagactaaaaagaatcctagaaaaagaagaagataaagattggagcaaaagttggtgaattgtgacaaccccaaactagtttcttctcttttctcttataatttttttctttgattatgcttatgtctgaaacaactatggatgtatgtatggagattgtgaactaaactctttttttttttaaggattttaaaggatattgtctgagatttcttatgaactaatcatatttggtgtttcttccttccattattttgtaatttatttatatttgtgtttgatgcatgtttgatattgatcgccttaatcatgatttatgattctaatataaaatctaaaaagtgaatattagaaatgctctaattgaataaatatagtttctgatgcaacatgaaagtatttacatagcttatgtgacattaaattattgcttaatgcggattacttgtttaattatcttaaagatgtagtagttattcttgcaatttagtacattaatgtcctaataagagttttggtaaaaattataatttatgatcaattaggaggaaggagaaaaactaataggcattaataaaataagtaatctaagaaattaaaattttgtccctaattcttcgaactttatttaattgtttatttaattttactgttttcttacattctattatcaagcatcagagttttaatttgtcaaatagacacgaagattcaatttattagtatctagctacagttcttgtgggattgacctcactagcatgagttattacttgaaaacgtacacttgcgtgtctaatattttgcaacaaatttttagcgccattgtcggagaactgcattaactaatattaacgaagttgaattttattctaatttttttttttcaattcttctaattcttttatgtcagtttttttcctcgtctcacgtataggtagtttatgcgacgtcaaggaccaactgcacaaagtgcctattaatcctgaaatagagaaaatttgtacacagaataaaatgaacaagacattggaaagagttgctcaaagagaaataggggttgaagtagaagaagtgatggctaataatgggggtgtagtggaagaccaagctaatgggaagaatccaccaaccagaaacttgaggggctacgtattgcccaccatgacaagggttcagtcttgcttcagaccaccgactgttgatgctaataattttgaaatcaagtctgtcattattcaaatggtttaatccactatccagtttgggggactacataatgaagacccaagcatgcatttatctaacttcatagagctctgtcagacattcaaaatgaatggagttagtgatgatattattcaacttagattattctcattctcactaagggaatgagctaagagttggttggtgtcattgccacctaactcaattgccacatgggaagatctcatgatgaattttctctccaaattctttcctccaactaaagttgataagctgagaggggagatcaatattttttatcaactagaatgaatcgttgtatgaagcatgagagagattgaaagactcgatcagaaagtgtctacatcatggaatagaaaaatggatgccagtgttgggatttatgccctaaaagcaagttattggataatatattatagaatacattaaatacaattataagataaatgaatacattaactataaaagtataattaataaatatctaaaaatctcttattcatatgtagaaggtataatcttgtaaagat

SEQ ID NO: 380829 - DNA, 7816 bp, Cannabis indica
aaagtttggagatacaatttgataaatgttaaagtttagagacacaatttagtacatagacaatatagtcacatttgtaaaattgaaataaatttaacagaaatttttcaatctaataattctcataatttaataaaattattaagagattattatataaataaactaccattttttagttaaaaaaatatattatttttacgtttaattttttttaacgtttttataattttctataaaaataacaagaaaactacctaaaagtaacagaaaaataatacccgaataatatcaaaacaaacaaaaaaaaaatttatacaaataacaaaaaatcaacaataaattaacaaggatgcaatataaaaatactgtattttttataaataaaatcataataatagtaaaaatatttaaattcccatataatcttatttttgtaattgtattgtttttatgtatttgtaaaataagtacatgttataggaaaaaaatcataattttaaaaaaaaaaattatcaaaaaaaatacatgccaaaaactgacacgtgtgactaaaactgctcatatgaaaaatttaaaagaaaaaaatgaaataatgtctcagttctgcttctttattttctcttcagaaaaacccattcttaatatttttctttggcatttggaacctacaacaatctcttaccagttctttttctgctaatttaaggtaattttgggaacactctgcttttattttgcaaatttctgctttagaacccactataggtttaatttccatttgaaaaaaaaaaaaaattagggtttcaatgtgcatttacatatgatcatttttttgagttttgattactttttcttatattgactaacagtcagggttagatagaaactatttccatttttaacaaaatcaatagttataatgtgaagttttgatttttatttcagatagttcttttttggggagggggcaattttctgatactgtgttgaaaacatgatttggatcatcatgttgtgtctttagtatatattattctctacttggaacaatcaagtttgatagaaaaacttagttgatgatcatggcaaaaaggatgagcttttgtgatttgcctgaggaaataattgagaaaatcatgttgtgggtgcctgccgattctctagtacaagctaaagttgtgaacaagttttggtattcccttatttcgggtttgattaacgacccaaaatttgtttccgaccacctcctcattgccaaaaaccagtcctctgcatccttactcttcaaatggccttcccaccatgtcgatcatcgcttgatcgcatacaaattgttgactgtaaactatgatgatcgtggtgaggacgatcctcttatgtcagtctcagaacctctcagtatacatttgccagaacttattggtgatgaaagctcttggcattgtagttatcactgtgatgggctaattttgttagtaagtgatgttggaagaatggcgttatgtaatcccgctttgaaagaattcatgtttctcccacaaccaaggaactttataattgaagggcctcctagatatcctaatggtgttgtggaatttggatttgattctgtaaacaatgattacaaatgtgttgtcatttggtgccataacaaatgcaaagttgaggtttacacaatgagttccaattcttggagagaaatcaacatgcctcaagagatagtagacattataacgtctaatgttctaggcaaccctttgtattgggaaggagtttgttactggttggggcatgatttagacaattattattatcgagtgatcctcagttttaatttgagtaacgaggagttccatctcatacgtttgccacactttaaatcttgggaccttacttgttatcgcattgagtttgtggcgtggaatgattcagttgcgctgtattggagagatgacagaaagaatattcttcgccttttcacaatggatgttgctgaagaaggttctgattattcttggaccaactatgagtgtgttggaccagtgggaaaaatttggtttgagcagccaatttggaagaatgatgagattctaatggaggtaaagaaagatgggcataaagagttggtgtcttttaacattcttacccaaaaggtaagaaatgttgtttgttgtgatcaagattttagcagggatttaaggtcaaggcaatttttctttgtaaagagtctggtttctcttaggaggaggtgaagttggattcaagcaaaattgtaatggtatgttactaatatctttatatatttatttatatcacacctattgatctttgttggaatgattaagttgtaaaactggaacagagattgtgtagcacttagactaagtattttgtaagtaaaagagaagatgtattttctaagttcgattaggataattgtttttgttttctttcttaaattcttttccaaactacagaatcagtgaccaagaatagtgttcaaaacactacccagagagagagactaatgttccaccaaagtgactaccaagagtagtgttcaaatcggtggtttacatttcatgaacaaaatgtaaactagactaaaacttaaaagaaaaggcataattggatcaatccacagtgacactatccaaataaattggaggctaatacatattaaaaaaatattcttttattttgtaattatttttatataatttaagaaaaaaaataaaattagggggccatactcttcccttagctttctcacttcaacaaaccaatgtcaatcttctaactatttgagtaataatttttcacaaattatgtgcctcgtgcatgctttgtgttccttgaataacttacacaataatgttttctcaaactaagaaagatgttcattttttaaaattttctacatacacatggatttactttccatgcaacattctcacttttaccaactaagtactctttctaataatttgagtaacaattagtcactcatataaaatatttcttaataggtattacctatctatggttacttaaaaaataactataatgtcaattttagaaatattaagccattaatttttgatccaatagcaataaaaaatgattttttatgcttaattttagctacataattaaaaaaaatatacatgtaataactgcatagtttaaatatgggaattagtggataattgaggatttaattgttaatttatgattatatatttttttaatagaaaataggacttattattagaaataagtcttaaagaaataatttttctatgaagattttcttgaattctaagtgtgctatatatgttatatataaaatttgacttttttatgttttatgcccaacaatcctagagcctcgatggattggccaatagtgttacagttgtttggtttagtattttagaatattgagatagtgagttatgactattttaccctagaattagtggttatttagtagttaagtaatggcaaattagtcatttgccatttaaactttatgtaattaatttttagtagatttatgtagattgtttgggttataagctgaatttatagaaaatatagaaaatgctagaagcaagattaactcataaattaaataattgtatctctcttcaacctttctctttctctaaattctctcttctttcagccctaacccaaaccaaagagaactaaggaacccaagagtgttttcagactaattcttctctttttcagcaagaatttaactaggattcatgaggaattgaaagattaattaaaagtaccctaagcttcttctcctccttgaattttgaaggaatagagggttggtttttatgtgtgaatttgagaattatttctgtttgagtttgattgttttagaaactgttttaaagttcggtttatggtttattatggctggttttaaggttttgtagtagctatagaaggttggagtgagtttgagttttagaactcaagctttgctcatttgtggtgaattttaatacatgttgttttagatgcttttgagttgtggtttatgtttagaataccccaatatgatgttctaaaatgtttggtagctagttttgggtagggttgttccgtgttcgtagtgcgagtggtgcgggtttaagttattttttcaaatcaaaacgcatatgcagtttttgtaatttctcagaccgcaaccgcaccacaaaactttaaaaattgcaaaaaactacatcacaaaaatacagtatattgcggtgcggtttaggcggtttacactatcattattatcaaacattaaaataaaaattaaaagattagtttaatacaattttaacaattaaacaaaaaaaattatcctatcaaactcttaacgtcataatatatatactaatcgcgtactgtattaaattgtctctaaaaaattatataatatacatatatattacatattatatatatatcaataataataggtcaataataagttagaaaaaaataaaataatttatatggatgttccttaaatttaattgtatggcttggactttgtaagcatataatgttcatatataaaaagacaagttataatataaaattactatttttgtaatatatagtgtggtgtagtttgagccgcgattattaaatttaaaaccacaccgcactgtgtggtttggtaaaaacacaaatcgcaaaggatttcaaaccatattttttgtgcagtgtgatgtggtgcgggcagtttgtgcgatgttggcagtttgatgaatactcttagttttgggggcttaaaaattggaaattttcgagcccttgctgcctagagaaaaaggttccggatgggaggttccaaatggaaggtcccaaatgggctccaattgtcagaataagggacttccggatggggtttttcgaacaagggtctttcaaatagggtctttcggatagggggcttctagacatggggcttccaaacaaggatttaccgagaaggtcaattatagtattttgaccataatttttcactcgggtgtctattttagacgttctttatactgttttaaagcttgtgaaaagctcttcagtatggtacataagttagagccaaattatgtattttattttagggtattttcaccaagtagttcagtagaaaaccctaaattctacacgggtattaagaaatgctttagaatatacacttatcagttttacgctattgtgacttaaggcctataatcgtcaagcaactttttccactcaggtcgactgacatacctgaatttagaattgaggtaagattagtataatagatatacatgcatacatatttttatgtttgtctattatataacatatcaataagagtggtattgatgcatatagaattgcactggataccaatagacatatgttgggcaatttagtaagtgtggattgatgatatcacatcagtaccattagagaactgagtataggctgataatatggtcaatcatactggatgcggtttatatatattatctaatagtcaatcataggcatttgtgatataatttctcaattatgaagattttattgaattctatgtttgtcatgcatattgattatggattttattatttgcatattttatgtccgatgatagtggaatctgaagatttggctattagaatcacatagatatggttgagtatcttgaaattagcgggacaagttatttggacatttagaatgttggaattgagcggggttacgagttttgaccattttacccattgactttgagatttcttatgtgggaagtaaaactattttggtatttggccttaattttattattatttttgttagtggaatcttagaaaagaaagtggattaagtttttattcagctaaattaaattaagggataaagaaaaagtaaataagttaagattaacatcataaatacaatcaaaccctctctcgtcacacctctttctctctctcggttttggaagctccaagaagacaatccaattctgacctacttcaaccattttagtaagtttcaacaaggattttcagtagaagttaagaggaaaattgaggtaagccctagctcttccatttctttgaatgtctaaggtttaagtttggtttaagatgtgtttttgtgattttgcttatgtaaaagtttgacttgttgaggagctgttctgggagtttgatttaaggttattggtgttgatttgagttggttttggctattgtggtgagagttgagcaagtttgagttttgaaactcaaagcttactcaacaatgacactttttgttcctgaggcttgatgatgtaattttcagttggattatgtttattatggtattattaggtgttctagaggttttggttcgatttgggggtagaattgaacttggaatacagatttttgtgtcttctgcagcaaagcagtcatcgtttcttaagaaattgtgaattgtttccctaagcagaatcccaagaaaacggtccaccggatggtgtgattttaagagcctcatttttcatgatttctcgatttttagggtattgccacgctatttatcaatagagaaacttccggttcttagtttaagtcctcgaaagtgagttagcgagtcgcttacctgttttgcataattgtgacttagggcttcagaatcgttgaacattacttccactcgggttagttggcacacctaattacggaagtgagttaagattagtataaaggacgcacatatatatacatgttgtatgcatgcattatggaagttaagctagttctaacagcactagtacattagaggtattgagtgcatatggtatagggactcaagctagttctaccaacactagtacgttagaggtactgagtgtatgtggtatagtaactcaaactaaccctactgacactagtacgttagaggtattgagtgcatatggtaaaaaggttaaggggttcgaattaatcctaccaacactagtacgttagaggtactgagtgcatgtggtaaggagattagtggaacttcaagggggtacaaactatttgtactcttgttaagaatgttcgagactcgtatgcgtatgacacgtgataattacaatgtaattgggtgtctgagtgcctaagttacagagacatattatatattatgtttttatgttttttttaccgagtctgttgactcacagatatctgcttcatgtgcaggtaaaggcaagtcaaagactaaataagcggtgagtctggagctcatgattaaacctggagggtcagatcttcatgacatcatgggctcagttatagtagtcgtcgggccacacattttgttgtaatgttatttgtaaatgtttgaaaaatgaattcaggatctcagagtttgtaattttatattttatttatatggtgaagttatgtttattataaaagttttgttaatcacgctttttaataaatcctttgattagtaaaggcttgtatagtaattaaaaaaagcactatagcgtgcgtaaattaatagagcgttacacaatattcaccaaaaaaacaagtacaaaaccccataataagaaagatacccgatttcatccacaaaagtattttgaaaaaaaataagtgagaaatttcgataaaaaaattagggtttatgaaatttgaagccctaaaattgaataatatactagtcctaatgttaggctatttttagcctaagttttgggtcacattttatagttgtttttcttctttattattatttttag

SEQ ID NO: 380830 - DNA, 4121 bp, Cannabis indica
tctgtttcagctttataagcactttgaatgattatatgttaatggacctttgttactgctgttttcctccgccataagtgaggatcctcaataaatgagctgtaaaagcagtccaaactggtgatacatcaatgtaaattattaggtttttcacaagtgggtcattctatctttttcatctatgattccaggttattttttttgcttaacatctatgatttcaggttagaagctgcaatgcagaggcttaccaatttatgctcgattttgaatgatatggagcccatttgtgttttgaatcatgtctttgtcttgagagaggttaatcttacttctattagtatctttttctttttctaaatttctctacctgaataattgaaaaactgtgcagtcatgttattgtgactagggtataattacattttttctgtataatttttcttttcaccatcctcttattcttgtttttatcaaaggaatcaaaacaaattgtctttgtcataggaagtttgtttgttatggaatgtctctctttcacgctagatttgagtttaatcaagcaataatttacaaagacattgataatacaattgcctttctatttcatgataagctgtgtgttattcttgccttacctgctgaaaagacatttcattatttgataggattgggttggatttttagctggctcttaggacgggtgctagaggttttattggagaggacaggtgcaagcttataggatagtttgttagtatgggactataggcaatggagacagctggatatataaccagtgtaagggctgagtggaaggtaggaattgtgcgagtagaactagagattagctctgtggaggttccacgtcccttgaaatacctgtgtaatctctttctttgcattttgttccacagccagtaataggaaccttaatttgtttctctgttttgggttataactggttgggtgtataactatgttccgtcatagataatcaaaggtttgactgtgagcgctctgccatgatccaacttattagacagaattggcttaatttaataatacagcaccaagcagtaggaatttggaggtttgataagagacagaccatggatgggtctttccttatgtacttgtactttccccaagtaataatacaagtagttctgttcttttttttcctattggaaagaagaaaaaagcagataagaaacaaaccatggggtcatgtgaaacggtaaagggtaccatatgttcaatggttagttctggcacctccagtaaattttgaatcatctcctaaattttctgcaagtttctaattgcactttcaccttcaattcaaataaaatgttcaacttattccaaaaattttctttgccaattttaaagttatccttcctaaaattgtaattttgcaataaaattcctctataattatatgcagtacatgagagaatgcatcattgggaacttcaggaggagaatgcttgcagtcctgaaaactgataatgatctgcaacgaccctctgttttggagtcactgatacgcagacatatcagcatcatccacctagcagaacagcacatcagcatggatctaactcagggtattcgagaagtttttctcacagaggcgttctctggaccagtttcttctctgcatttgtttgaaaaagcagaagagcatcatacaggatcagctacagaagttgtttgtaattggtacatagaaaacataattaaagatatatcaggtgctggaattctttttgctcccatacacaaatgcttcaagagttcaagacctgttggtggatactttgctgactcagtaactgatctcagagagttaaaagccatggctcgtatatttggtggttatggagttgacaggctagacagaatgttgaaagaacacacagcagctcttttaaattgcattgacacttctttgcgatcaaaccgtgaaatgttagaggcggttgctggcagcctgcattctggtgacagaatagaaagagaagcatctatgaagcagattgttgatatggatacagtaattggattctgcgtccaggctgggctagccctagcttttgatagagtattatctgaagctgcaggagctgtgcttgaagaaggtgcacccttgatacactcattactagctggaatagttaagcatatacctgaagaaatacctgaaaaaaaggaaatcagaagaatgaaaggggtggcaaacaatgttggtatagttagtgatcatgattctcaatgggtgagattaatcttggaagaggttgggggtgcaaatgatggctcatggagcttgttaccatatttatttgctagcttcatgacatctagtatctggaacacaaccgcttttaatgtcgatactgggggcttcaacaacaatatttattgcttggcaaggtggaattttgttttattattatttcttttttttctttttcattattactggaatggaaacatttaagtgattcatgatgaacttcaataatgcctgctaagtttttcacttttcagaactagaatttatacttcaaatatctcattttgggtttcttaaataagagaacattctctcctctaccaattagtctaatttgataaaatacctcaattgtgatttcttggcactctcatcaacaagtaattagaagccaaactggattatttgatgcatgtgttcagttattgttttcgcactaaccattacatttttcatcaaatattgcacaggtgcatcagtgctgtcattgccggaagtgagtttgttagattggaacgtgaacatcagcagagacagtctttctcaaatgggcatgtaggtgagacagtggattccgaagtacaaagccgcttgtcagcagagacaaacataaagtccactatgctgctcttcatcaaattctccgcaagtgtcatactagattcttggagtgaacctaataggtatgtgatgagggatccaatctatgtaacacacctgtggatttcgatatgaaatattcatgtttaactatcagaacatacaaattatgagatttcattttctctgcaactgctttattattcttcacgactgcacacagaatatataaccatttcagcttttctgcacagatctcatcttattgcccagcttattttcctagaccaactttgtgagatttctccttatctaccaagaagctctctggagccccatgttccgtacgccattctccgttcaatatacagtcagtactactcaaactctccttccacaccacaagcattattactcggtgcttcaccccggaattcacctgctctatcactttcgcatgggtctcctgtagtacggcagccacgtggtgacttaactcctcaatatgggggtaatgattctgggtttttcagaggatcgtcatcacatggtcctgatcagctcggagatactgacaatggaagcatacggggtgttgaaaataaacaccggaatgttcgccgctctgggcccttggattacagctcaagccgaaagacaaagtttgtggaaggctcagcgtctggtagcagtggtccaagtccattgccaaggtttgcagtgtcaagatctggacctttagcgtacaagtagaaatataaccaagatctgaaatgagaaattatgagggtgaattaggtatttgtggacgataaatatatcataaagcatgtatattcaaacaaagttttggcaacatgtgtacgtagaaccacttggcctcctccccgtagcaggttatgtatattatttccatttccagttatattttttattctctggtccctttcccttaaacataggcaggtgtatattctacctatgatgtacaagctatagacaatgtgtgtaacatcaatcactctatatatatatataagcagcttcgtaaccaaagagggggatgtattattgaaaccctaaggaaaaattacttttgctgagaaatttgtatcgcttagtattttgtacaagactatatttgttcagaaatttatacttaccaatatttttgccaaaaaattacaattataagggttttattattattattatt

SEQ ID NO: 380831 - DNA, 2946 bp, Cannabis indica
gcccacattatctatcaaaaaatttgtacattcctggtcaatcagatacattttgatttgatttgattttaatttaaataggcgtccatcttgatttgagtgtatttataggccttgggattacttaatccgacttaactatcttttattgccaaaagtacaaataccctagctaatcctcttgtattagacaaatcttattagtactcttttttccttgtgatttttttcccattagggttaatttcttagtaggggttttaattatgctaagctcttttaaagagaaaataaataaatgaatatgcaagatttgttttttaaacaaaataatagtgtaaccaacaccatggtccaaattgattattgcataaagagaaataaaggtgggtgtgggattgaattggagacctaactttttagaccccctttatgttagatatattaatacattgatatataatatacatatttattaataataaattgatggcatttgacattagcatattccacttgttttatttggcaacttggtagcaaattcatttattgtcaccaccattgccaatattaatttataaatttaatgtatgaaatttgacttgacttctagttaatgtaatatacatctgaagtttctcaaaaatcaaaccttcatggaatggtcatccttaatttgcaattaaaaaataaaataattagttcttatttttcttattgattcccacatccaaaaacccacttattaatttttcatatataagatatatattattccttttattaatttatttaatgggaatctaaagtaactaaaataattcatagatttctggttaccattttaataattatgtcttcataaaaaagaaaaaaaattaaagagtgttttgttcaataaaaaaaattgaagataataaaaaattgaaattaaatggttaaaataaattaattgtacaaagcatacacatacacttgcatgcaactaattagagaaatgctaaagagtaccagtggtgcctagcactctcctatgtgtcagtatcgctattggtctaattaagtatcgggtctcatatagtttaatataatagtttttaggaagtattgctagctaatcgcaacgcgacatgtcgagaatgtagtgctagacaccactggtgcctaatagtaatactcaactaattaatatgtacctaataaaaatgtttaaatatgtaaagtgtttttcttcttagtttagagtttcttttatttatttatttttgttaattttaaccaaataatattattattattaattatcatatataatagttaattttaaaataaataaatatcatcttaatattttattcataactttttcactaaagagtctaattttaataaattagatacgtacttagaaagataattttgtataactttgtgaaatagtatttttcagattaacattatttaaatataaaaattagttataatttatggatttattttattacaaaaattgtaaaaaaaaaaaattaataaaactttaactacatttttttttttttagctctctaactaccacggtaccacctaatatagtttccttaataataattatttatttactttttcttcatccattattgacttaataattaatttcaaaactaatcaagcaaatacctttcaacacgtgtagttatcttttttgaagccattaaattattatacgacacgtttttttttatattactttgcatatatattcatgcaaacataatatcctttacaaacctcttataataatcattaaaatttaaatatttaccttccatattaaattatactaatagacacgattttgtcccgtatttttacggaatgtatttcgtaatgtatgacagtcgttagataagtgagttatttgatctgagggctggatttgatctaagggaaattagggttaaaaaatagtaacgtaccctgagactcatctagtataccacgatatacattccgtaaaagtacatcatgggacaaaatcgtattccctactaatataatatctttccttcaaaaaaataataataatatactatctaataatcttgttaaagcaatacaaatacatttttagaattttttatcccacaattaatattttttttttttgtaatatcccataatattttaataagttgaaaaatcataaacaatatatttttgtaattattaactatatattttagtcaaatattataatagaaaattgatatctagctaattagcatttttatatattttaaatataatttcgaatagtatatattattatatctatggtataattattagactatattttaagatatagttacttagattatataattatataatattattttaataattacactaatttaattaatttacaatgtaagttttaaaatactataaatattttttttttttgattgtatataaaatgtcaaagcaacaaatccaagttacttggacaaaaccattttattatgaaaatagttgaaatatgattgacttgccttgaagttaataagaaactaataagaagtgaaattgtagctttgatagacttatacaacacttttatcttatattaattaattagtttttattgtttatttgtataattacttaagttgacttgcaatgaagtttaaattaatttgtttttcagccatatatatatatgtggtatttgaagatcataatttagtgaacacatttttgaaaaaaaaaatacaaagaaaaaagttattaattaattttagttaaataaaacaaaaattaattgtggaagagaaaaataatgtacattatatagcacaacttgttagtgaatattattttggactattatttttgttaaatgataaattagattttatattttctaaaatactataa

SEQ ID NO: 380832 - DNA, 5304 bp, Cannabis indica
ataattagaaaaataaaaaatctaaagtaactcacacaaaaagtaaaaaaataattatttacatgtaatattaattagtatatacattaactagtactagtatatatatttataatttcaataattcaattcaaaaaaattctcataatgttatatattttttagtaattggtgaaatgcttaaatctatacatatattatattattttaaatttaatttcaaaatttgaatatccggaagatccaccataaatatctatcatcgatgtatcattataaatacaataattatgatgagattcgtagtcgtctagggtttttatgttgttatcatctttggtaaataattcgtagctagcgtacttgtagattcggcttcttcgtttacaagttaaaacaacaactacactcaagtctcaattcataataaaggtaactatttctaactcaacatgattatgattcccatcaatgcaatttttttcttcttcttcttcttcttcattagggcggtgacatgtcagcttttgattagtttaataagatcgagaatagatcctctcgaattcaaagatgaaagttttcgagagtcaaacaatagacaaaggaaacacacaaattaatactaccacacattcacatacaatattatatatattttatatatacataaaagttagaataatatctgactaaaaaaaaaaaaaaagaagtttgggtacaggctttgtggaaagccacaacgtaaatgacacacaccgtgatcctctctacactctactctttctctattactagtagtagtagtagtactcactgctcactgttctctgctctctgctttttgtttagtttaatctctgggactggggtctgcacgtgctctctgcctcttcctctcacgtgcgtgcgttcgtgactcatcattcatatatacacacacacactgtgtttatgtataatgtttcaaaattttacaaattaacagaagctaagagtagaaaaaaccaagagaagtgagaaagagaaagagaaaagggtcttgttgggctcggtagttgtggttgtggaacacttccctatattcgctgtcatcggtactcctcaaaccactgctcaaatcagattcttcctctttcttaacacatctacattaattcattttatatatactacactctatctctactattactactctatttaatttaatattcttttcttatatatattttagattgaattgaattaaaggctattcttttaacttactatacaattaattatatatatttaaagatagacagagagtgagagagagagaaagagtaattcctacacagtcagattagatcaaaacctctatttaatttctttcttattactggaaggaatagagatcttacagctacagaattgccctttggatcgaacagagagaccacccacccacccacccaccacattgtttttggttctacctgtctcgatcaccatatattcaaaccttcaaaggtgagttcttttcagtttttcttcttctttcttctacatggttttctctgctgcttttgcaatgtatataaattaattacatatacatatatacgctttctaatctgatatatagttttctgaaacacatgcaatgcaagctttaaatgtttttcatttggattaacaaacgtacggatcttactcaacactatataatgagtctagctacctagctagttcctattcctatagccaataaagtttcagtactacttgtcattatgtagtatcgtatatcagttactgctgtcatacatattagaattccttttttttttttttggcaaagtatagatatatattagaattcataactctttctcttccactatcattatccatgtcttataacatgacactcattattaaaacacatttagtctctcttatttactatatatatgtacatacatacatacataaatgtatatatatatacatgtatagattaggaatacagacaatatattgaattgattggaggttggactggcatgatgagtcaagcaatgtctgattgatatatagtaaagactactgtctacaataatactagttgttgtgatgggatgtgctatttttagtacatagtataaagctaaggttgaaaatttgagttctgatcccagtgatccaaccaaactcaaatgctcatgttcttgtaagtttcatacaagaaaaatataactttgatcaaatgtgaaatattttaaacacatatatattatatacattattctattagcatgtaacagctctttacagatattaaactagagttgtaatgtaacttgtatacacttgtacaagtggtagtgtttttttacttcttttatttgaagtttgcctcctacaactccccatatacttctcacgagccatgtgattgggtaccctttagtttgactacataactacaacccatgtggaccaaaaaaaaaaaagctttaccccttttgtcatgatttagggaaaaaaagggtttttttgagctagctactacacaccacacaatatttttggttaattaattaattaaagtagacattgataattactctcaatctactttaaagtctaagttaaagcaaaaaatagaaatatttatcctgtctaattaagaatcatctcaccatcatctttaatctagatctcatgattttgatttggacagtgtattcaggggacatccatgacctttcaacaattaggaaaatgatgggattgtaacctttacctttgtcatcctctataaccaaccctatccgagtaactttctatagctttaggccaaactttcttataggttttcccacttgtcatcttatgagaaaaagcattttcaaaaaagtggtttccattgaacaagaatcattaataagcaaaacccaataatatttatgtaaaggggagcttaagtatgtgatcataatgtataagtacatagccaactcgtttttaaggtataagggatgaatggtctagtatgtaaaatagaactattaataaattgttttgacaactcatttcgtatatagaggacagtttgtttttttgttgggaagcattaattgtaattttttatatcttcatatatatatatatttgtgtgtatatgtgaaaattgtttcatcaacttagtcctagtctatctaccttgtattgtctaactcaccctcctattttgaagctcaacatttttcattctttccatctaaacttgcttttccaaaactaccccctccaagtacatattcttgattaaaagcacatgcaaatacaaataaccaaactagaatggcatgtttgttattggccacaagaaaataaaataaaaggaagaaaaatactgccattgtcttcttttggtggaaactcttgagccaagtctctagaatcatatatcaggaccactttcagttcatttcaagtctacttacccagaccattgctctgctgtatgggacaaaagaaagtcgtgtcccctctcaatttagcggctattgggttgggcccatttagagatattattttatatattatcttttataatatctaatgttacaaatatagtttgtatagaattagattattattatagtttgaaataacatatattaaaataaaaactctatataatgttatgattaattacacccggtcaatggtctaaggaatctcatctcagatgtggtaagtttttagttgtctcatattttttagtgagtatttagctacaagtaccaatttctcatcaaccaatataatagtaagattaataatattaatatttttatattttccattcttgttgggctcggttgaccagatttaaagcccgtgaatgttgtcttcctctatagtacacaagaaaacattcatggacgatcttacccttttgggattcactcgctaattaaaatgcatgtagaaagttataaaataaaaaaatcattatttttattctccattttatttctttttacgtataaacttataagaaaaagcctttgaatatgctgagactcagacttttttctttttattttcttttattaaataatttagtaggttttggagtttgaagtcaacaaaaaaaaaattaatggaagaagataaaaatatcaagagtaactgcccacaaccacctcgggtttcacgtaagaatgggaataggagccggaatcactcgagaaagacggaagggaaaacggatcaggtagatggcggagatcggatcaagtgctccggcaactcatgccgatcgtgtgcggcggcgctcatagccgattgcgtggccctttgctgctgtcccttggcggtgatcaactttttcactttcgcttttgtgaaggtgccttgggcggttgggaagaaatgtttgagacgatggaagaagaagaagaatattaagaataagagtaaatgcgagaaaggtcatcgatataacgacagtgaaggtagtgtcgttggtggagagaggtggtggagagaggagggtataatggagatttcgtcgtcttcaggggagaaaaacgacaccgttgaagacagtgtttggatggaattgtatcaggttggtcatttggggtttggcagagtctccttcagtgggattcaaccttctcaggttaagggcaattagggaatattacattagtacgattacgaaacaatgtgtaaaaaaaaatttctttttagtttttttttttttttggtatttttattttacccttttcacttgggtaattgggaaaagagaaaagttaccaattcaaaattgaaaggttattattagtggcaaagttttggatgactttcttttgtattgttgtggaagaatggttgaattagctaagaaccagtcaccaaacgaaggcaacacacattctgtcgttctctgatgtgtttgtgtggctttactgtaaataaaaacccatatccatcttatttatttggcggtattagtgtgagaacttgcgtaattgagttgatttgttttgttaaattgtgatcaaacttaattaacccctgataataggttagtaattgaattaatactatatatatttgattgaaatctgtaggaatttttaagataggattttactatcttgccccctacaccaacaaacaaaaccaatcaagtataaggtcaatttcgacctttccctgttcaatgacttttcaaagtcagagaacccaaaacgcaaacgttttgagtttgaacaaaacccaaggctcgag

SEQ ID NO: 380833 - DNA, 564 bp, Cannabis indica
aaataaaaagttacaagactttttgattaatttgtatcatatatataatttaaaaatcaggtaataaattgggtttagatttatgtaccgtatatatcattgttgacacaattgaaaaatataccaaatctctcattttggtccatgtaaatattttgttgttgatagcaattatacaatgtggatgcaatgtcaccatgtccaaagctcgtagctatgaacaatggtgtcatatcttggcctccatggatcaagaactcacgtctcataattttaggatgaagaaatatttgaacgatgttcatagctccagctacaacagctgaacaaaaggctgtgttaccttttttgtctcttaaggttggatcaataccatcttctttcaataacatttccacaaacttagattgttttgcacctgcaaccaacacatgaagatcactatatattataacacttatcatcttttcaaacataaaaataccaattaatcggtatatgataactaaagtagtatcggctgtcacttgctactatagtgtcttatacaagaaatgtcacttt

SEQ ID NO: 380834 - DNA, 3206 bp, Cannabis indica
ttttcaataaattagagtggggttcggtctaacacgagtgccccctatctcctttccgagaaaagaaccaaagttgtgacaatcaagagaaaaggggagaaggaagagcaattttaccttaatcatactaacaccagatccaatgttgacaaggagatagggaaacaattcattcgggtcgatctgcacaaatttcttctgaccctccatgtgtgtgaaagcttcatgtcgaattgcctactacacaaatcatgttagaatatctaatcaactctttgggggagggggcggggggtaaaaggattcatatgcacaatctgcatatgtatgtcacatgctaagggaaaaaaacttttcggagaggaaaaaaatgctacaaatcaattcaagaatgaaaaccagtgtcattgaaataaagttttatcttcaactttgtaaattcctagttttccgtcaactaccaaagcaaacaccacaggagataaattaaagtttcttattgaaaccggcatagaaattataaagaacaagagataaactattatatagattaaggacaaagaatacagattacattaaaaacaccaatgatggagaaagcccattatgtgataaaatgcaatatataaggaacttccacctttagcaaaaaatttgctcctgcaactaggcaatccatttcatcttctttgtcaagagtaacaccaagcctttgcttgaagaggtcagtatacttgtatgcccccccacctgtggccttttcacaaggatcaacttgtcattacttaatcgacacattgtaaggatataagtatgagctcacaaagcaaaaccgaataacttaaccattaacttataacttaagaatcaacccattaatggtttgttaacaatgaaaatttgactttgtttactcatcaaattatccacttagataacagtttaaatagaatataagtacatttataaaaggttggacaaaatagtagattaggatcacaaaaaggggcaagaacacaaacaactgattagatagtgctatctgttatgatgtattctcaatatattccattcaaagtaaaagataactggccagatggagataacaatgctaaaattatttcatttctcatttctttatttaccatttttttggagggattttagaaaaataaatgtttaattatttgcatagccagtctaattctttcagaaaagaatacacatatataccattaaaaaccaagttacaacagaacaatcattgacacaaaataccttaattatggaattttcattgggtggagcatcaggaagccaagattgtgaatcaattcctgtccaagagaaatgcgacgaacataaataaaaagtaaggaaataaataatgataatgaaaggaaaattcacccagaaattgatgaaactacataaactggtcttttcacatgaattgacatagtaagctggtcatttattttatgctatattctgatttaaaaaaaaaatagaccagagggcactagaagaaaataccaccacggtgaagctgcttggaatagataaagtctaagcactcattaatcttgtgtgtctcaaacttaacaaaatgtagtcttcccccaagaatggggtagtttctcctgttaccattggaaattcccaatctctccttcacactcttcttcctctcatcatcaatagagtattgctcgtgtcttgaaaagtagaccaacttgataagggatcctgccaatgttctcacatcagcttccatatgattataatagtcctcaaagccattaaaatatcgaataagaaagaagacaaaaaaaaaaataaacaagaaatattatatacaaatattccaagagagagcagtgagtagtgacattgcttttggaaccatggaatacaataggtttagttgaaaaccaaatagaaaagggaaaaataaagtgatgcaaataagcagctaagcaacaacaaacaaaataaaacaaaaaacaaattacacagcaattagcatcattgttaaaagtgaagtatgtttattgatactgtcccatattctatacaatcccctttattgaatgttccaagaaccaatcattttcttcaatttaatacatcaaaaacatcaacagaaagtaaaagacataaacaacatggataaagatgatgattatgatgcatacctccaatgtccaaagacagatgagaagagatatcatcagactggttagggagcagaatggtgggatctctctcctcagaattgccttgaatagcagctttgctaaggtctaattggggacgtgaaccagatcgatggatggaagtggtagaaggatgaggaggaggagccatatctctctcactctcaacacccttatcttcagccttagtattgacctcagtgcccagttccttctccctttttataccgtcaattccaagaactgggtcttctcttagaccagccattattcaaaccaaaccaaaccaaaccaaatttcctcactcctaagctaccaaccaacccacaacccaagcaagccaccacaattattggtaaatcttatactctactatagccaatccaataccatttaagacaaatatttagcacaacaaaacattttatgaagaggactatatcatattatattgaactaaaaattggtcatcgcttacatataattcttcttcttatcattattattaaaaggaaaaaaaaataaaaagctttactttaatttgaagctcgatttacaattaaaaaaaaaacaaaaaaggggtgaattatcatacaaaaatgtgaactttataatagtacagtaaaataatggctgacattaaattattacggcaaaccataaattaaaagataaatatctcatcatgagtcatggtcaacaatcaaacaattgagagagaatggttttggcaagtgaaaatgacagctttgaacttaaaaaatatacatagctacaaatgaaatcaaaataaatcaataaatatatagagaaggagagagatcagattttttaggattctagctaaatatttaataatagaaataaaaaatatatatttttatatattaaaagtgtctatctaacggcaattcttggtttaacgattcttgatttaacgattattttttttatacagaaaatagacggaaggttaacctccgttaa

SEQ ID NO: 380835 - DNA, 1390 bp, Cannabis indica
aaataaataaataaatatcatatctgcttaattatttattgattttaaacaaattaatgcttttagtttttgtatattgacccctacctatgagcaacaaattgctccatattcatactttctattattgcttattattctaaagaataaaggataataaataattattaatttcttttaggatggcattaagggataatagtaatttggatgtcgtaaagttatatttgacttttttttgttaaatgataaaatagattatgtatttttaaaataataaaactaggattttaagctcaattttggatatttttttaatataaacaaatgtaaaaaacgtaacaagttttgtcataataattctacattaattattattaaattttattttacaaaaaaaaaatatcagtttagagtactatttaatactattttagtaaatatacgatctaatttatcatttaacaaaacagaaaattcaattagtaacttttacaaaacatatcatctaaaatggtattgaccgagtctaataaatgaaaaactaaaactaatatcaaggacaccaatgtatgacatactaattgagtatcaattttcacacattttagtttaaaataaaataagtgataagagaattatattttgtagtgtgacatattgtacttatcaaaaggagaaatgctaaagagtatatattagaatactcaacatcggtttaaataaatatcatgttcacatatttatattgaaattaaatttatttaaataattgtattaatatttacatgatgtagacacaccatgatcatgatcatgtgtgatagcaatggtgtcaaaatataatagtgttaagagtgtagcaatgaaaccacttgaggctagctcacgtggccataggtgggtgtgtgtcttggagatcttgggttcgagtcccaggtaaaacatgattgtaatatataaacggttaaataaaaaaaaataagagtgtagcaatgcttgttaataattaatatgctacacatgtcaaaaatatatggccttgccttcttgtttagttagcaattcgttggctggcctacagagtacagtccatgcaaaatactaataaataaataagaagatttaatttaatgccctctctatccactcaaccgctatattattattgttgattaattatatattaatattatcactttgggatacaagatttgatttcatcatatatatattcatatatacaaattttggattgtaataataaaatcaatgacatatactatacagcagaaacaatgcatacaaaaagttcatcattataaattgggtaaataccattttggaccttctgttttgcaaaaattaccaattggaccctgtgttttgt

SEQ ID NO: 380836 - DNA, 1669 bp, Cannabis indica
ctctgcaatactaaaattaaattgttcaaggaaggaaaccactcaaaaatggtaagtagatattaagaacctaccttagacatggaagtcaaaatatcagccacaaaaaaatcagaaaaagtgattgcctgcatacacaaaatagatagaaactttatggcaacatatcaaacacaaaacttaaggaaattataaagctgaatggttcaactaaaaaaacttgcctgtagaggaagaactatacggtaaagagtcctcaacaaatagaagcgagttgacaaataaaaaatatcaaagggaaacaccaacagcaacgcaatagcagcatataagagcacctgcagaagaacataggaagtaacttttaaaaaaatattcaaactagtaaggaaatgaatacagtgtgaacggcaatgtcattgtgatagttgatgatgggaaatttaaatgtactattatagttcatgaacagtaataactgcatcactaattgcaacacaattatatttactctttatacaattaacattttggctcattcagatttccacatgcttgattttcataatggatgattcagcactgaaaaatcctatcatttctttgtgagattaccaaaaaaaaaaagaaacaaacaattatgttagttcatatcatttagttctggaaaactacataaacatcttattaaaaaaaccatttattcagtaatagaaagtcctatcatatgtgtaggaaaataataaaaccaaatacaaattgtattaaaactgaaaatggaaacatgataaccagaaaacacataagacttattccgtctcctctttcttaaaccaccataatgctttcttttatatttgagcatactaatgttcaacccaaaattctaggtaaatggagcccctcagcctttttttctatgtacacttgatccaccatagaaccctatgtaaatggctttgctaggaaggagataaactacaagggataatgactccagcatggcctgatgtgtgttaatcaaattatcctagaaactgttatcctacctatgtaatcaacttttcaaattcaggaggtaagtttaacatctgtagttaaacacaaattattcacgtacatttactgattacataaggatcatagttttgacagcactttttgggttcaaagaagataaaaatagttcataaagtagcgatccaggtgagaagaaacaataaaataacttaataatcgtatataagtagatggatgcatctattacactggttgtgatgcagccagtgatacttccccatgcgagtaaagatatagataagccgtcatgctagtgggtacaacaattgtcatccatgtggcacactgcaaaagaaaatgggcaaaaatcagatatcttttattcaagtctcttctcggaaacacagtctgattcatatgtcaaaagaaatagactgctcctttcacaaccggttttatttatatttataataaaagtacagatattgatcctaacatcatcattgataaaaaaaaaatacatggccgggttgggatacttctatagctattattattattactattactattattaccaatgtacttctatcttattattcaactcatcattgataaaaaaaaagcatggccgggttgggatacttct

SEQ ID NO: 380837 - DNA, 3297 bp, Cannabis indica
tggtaaaaataattccaacaccaataccatcaaaacatttgtttcaatttggcaaataggcacctgtaattgaagaagccactttagagcatgaaagatagcctttgcctccatctcatatgattcaagtttccaacagtcggcttggatagagcagccacaacgtgaccatgagcatccaaagcaacaatactcctgctagcatccaaagtagcattcacattcagtttacaactacctgaacatggtggcagccatgactgtgatgcaacaggcaattgagttgtggaggaggaagtgttaacttgtgttgtaggtatggttggactatatttgagtttgggaaatctgaagtttttaagaaaagttacaataaactcagatagttttgtggccgtctttgccctttcgccatgaataatgttattcttttccatccaaatacactacagagtacatataattatttccattttagcctttgtgtgaagtgtagattgatgaacgagataatctccttttgtcatggaagaagaaagatgccaatcaaaggccaaatccaagatacgctaaacggaacgagcatacttgcagccaaacatagcatgtcctattgactcctaagcccgacaacagaccaagcacgtagcatcagttataacctttcttctaacaagatttgtagccataggtagagcattgtgaaccacttgccaagcaaaaattttgatttttgtgtggcaagttaagagaatagaaataacccgaccatgatgacgatgaaacagaggtggaggagagatggccatcttcaatatagaattttccaagtggaaacccgatttaacagtgtaatggtcgaagttaaaatgatgccaaataagaatatccaggtttgagaagaaactcaatgttatagtaagaatcctttccaaattaagaagggaaaaatattattgtagcagaggtatattcatgtaacccctattagtttaggcacgctacagtattttttgattactatgcacacctttgctaatcaaaggatttattgaaaaatatgattgatttaaacttttttaaataaacttaaactttaataaataaatataatctacataactctgagaccccgtccaaagtttataactattttcaaaatatgttttatacaaaaagtggacttaaattgtcccgaagacccaaacacttcaagtctaatcgtcttgatatgtacaatcttcattcagatctagactcactctagttcagttttggctcttacctgcacatgtaaataatacatatgagtcaacagactcaataagaaaagcataaacataaatatataaccagatcataatcggcgcccatacacctaaatataatcatatctcgcattcaacgcgtactaagtctggaacattcatacaacaaaacctagcatatatttgtcagtacccaatgtaactctatcaacatcgataccactcttattgatatgccaaactaatggctttagaatttgcctaacatatatccgtcaatgttcagtgcaaatatatgtacactaatattgctctaactggtatgttatcaaacagaaaactataaaacatgtacatttaacatgtaaacatgcatataattatactagtcttacctcgattctgaatgcaattatgccgacaacccatagtggaaactactgcttgacgatttaaggtcctaagtcacaatttacgtaaaattagttaattaacccgctaaatcattgaaaggggcttcaaactcaaaactgaaagctttcctatcgattgatagtgtggcaataccctaaatattgagaaaatacgaaaaaatgagactggaaaaataccctgaaagaaacaacaaatcgtttttataaaaatggtaaattatttttctgggcttatacctataaaaaaaaacagtaaaccgattctgtaaaaagggtttgccatttttttgggtaagtttcccaaaaagcctcatttcaaaaccaaaccttaaccaaattgtccagaacttcataaatagttaaaacaaacataacccaacagttaagagcaagcataaacccatgatctcaattttaccatggaagacccaagtttaagcttaaaagctcagaatttgctcaaacatgaaatagttattcaaaccagccaataacaacataaattactctaaaattactccagaaacaaaacctaatcatccccaattcatacagaatttaaatcccaaaattgcatgaaaacctaattttctactatgaacatcaaagaggaaaaatcttaccttagcttggctatcaaaatccttggattctaaattgaattccccttgaatttggttttaaaataggtagaaattgttggatttcctttggtttttgcttgggcagaaggtaggaggagagaaggatgagagtttggtttttttttttttttgagttttctttgctaaagaggaaaatcattagttaaattttgttttattcagcaatcacttaagaagaataaccgaaggattaacataagaatccacttatcttcaaataataaaataaaaggccaaataactaactttccctttacttcactactaaccaatctaataatctagggataaaataatctcaaataattccaatattctaaatgtataaatatatctttcccaactaattcttatatacttaaccgcatctaagtgactctaattggccaaagtgtcgtattatactgttgtcgggcataaaatatgaaaaatattaaattttatatataatataaataatacatttagaattcaaatatatctccgtaattaagaaattattttcctaaggtctatttctggcaataagccctaattttttattaagaacatataatcacaatctaataatttactctttaataatctgctaattctcatgatttaaatatgtaatcattgtaattacattgacactcctctgttatcaagttttctagcacaccattcataggcccaacataagaaagaggaagaaaagaagtgtggccttgaatccaaggagccgaaccacttctaaatgatatcccaccaccaattttccaacataaactagtttctaacaactcacaactccataagatatcttgccaagtcatagagggcactacaagaaatcccctcattagcggcggggatactagcggcggagctcctccgccgctaataatgggggtattagcggcggaggccctctgtggccgctattgg

SEQ ID NO: 380838 - DNA, 1895 bp, Cannabis indica
cacaatcagtgaaaaaacttgaccctagacacagacctagctgcctatgcccaaagtgggcctgattagaaggagttgagatgacaaaaaaagataggactcacttaacataagttttccagttaaatctaccaatcataggtttggttttacattctcattctcgaaaacccgaacccccacaacaaacacccgattaactccatttcaatgtaaagtaggaatgaatgacaaaccttggcagcatcattagaatctggcctccgatgggggtaagatggctcgggtgtgccaactctacctgctccagtctgcctctcttcgcggactttgttaaatatgtgagtaaaaccatcagctgatgcagggtttgtttcatcccactccccgaattttggaacagcagcaccatgatcaggctgatatgatacattaggaatttagcagagacaatattagaagcaagtatttacaaaaagctgtatctaattaaggtggtgatcctgtttatttactagaagatgaaaggagtaaacaacgccataagtacctaaagttttaaatctaacgaaattagatgaaaattatgattttactaaaattattgaatttatacaggttacaaaatcaaaactttagttacttatgtctacatgatgagtaatgattggtgaaagccaaatgtaattgataatgaaaaacaaatcaataatagaatcagattattcctaataatggatttttcttttggtcatttttggagtaaaaacaattgaacataagataaaaatttcaactttatgaacaaaaaaaactaaaaagggaataaagaaagaaactttacagtatcatcgctgcgaggtctcaatctagatcttccaggagtaccatggctaccttcataagaactctttccttcccaagatggtgaatctcttcctgcagccctcgcttggcgatgaagaggcgacttttcaatactttgttcggatccaacacttggtcttgcaggtcttccacgaccaccaccaccaccaacacctccaacatgacgttgattcgataagtcattgctggccctacgagcagtgttgttatgatgtcccggggaatttgagaattgccttaaatcattatcctccttgcttctatgcctttcatgagttgttttcactacaacaggctgctctactggtttaccaccatcaacattgcctttagtaagagaagtatcagctgaagatgagtaagcatctggattctcttcgggatcatttggattaatcatcttagcccctgttcggccctttcgagccttgtcaaaataggcggtgtatggaacattatcttcattttcccagttaccaaactttggtacatgtgaccgttgctgctacattaagaaaaagagcttgttattaataataagtgaactaaacaagaaaattctctactcaaaaatgtacaaacctgtaagtgtcatgttttgtgtggcaaattagatattgcttttgttcagtatttgttgtctctaacatctgttctggagttagttgcatctgttttcactaatatcattttagtgccatgtcagctttctgctagtttgttagggtgtgccagctgtactttgctggttggttagttagtctggtttattatctttagtatataaattcgatcaaaaccgttgtactaactaactctcttctgttagaatcttcttcttgattcttgctctgctagggcaacatattttctgtttttgttcttgtttgtgcagattgaagttcgagagatcttcctgaggttgaagatgaagttcaaatctgcttgatctgaagggagttcagattctttgctgaaggtagttcagctgtgtgtttcttgtgttt

SEQ ID NO: 380839 - DNA, 5540 bp, Cannabis indica
aattattattattaaagcaaacttgtagtgtccactgtggcttaggcacaatttttaaattattattattaaagcactctatgtttttgaagctgggaactgggatgagcatactgatttcaaaaagaaatccttcgttggttactacatttgctttgctttcatgtggatatgttctcagctcttaccaagaggtataattcacatagcagtatatatcatttatagtttcattgctctcaattctcttgcgtctggttacttttttttttctcatattgcaattatttgttttggcaggttaaatctgttgtgttgcatacgttgaaccgggcaagattcactgttgctgtagagtccttcctaaagacaggttacatacaatgtgcaatggggattcacatatttatttttttagttgatctatttgtcttttaaacttccttgttttgtccattcatgagagtttcattgggagctcaattacaaattgctgatagatgtcttatctgtgctatatatcacaggacgtgtaccttcattgaaggagggaaacaagaatgaaaacatatttagtttcccatggttgaaagagagccatgtagttcttggtatgttcaagtaataagcttgctgattgaatatgccttttatttgggagttatgagttgctagatcttgatttgaacctgaatcattttaaattgcatgcaggaccaagattcaaagatgcattccaagacccaggggagtatcttgcggtagagcctttctttgaggtgtgcttactgtgtcattttttttatttattatttgtgtgtttgagagagaatttctctttcccaagtctcagcctctatatttcttcctcccctaaaattatgttcagactcatcgatacttttgaagttcttcttgaccgacactgtgtttctcataaatatgttacggtctttgaattgattgatgacagagggagaaatatattgttacatataatccatcaaaggaccaagtatatgcgttgctaaaggaccaggcgaagccagatgacattctgaaggcagcgtttcatgtgagacatgcaacttaatttttgtgtctatctgcaagtgatgaatattaaggacccaatgttgtttgatattcatgttaccttccattacaggctcatgtactttctcatttcatactctcatcatacgggggccgccgttcagcatctcaaaagaggaaagatggtcattcaaacactgtgcccaccacagcagttgatctagaagctcagattgcggagtcatgtaggatagtctcggcatcgtatgttcttttcaagcataaaactgctgagcaggtaaacatcatttaacgtgttagttatagtttatgtcttgattactcctccttatgatttgtttctttatgagtagtcattttatactcatgcctcacttacatctcatgagctaaatagctcaaaaagtaaaatataaagaaaatgtgttaaaaaatgctctatcaagtgagctaaaatagctcaaaattatacattatgaatagtgcattcattcttcaaataattgtttaataatttctctccaattccttattttttgatcatttaatattttcaactttttggtttgtataaataaaatatgttaaaagatgtaatattttaatggtatgatgaaaaaaataaaaaaaattgatgtatggtgtaatattaaagtgtgacgtaaaatagagaaagtgagattttggcgatgctgatatgagtgcttcatttaaagctaaacactgagcttgtgttgctggcaagtaactcaggttggactttagcttcaggtgttaatgtgtttttgcaacgtgaagttcacccagtgtcctttccctgatcaatgtgctatacgtattggaaattgatccttgactgccaccctagcaatttctgacaatactatgtaaccttagaaaacctaaacctaccttcctcatgcctctaatcaagtggataattcccacttgtttggattagccacaacaattttacttatcaagtgtccagttattttgtctttttcaattcgtttttagttactaatgttgcgtttggttgggaataatgaaatggaatggaaagaaatcaatgttcattctatttctttgtttggttgcattttaaagtattggaatgttattctaatgaaatgatttttttgttattttaaaatagaaggaaaaaccatttcaatgtaagatgagataaaaacattagaaattttattccattccattccatttgatttctatttatatttctcattcccattcatattcttgtgtttaacctaatataccgtaccctaattattagctcggtcttctttaaatgaaaccttccaacgaagtctggtccctaataaattttgtaggtacatggatttatcattgtgatgtttgttttatggcaaataaattctagttgatttgtatacgtgatgatttgcatgttatgatagttgcatctctccttgacgttgtgagaatatcaaaatgttttgtagggttggacaatgtcagaatcattacttaatccaggccgcgctcgtatatgttagagtggttaattgggaaagagacgctgaggctgttctatacttggttgaatgcgagttgatggttgggacaaaagcttcggaaggattaccagatccgtggcatcataagaaacatgtctcctatgaagccaatgtgctctcttattcttctcatttgctctttgttcggttggagacggcatgttatactgttttaagagtttagaaatagctcaattgtagatagtacgtgttagtgcatatattacaatttcatattacttgctaggaggttttatttcgagtttatcgccatttttctttttcggctaactgtataacctatacattattgtgttttttttttcagcccataaaacatgatttccgaactattaagtgttgtaaagtgatctttctgtaaagttttgtcatacgatagaacatttatgtggctgtttagtttattgttatgggtcagtacaagtacttgtgaattgaaaaaaagaataatataattttttttagtattagttttgttctcttgttggccgtatgataaaacattggactaaattagtttgagagttaaaatttttaaatagccttttatttaatatctttaatcttttttcacttcacatcaacattatatatgtagtactgtattatatatagaaatcagttttcatcgttaagtttccttgtaagccattctaacattagggaactctattatgagccttgaactccgaatgcagcaaataatttttttggaacaaactgtccaatttctgatgctgtagaagagcatgcatgcgtgttattaacttttttgttttcttccttttaactctgagctctgaagagttgtgcattgttaggtcaaagtcgttcactctattacctcttgtgtcatgtctgtctattgttgtcagcttctctgatttatttagtgttttatatgtttgtttttgtgtttcatatgtttggatgatgttgataatttattagtagtataaaattggcttacatattgggaagttctatagaaggatatataaatatatttttttggctatgtctttatttaggttataaattgtaatttggttaagatttctgtctcatgaattttaatattactaaattacttttttgaatttttcagctgaaattgcttttatcaaaatcttatttataattatgaattctaatatttaacctaaatattaaactatctagaatatgcaaactaaggcataattaaaacatgtaagtatgagtatacttagagtggtaattcagaattatgactcctcctttcaagtcctctaacctttgaattctatttgtagtagcgtataataaagactttcaaccgtactttttctttttgataagtgaagattttattgaaaaaataaaaaaactagtagccacagaaggggccacttcccttaacaaaccgatgttcttagtcttagtaactctagcccaacgagctaaagagtccgcaattacattttctgtcctaggaataaacacaacctagacatccgagaaggacttacaaagagataagcagaaaaaaaaaagagggtaagtattccaaccaaaaggaagttcctgagacgcaaaagctaagacacagtcttcgaatcagtctcaatccgaacctttgttatcttctttgtcaaggctagatgtagagaacaggctattctgcacaattccccttcaaggatatccttaacatgagaaaaaccaactgagatccaagaatcagctaacaaatcctgctgatggattgcagcgaagcctacttcagtccccacaactgaggcatccactttgacacactagtaatcaacaccctccgttgtagattgcagcagaggacatgcagcagggggatcctctgattgaaccaaggctcgtgctttaagaactcgtccattctgtgaagacagtcgaagtatactgcatccatagagcattgtttatctgtaaacagagcagtattgtgcaatttccaaatcatttcgcaaatgcatgttgtgaaaagttggatctcagggttctgaatggtacaccaccacaaaccaaaatccagtagattattccaaacaaagctgtctaactgaattccttttctaaactataagcctctagtgaaagagcattgacaaaacagatggaatgtggactctacttccacattgtagaaaccacaagtgagagtgacaccatggagaactccagttctgaaactttaggggaggatatcagagaacattttccaaaggaacagtttcagtctgaggtggagtttagtcttccacattttttcccaaatcagctttggttctttgaatcttcgtctttggatgatccagtacgcattctttactgaaaatttacccgactttgctggattccaaaaaagaatatcaggactttcttgcagcggtcttatcttcaggatatcacttgtaatatcttcttcaaaacactccttgatcaaagctgcattccattcacgagttccatcaagaaacagatctttaaccttctgttgcccctgatttcgcctaatatacgtggaccaaccagacaaggacacgtggatcaaacaacttatcatacaaaatatttgctaaatccttatgtagtaagacagcatccggaacatgcccccggatacgacatatggaacctcatatgctcccggaagcccaagtaacgctaaggcatctccgcgaggtgtcaggtttcccctgagcaatcaagtcgcatttaatgccgcatgggaggaagcgtgttgggactgctacacgcaataaagtctgacggcacaacccccaatctgcagctacaaagtaatgatcatttaagtctatcgacggctacactgtgaagagtcacatcagtcaaaag

SEQ ID NO: 380840 - DNA, 2884 bp, Cannabis indica
ttagcaattttttaaaaaatactcctgactattcattctttggttcttgagcttctaagatcctgtttagtaattacattaaatcctttcagtctaatacattgatttgtaaattaggattaattaacacctgaaccacgttaaaatctctatctctattacttatttacttatttaatttcttaagctcgtatttaattaatttttgaaattctcgttaaacaaataatattttataaatgtagagcatgaatagtgaatttttaaaaaaaattaaaatagagaatgagtttagaacattatgaagtgtgtttttagtttagttttttttaaaaatatttaaaaaatccactattttaaagcatctgatgtgagtactctaagatcaaataatcttaaaaaacaaaatgagaaaaaataaagcacaaatttaagcccgtataagaaaacaagctgacgaaaataaaatatggcacgaattaaaacacaacacaaatccgaacgcagcacgatacgactcatattcttttatgacacggcacgatcggaactatatttatggcacttgtgtttacaacactagttaggagtaacttgaaccttggagaatcttgcttaactataataatagatcaaatttggtaattttttcctttgactcacattgatcggcttagtcaaatcattaatgtggtttgaagatggatctatcaagaggattttctagaaatacttaagagagaagacctgatgtttaagttagtagatgatgtcattattttatgaattataatattttgttaatgagtctagtattaaattgaaaaccatacaaaattatacatagttttcatcccaaaagttaggccataccccatacacctcctttagaacctcactacttcattaggatcaaactctgttctccattgtgaacgacttctctttccattctcacaacacaactatactgaaactttatgatttgcacatagcaagatgtaagaaattagtagattacataaccaaaaagggaaatccccctattattgttatttgataaagataaattgcaaggataataaagtatgcctgacttaattgtgaagttcttatgagttttttgcatttcttattcaattcatttctttccaaaagccttgcaaaaatttaacatcaaaccattttaagggttaaatagtgctgctaagttcagtaacagacccatctatccaattagatggatccgtggtggaagacgagttagccaaggctgatgatgacattggccaatctgagataacaagcagtgaatgtaactgagcaatgaaattcttgattgcataaaataacatcaactaacttttcaatgaacaaaattcttaaaataatactgtccttattaacactcttactaacactcaaatcgtatggtaaaacaagcccgaaagatcactagagggttgacatttggtggaaaaataaaatggatatgaagtagtagcaacggtgaattgacaacaaaagtttgaagtcattaactaccccatggccatcaaaaactcaccctcacatacaacctcacctccaacatatgctttcccctccattttcgctattccaaagcgtttctgcagctttgtgagtgtcattctcataactaaagtgtcaccagcaatcactggtttccggaatctgactttgtcgattccagcaaaaaagaagttctcccgagaacctcccacttctggttgcagcatcaccaaaccaccaacctgagccattgcctagatccaacaaaattgaatatgttgttttgttaaaattacattacatgatgacaaaatagatcagaatatttcctacaaggacagcaaaaaatttcatttttctaggaacccaagctgcaaaagaaaggtcccttcccattctcttctgatttctactaaagttgtccttaacccttgggttttctgatttcttttggtcatatcatcaactcactcgagtgtatgtatgatgtgtcgctgagcagcactgtaagactattagaacattttcattagaatctctaatcccaatcctatctcacagcattatagttttccacataggatagcctagtactcttccaattaaatttcaaactatttaattgtcttctagtagtggtgaagcccagcaatttttgttcttaaattatgggagaactgaggacaacaggggcaaaaaaacagatctaagagatccaatttttaaaatgacaccaacgagttcaacagaacttttacaaagcctggatccagtttttaaaatgacatcaagtagttctgcaaaacttttacaaagcctttaggccaaaagtacttataatcattaaaaaaaaaaagtgacctagattggaataccattgcactcaagttacacttcataaaattgctgattcacaaaaagaaaaggaaaaacagcctacaaaggtataaccaacagttcaatgtcagtaactggagacactgcacttctctacatgaaatatgattgtacttttaaaacgcccaggctactatcaattgcaaagcaaatcgaaaaagaatctagagaggtaatgccaacaaatgtctatgatcacttgatgttggttcctaaaaaaatgaatgaacctctatagaaacttccagtatctaaaattaatcacttgatgaaatgtacaaagacagaacaagaaaagacagggcttcatcacatcattaatgtgtatttggactaaaagaaggtaatgttcggaatggatgctattcttgtggtatatacttgagcaatacaaaatctatatctaaaaatggaacaagtatgctctaaagttaaacagtgatgcaggaaagaa

SEQ ID NO: 380841 - DNA, 2019 bp, Cannabis indica
cccaaactccgcttgctcacggatcgcctccgccataataggagtccccaccagagccggctccattcccgggcaaaggggtaggacctccttgggtctagcatccctttccattctatcgcgaacaacaatatcctcagcttccaacacagaaaagccattctcaatacgtgaacccaaccggagccaaggcccaaatagagggaccggtcgtccatcatccaaagtcaacagcctcttcttaccagaacagtgcatttcctcgtgaccaacccaccaacatttgtaacaaaacaatgggagtctctcatacttgaaataaacccaaatcttcttctggccttcatcgggtagagaagcaccgaccataagaggggcctcaaggtcaatacgaacccggaatcggagataatcattaagaaggacccctcccctcctggtaggacaagcaaaaacacaagtgcccaaacgattggccatagtaaccacccctgcatcagttagaaaacgagtaggaactccaagagcccgaacccagatatcagtatgtttaaggtccgcagactgccatcttccatcttgtggcatctggcaaacgagcataaacccattacagggagaccaaggggccattcgcagaatcgcttgtgcttcggaggccttctgcaacctaaacacaaagattttcctctgtttgtccacttcttggagacgccatcctctggtcagtttccacatacccgacagaacactcctcaaagtaccattgaaaacacctcttttagcaaaaaatcaaccaaccagggacttagcaatggtgtccgctgcagtcgattcgtctggttctatttgaagagcaaaatcatcaaaagacaagttctcaatttcctccatcacttcaacaatcggaatcccctttgaagaaacacccacccgagcctccatacgaaccggaaaactaagcacagaccaccccaaatcaccttcgcactcactccgtagccaaacccagggagaaactaagcagagaatttcaagattttgaaaagtgaaggaggatcgagaatacattacctcactaacggaggataggttaaaaaacccaggacacctcagagggtctgcaccaccactccccgccatcggggacgacagctgccaccagtacagagcctaacgcgcaccaccactactcgggtacagaagctagtacggagagagttttttatataggcctgctaatttcaaattgaaaggaaatagatgaaactgagcttacatcaattggttgcagggtgacatttttgtgtattaatttaatactgaattatataaataaatatgttatatatgtatataaatcaatggaatttctagttagatttttgtatttgaattttattttcgctacttaagacttttacccgaaattgtgtcttcttaattttttaacctgttaaaaaaattcactctaaattattcttaaaatatatctttagttaaattttatttcatatggacaataaaatgttgatatgattgatttgtcattgtcatatcaacatcaatatcaatattacatgtgcaatttaaaatttaaaatgatgtatctttataaataattaataaattagaataaaataaaataaattttcttattaattgctaatttcaaaaaatcaaattttaaattttaaattaattttaatttaacttatatatgttagaggtgacaaaacgtgtcatcgtgtcgtgctcgtttcatattttatgtgacccgctttttatttcgtgtcaagcatgtcgacccgttttttgactcgtgtctaattatctcaaccctaacccgacccgcaaaacatcgtggcgtgtctattattgaagctagaattatagagaaaaataatagatttaagctccattagaaaacttatatacatttacgtatactagcaaaaagctacgtgcaaggcacgtatactatattttatgctaatttttttctatgttatttgaaag

SEQ ID NO: 380842 - DNA, 1386 bp, Cannabis indica
cttgacattcaaagatctatttagttatccttttggaagcatcgctaaataggtatctagatgctctctttgttgggcccttctctcgcctggatgagatgttcttccaaaacccagatgacccaatttaatgagtttaattcattatcctgactagggcctttgctgattgaatttggatcttggaagtacacttgtcctgctttcggaaacatggataacaaaaaaactaaaaaaaaatgaaaaaataaaataaatataacacttaatgtgtaaagtgtaacttaaaaatttgagtatttatgagtaaatatttaaaattctattaaatttagtaatttttttttatataattgttatcttaaattttgcactctaacgtggcatcacccaacggtgacacgtggaatcaatttcacatatttgctcgcaagggatatgccaagcagagcaccatatatattcgagcggacgaagccttcctaaccgagcagtgagcagtccgaacaacactccaacacttagcattttcaactctcacatcgtgaatcacggaagcaatctctataattttgagatcatatcacagagatatgccaagctgtccaaatcccttgatcaatgtattctgtatttaatatgtaatcttgccaattatatctattgtaatcagaagggaaactcttctctcaaagcgtatagccctataaatagtgatctactcccactgggcaaagggtcgaaaaatttatctaagaatagatattcagagatattattgtaagagctctaagaaaaggaatcatcacattctttgttcttaagtcaatataaatcaaggggagtaggctattaccgaactgctcggggctgaacctctataaaaactttgtgtcttcatttatttcactatattacatatatattatactacttgtcgcttacaactatgattcattatcgttggccaaaagcaaggtcaacaataattatctgtaaaatattattaaaaaattatataaaagtaactgaagctataaaaaatatatatagtttaataattagcttattaattgtaaaaaatatgtgaaacagtaacataccaatttgagcctaatatgaaaacggaatgacttattgagaaaaatgagctgacgtgagcaaaatacgacacaaattcaagcatgatacaaaaattttgggcctatgagtgtgttgtacctaccttataaaaatatgagttttttgcggctaaatactctcaactatcactctatttgcacttaaccttcaaagcttaaattttgacggtaaaactctcaaaactactgaactgcttacaaatttaaggtgctatccatttttttacagttaattgccaatata

SEQ ID NO: 380843 - DNA, 2308 bp, Cannabis indica
aaaaaaggactttacaaaattgtttctgaacgagaattctccattgtggtcggacggacctacactagtttaaccatttgaactcagtactcaccccatgtaactcaaaccactgttgtgatgcattgcaatacgagcatgttaagagtgaaaattgaggatttgggagttctttagtatcatcaattgcaataacaacattttctccttagggggttgagaattgttatttatactcgtttaatatcataaaagaaagaagcgattcactggtaacagcaaaataacagataatgatcacaaaattctgttttggtttttggttttatgccttttattcttggctttatattcttactttggccaaatctgttctcatcagctttttgtaaacttgatactgtaaacaggtaccctgttcaatcaggtgatgcaatttggatggcaccatttgtacctcaatggtaagaaataatacaaatctttgtctaagtgagatccaaaagtttcttttctttatatatttttgtttttgccttatatttttggccaaaaatagtagtgtgtagtcctacccttggaccagtcccgttctatcctggagtaatatacaatatagccaatgcaatattaattttaaagtacttcaatagtattagtactacaagttactccataaaagagagggacgatatcctagaatctatgtctatattacttcaacagtattatcatggaactatatggttaaaaagagggctatatatatatatgtttataaatttccctcaagtgatttattttgtaacctttttcaggtatgctgcattaggcaaaacaaggagccggtatttgctgtataaagatgtaaataggaatccattgtaatcacatcacatgcatatattaaggtttgtttgtaactgagattagtattccaactttaatggctaacaagtatggtaatgtaccagggcctgcccattctaatggcaccccaactcataaaattttttattttctttcttactattatgatcacacttttttctttaataatctaattttaaacactggtacctccaaaaaacaaaaacccatgtttttgtggttgaagaatttctaagctcagttttaatttagttgtggtggaatatagtgtccaaattgagtcaccaatttgactggagtcaatattgtaccatcaaaaattgatagaatctatgtaccttccaaatagccaaggattaataattccagccactacattttcttttaaaatatacaattatttttcaatataatatttatttcataagaagtgctaaggaaattctctactacattctctattctctcatgcactttcttatgtatatttgaccaaacacagtgctcaaatattttacattttaaattattataaattatcattaaaggctgtttgtaattcaattgtttcaaatttagagtctcaataacaattttttattaccattccacagtaattaagctaaatgtgactagaaggattaggtaagacatgtataaataataataataataatgaaggaatcaataagatgctaagctaaaatatttttaaacaagtattctcaatctggttgaaaattgaatcatttgctgccaagaaaatgaggaacattccattcgtcacaaaacatgaggcaatggatggcttatatatattattgattataaaactagattaagttttatatagtttttcttgtccttttaagatagtagagaatttagaatcctttttctttatataagtaaagctttgtgttttatttattaatattatcatcatcattaccaaatgccttacattacatgtttatttgtttagtgtttactaccaatggcaaatataatatggtgggcatatggataattcaatatgtgtttgatacgtggcagctaagggaaccacctaggatgaatcatttgtgggacatacataaatttatgagaaatgccaaagggcgtactaagactggttagtggttatattaaaattttaaaaattttaattaatttggatcaaaccatttgagatcgaactaaataaattcggtgtgaataatttgatcaatccggaccattttaaattttttgttttggtcacgattttaaaaatttcagtaacagttcaaactaaatcaattcgtataattattttatatatacgtatgttgaccgaggttttcggcaactaataaaataataatgatttaaagagctgtaagaaataaagagggagattttttacgtggttggg

SEQ ID NO: 380844 - DNA, 4596 bp, Cannabis indica
gttgtttagtttaaagctttctcatttaccaattttaggatgccagaccatagttatctggatttcatttatttttctttggttttttcagatttgtttctttgtttgtccaaatgggtgcctgggattttttcttattgaggcttattttggttgatttggacatttttctttaggcttctgtttatcatcaatagcttgctcaaatggtgaatccaattttgcttatgttttggggtcactttcaaatgatttcataggaatatagatggcattatttggtaaaataataaagcatggattttttttttcctcttttccttctggctttctaagaatcttaagtttcatattcttcccaattctgaatgatttattccgattcctatccttatttgtttatttccttttttttttcttcatattatgatgttctgtcatttgctcttgtattgtgtgtacttatttacaaaacaatgaaatgattagaatcatatttgtgtaagttgttctcagaatcaatggccttaattctgtcttttatgccctcttttcaggtggtattgctcttgctgctggcattgagcaatgctgttaaaatcaatggagatgagagccatggacaatgtaattacaataagcaaactttacaaccaagaccacacagtgtatccatttctgagtttggtgctgttggagatggtaaaacattgaacaccattgcctttcaaaatgctatcttttatctcaagtctttcgccgataagggcggcgcccagctctatgtgcccccgggtaggtggctcactggaagttttagtcttacaagccatctcaccttgtttttggagaaaggggctatcattcttggatctcaggtactcctactactactactaccacttgttttgtaccaaaaagaaaaagtacttgtgatttgatataagatgtttatgaatcatttcttatacacaatttgcattcctgtttgtttaggaccctagtcattgggaagttgttgatcctttaccatcatatggtagaggtattgaaattcccgggtcaagatatcgcagcttgatcaatggatacaatgtaaaagatgtggtcataacaggtgtgtatttgtctgttcaatcaaagtttttattctcattctatttttttttgtgttaggcaagactaattccctttctgttttcttattaactttactaggtgataatggaactatagatggccagggctcagtttggtgggactggttcaattctcattctttaaagtatagccgtcctcatcttgtcgaattcgttgattctcaatctgtagttgtatcaaatctttcatttgtgaatgctcctgcttatggcattcatccagtatattgcaggtttgttaaactgaggcattaagttattcactctaattctctaaaatttcactcaatttatttggaagttaatttaaatatttatgtaccatttcattgattgaatgcagtaatgtacatgttcacaatatttcagtctccatccctttagactctcctcacactaatggtattgtcccaggtaatgttatgatctcttgattgactctattcatgaactcacacttgattcttttaatggtggtatagttatgttatgaacaatatgtatccaattctatagaacaaatttgaactctgaattttgcattttttcagattcatctgatggtgtttgtattgaggactgcacaataacctcgggttatgatgccatttcactcaaaagtggttgggatgaatatggcattgcctatggcagaccaacaaaaaatgttcacatcagacgggtcgatttgcaatcatcttctggttcttctcttgcatttggtagtgaaatgtctggtggcatatcaaatgtgcttgtggagcaggtccacttgtacaattcacatagtggagttgaatttagaacaacaaagggtagagggggttatatcaaacagatcaccatatcagatgttgtgattaaaaatgttttcgtggcgtttagtgcctcgggacaatgtggttcccatcctgacgacaagtatgatccaaccgccatcccagttttagatcacatcagtttgcagaatgtggttggcaaaaagatcagtgttgctggaatttttaatgggattcaagaatctcccttcacttccatctgcctctacaatatctccttatcaatcaattctggtgctcccaccacttgggaatgttctaatgtctcaggctcttctgacttagtctctcccgagccatgttcggaacttcatagcacaaaaccgaattcaccctcaggttgcttttctttgtccactctatatggaaaagcttcagctttctaaataccatgctcctctacacataacagtttctacagcaagaaaagaaaacaaaaaaacagaaagtttctattgtcaatgccatatctcataagatcaggctcccccacattctttccaataagacacatgtttagattatttgtttctttcttttgttcatccctttctttagtttttgcattatattcttgcttgtttgcaatctgcagatttgtacagcttcatttcttcattcatcatgtgtaaggaaatttttggtagttgatggcaaatgaaaaaaaaaaaaagtacttgttgggttattctatttattacacttgttagcatttttcttaaggacatttttgttattaattaaatcatttttttacattccatttccatgataaacataaacatgaatgacctctcaaaaaagagaaagaagaaaatattcgggtcagtcttatcagattgaaacaaatctagacatatggtactctactttccagtttccacccaatattttggaatagtctctctaatattcattttctttcattgattttatttttttaggtaaaagggtgttcccccatttagctttgtggtacatcatatcatctagtgggtgtgatgtgatttatatataaaaaacaattatagagtgaattggacttaattgtatttgacataattagctgttacagctttggagatggaatataagaggaaaagaaaataaataattaaatacttgtacgatactaaatataacattcgaaagtagcattttataacataattaaaacagagaattgttagtcaagttgacacctggattaattcttatttttaaaacgtcttttcttatcgtataatttaacatgaaatgaattcccattaaaatttaataatagtttagtgttttaagtttcttaattaattaggatagtattgtagtatggtccattttaatataagatgatctagaaagccatagttaagtgaagcggttaattttgtgttcaacttctactttaacgatttttcatttttaacagaggtaagtatttgttattatttataggtctatcttgttaagaatattgagaattttcttttatgagtttattaatattattattaagcagctaattcatatttcattatcttcttttattgtgttgagcttaagcgtgttagctgctatttttataattgtactgtctaaattttacggagatagtttatcatattatggttcacaatcttttgtgtgtagtttttaatttgactaagcatatcatttggttagataagaggattacatctcggaaattcatcagtgattattatgtctaaaaaaaaaattgtgtttttcttaatgaatttatggttgaatattattcttatattaatgaatttgactaagtatatcatttggttagacaagaggattacatctcggaaattcatcagtgattattatgtcaaaaaaaaaaattgtgtttttcttaatgaatttatggttgaatattattattatatttattggttatttattttccataattgttttaatgttgttggtgctaaggtgcatttatagccaataaggttgagaagggggccttcgaaattcgatgacttctcctgtccacaacagtttcattcttattcttctgcagctttgattgcaaagaagctaaaaccaaaatccacataaaagaaaaacagttaatatttgaatctggctatgtacacaaatactcataaataaattaattaatagaaaacgaaattatatacatcgttttagtgtgacccaaatagcccatcttggtgatagtaaaaaagaacctttaacaagataaatttgtaaacaatttcagcaaaactttaactatgagaaaaaaattcttttgaaaagagaaactatatgacaaaaatgactatgccataacagtagagaaaggaaaccatggtgatcaatgttagaattcggaactttaatttaaaaagtaaagtgagaagtatgataattagaagatttcatttcaaaattaattagcgatgagtacaataatacaaaatcttataaaaaataagtttttacacctatgagatgtagtactctttaatattgttccttatttgttctgtgaccctacacttcttcaagcctagatgaaaaaaaaaaaaaacgaaacttacaaaaatactgcaatt

SEQ ID NO: 380845 - DNA, 5519 bp, Cannabis indica
taaataacaaaaatattaacaaagaacatgcattactattcttattacaaatctttacaattttcattacactccaacgccagattaatcgtgtccgatccgataatgtataacattatcagctcatcttatttttctgttctcctttcaaactcattcccattaaccttctctcccacactcatctttcaccatgagtttgaaacctcaaactctcctccccaaaacaacactctttctcccactcctggaatcccactccagaaggtctttcccgagagcaataccctctccactcccacctcttcggttcccccacctccccaacaaccttcattccaaggtgtgagctcatatatataaagtttaaaatttggaattgggataataattcttgtaccactggtctttctattttgtttgattccatgtaggttgtccaagggctacgtttcgatggtccgttaatggagattaatgacattttggaaatggaggacggagaatttgaaatagagacttgcattacgcgcactttgcctccggctctgacgcttgaccaagggcttgacagaatcaaagaagctgtggagaagttaaagctcaatcctcctccttcttccacctctagcggattcttcaggtttcaggtacaattgcatacctttttgtagcttaagctttgttgtgatacgacgtcgtcttagttgagaaatgtttgttgaattgcatgaatgagactccttaatgagctcattagaacaatagaatgtttaagaactgttacaaccgacaatggttagttgattaactaaccaagattgaaacagaaaaaaattgactgaactgatccacaaactactcgtaactactagagtcttcatctgaatactcaacatctttaatgtggatttttgcaggtggctgtgcctcctagtgcaaaagcattgaattggttttgctgtcagccagagtcgtcttctgtatttcctctgtttttcatatctaaggatacgaatgagccgagtttcaagtctctggttttgaatgaaactcgtggggtgtttgggattggtgctgctgtttacttcacgcgaaattcttctggcacctcaggagagaagaatagacctaaaaggtttgtttgtatctttggcttcttattaagcattgtcagtttctaatatggaagaaatagtcgtctaacaaaactatcaacattgaacaaccaagattttttagcatgccagcccttgaactggacgtgatttgaggaatggttcctgaattataaaatatactaattaaatccctgaatgcattaaccaatagtgaataagccccttaggtctaatttttttgactaatttttttatggaacacttgaaaagattgcatggcatcaccaaaataatgcaagaaaagaaacatttccccaattattattattttttttttttttggaataatctctaacatcatttccccaattatttgacatcataatctttttatttctgtctaaaaaagaacaaagtaaaaaaaagaaaacttccatcaaactatgacatcataaataaaaggatgaaatcaaaatctccatttatccactttggcaatgtcatgcaatcctttccataaaaattagtcaaaaaatcacatttaagggacttaattgctattgtttaagaagctgagggccttaattgtattgtttaagttcaggactaatttgctaaatcatgtgtagttcaggttctatcatggtaagccataaagtttgatgcttttcactcgggtgtttctttcttttcattttttaacattgattgcaataagctacatgagacaaattgctattttatttcatttaatagaaagagtgtcgttctttctgtatgagatttacatgtggattagaattttttgtgcaaaataggctaaagagagtgcataattttttttcagatatatctcaaatgaatcatcaccaataatggcttatggttttgtggattttgatttcaacaaaaagttgtctgtcacagaaaatcaggcaggatcttattacttcatcattcctcaggtaaacttgcgatatttcactgcaaccatagatgttaccccttattttagtcgtgaatctttattatattcccattgggagttaaagtttgctgctattgtattttcacttagcagatttcagtattgacttttgagtatattatttatacagattgagctggatgagtgtgaaggtgtttccattttatcagcaacacttgcgtggtgcaactattctttatcgacatttgaagaagcccttaattcttttgactcgtctcttatccaggtaattttcccatgcttttggttacattctgttggaagtttttattatattttagattgatcaatagtatgaagtcatattcagccaggttataatatagaagatgctcaatctatcatacctctgtaatttttcaattgtttggttaaatcttcccctccaaatgaaactgaaaactattctgtgtttgagatgttataaagtttatatactgacttctttagaaaagattatatgtgcataatagattggaagttacaggagatattttatatatagtgtaattcaaaggttatcacaatatcacctcatcttttagtgatttttcaggcttattctcacagtttgcccacagtggagaaacattacaccagaaacttattatcttcgttgagaaagctaaatgtggatgaggacagaattattcctatggtaaataagtatactctatatttcatttacgttttaggaaaattgatttattcttactacaattgtaataataatcagtaagcagtttggtatcagtaagaagtctacctctttttcttcttcttttgcttccttgtgctgctgtattattatatcataatttggttataatccttgaaccaaatgaaagagattaaatttattgttgtagttttagtgctgaacgatttctatggtccagatttctgtagcatcatcttttggacaattttgtatgataatgacatccttcatgaactaattcatgctcttgtttttccccttctcttataccaatataagctttatcctcatctttgtcattgacatacagggtatacattttcattggcaaagggatttgattttaatcttatgcattgaacaagcaaaataacaaatctcctttgatttttagtgctcctagttattttcttttgtaggatgatgtcaaaaaaattgttactctttatgtctccagtcattcttaatagacgtaaaagcttcgtaaagaccttgatctttgtcgtccacatctgtttttccttttcaaaattgcattgtatgacatctacaaaactgcttgaattcaaattgatttgcatgttatgcgttgaattgcaactgtattttctttttgcccactccttcacatgctttccttgtgctttatttacatttcttatattttattatttttgcaatgcgttgacatatatctttcgtagttgctattgctactcagtttcatcacccagttttgcattgtattgttgacatacttttggtgtattcattcatccatttacacgtgcaacacacacacacacacacacacacatattttcctcctcaaatttcattgttttctcataaaattgatttcagtgagcattttcatattatttgaccacatttttctatgatacttcttatttgtttttcatattcctttattgagacaatgttttgtaggtttacctcaacactcttttgccatgtgggaagtatgttgtggatgacctcaaagaactggtatcctctttttcctggtaattttcatcgtcaatgtttttaactccaatctattggaaagagttttagtcataactctcataattgactatattatcgattaactattattattctgtttgtatcccttgctgaaaacatcttggtttccacacattacagagggaagctcaatcttccaggcagttctgtgttaggctttctgcaagcattgtgtttccaataacatggtatgatactttgatcttagtgaaattaaaagggaatgttttacataaaattgtttttcttcaaagtaaggagtatgttatatagatagcttagcagagtttctctatgcctgcctcgggaatattgatgcgcatgaggttttacgttgacgtggaaaaaatggttctgcatttggtttatttgggatgccttgcttctcacatgtaaggggtaattaaataagagaaaagacatatttaattctgactgtgaaagataaataagattatttttgtaatgtggagagtacaaaagttggtgaggcaagtatcttttaagggagtggaggtctgaaagggtaacagaatcattcattacacacattcacccgtaaaatgattttgtgaggatttgctcgaggaattctggtataattcctctattaagtagcatccttttgatttatactgctgtagaatatattgatattttagaacaatagtgtcaggtgaaacatataagtaaagatgtttggattttgtttctttctactagcagctggatcaaaatagcggactcagctactcattgcaagattgtgccaatataaacactgtttgggcatcacttataattgaggaatgttctcgtcttggtttgatggtgagattagtatttcttgacgggtcaaatttttctagtacgtgaatttgatttatttcattttagtatttttgtgtagcccctggatcaagatcatctccccttgctattgctgcttcaactcatccacgcattacctgtgttgtgtgttatgatgagcggtcacttgcatttcatgctgttggttattccagaggatctcgtaaaccagcagtggtcataacatcatctgggactgcagtttcaaatcttcttccagcggtgagtaaatattcatgctctatttaactctgtaaattcatggttttggtactgtcctggtcctctgactctagtgaccataaagttccatcacctttaacttccatacagccttcatacattcttcaaatagaagatgctgcatatcaccagtgatggttgtttgcttaaattgttttgctctgatacaaaattctataatgttcaggttgttgaggcttctcaagattttgtatctcttctattgctcacagctgatcgccctactgagctacaggatgctggggcaaaccaatcaataaatcaggttttacagataattatttcatccacgggcatagccattggttttataaatggaaacaggaaattgctattttattgtttaatcatgggattatatctagaagtggtcccacttgaaatgatcatctaagaagttagcattgtcgcctaactaaaatgcacctaatatcctccttgtagaaaatagtgattcgaattgtgtgttgatttcatagaa

SEQ ID NO: 380846 - DNA, 5212 bp, Cannabis indica
cttcaagctctttctctacatattaaatacaacaaccaagaaatcagtcacaacacatatcaaatcaacaaagttaaaaaaaaaaactatgtaccttggtcaagggaagtagcaaaagtaaaaaaccaataaacaaatctggggtcacaagggatgagaccaaatctaacaccatggccaaagaactgactaaaaagtgactcaaatccatgattattagtgtcaaaattagttgcacatcctctaatggcatatctccctgtatgtaattattgttggcaatactattaattatactttaagagtagttttacatattggggtttatatttatataatggttggtggaaagaactcagtgaagaaagatgatgatgacgttgggaatgacctatcatcactgaacactctgtctagcaatttcaacgacaagttttgcttggattgcgaatctttgaggattgaaatttagtacagtttgttataattattaggtttttgtaagggagtgagtgggtaatattaaaaataaaaaatgctcttaaagtaatttaactagtaaaacaaataaatattttttttaaagtaaatatagaatttttattattaaaaaaaacaatccacaaaaaaaaaaaaaaaaagatactctaacaagactatgaacaactatattaacagattgttgaataaaaaataagaaaacaaaggatacattttcttaattacttactttttattaaaatatatgtttttactaactaaaatatttatagatttttttttcattttttttaggagcaactttcccctcttgcctttatgtgggtccatacataattctcttattcatattgattgattttcaatttcgagaattttgagcatgggttatcatgataatttattttattctagtttgaataattgagggtctctacccaattttaattgaaagatttttgttgattgttattggtaagtattgttattggtaagtgtgatttatcacatattgttcattaagaatataaatttggtatttttcgtattcttttgatgtatcacagctagagatgaatcatttagttagagatgttactagagtttttttcctaaatattgtaaacgacttagtttattatttttgattttgttgaaggaacaatatctgcatgtaatagacatagattatgtttgatttacctattaataaaattccatttacctattaattttaggtaattaattaatattaattttttgtctatctcaaacataaaattaaaaattcatgtataattagtatttaacacattcataaatctgtaggtgggatggattttcgatcccttcaagactttaatttgattattcttacacattttagtcacatgtcaatttgcttcttcttgttggacaaaggtaaatactgctaccatagctcatgttcctgcaacttttggtgcttggatttctcatctcttttgtaagctcgaagatgacaagctatattcagctgctatggtttgttgggaactttggaaagcgagaaacaacttggtatggaataaaatcatctataaatttttgtttatccgatgatggagctgagctatggattaaaccctctactaacacaatcaaagtgaatgtcgatgtcgctatgtttgagcaagatggcaagttcgggttggggcttgttgttaggagccacaccggggccttacaaagagcttgtgaggaggcagaggctatgggagaaagaagctcttagttggatgaagtgtaatcaatgggtaaactcagttattgaaacagacaacatggttactattcaaactattcgcagtcatcttccaatattttctactttcgatttgatcattcatgactactaagaattgctttcttcattaaataatgttagtctattttttgttagacgatctgcaaatcgaatagtacattgtttggctagaagctctcgattctcttcttatcgtagtatttttaagtataatgcttcagatgaattaaaatatttacggatcagacttgtccactcagctcagagaccaaaaaaataaaaattccttttaaaatatatgcaatccttttatgatttttaaaaatatcacatatccttatacacaagggcctaataattaaaaggtccaaaaaatctcagcggtggccatggatagacctacctcttcttctaactccacaattactctttggtggaaaaaaacttttgtctcttaattgtatcctaagtataagtataagtataagttagttttatcccaagacatgacctcctagactaatttttaccaactaagtaaaattgagtactaaagattaaatccttgttgcaaataaatacttaagtttaatttttagcggtattaatacataaataacaattctaaaattgctgtaagtacctagttgttaagtgttaagtaaattatgacgtgacaattcctaattaatctaggtcatgaatttttatttttttaaaaaaattaatttaaatatataaataaaaaaaaataacttgacatttaatgaccacactcatctgcttctctaccggcctcagattaaaggcttcttcaactgcaaccaagatcttcttttgaactcgaaaagcagtggagacaatagcttcatggaaagcgttgttacgggaatcccacgaagtaaaatacaggacactaacatagaccgagaaggacattttaacctgagaagaggtattattgggcaaagacatggggaatcaactatctaagttatttaaacttaataaggctggaatttaaaaaacaatcatgctttattgtgaaatccaaaagataagggaagatccttagattacatgatgtagtagtagtatagtgtaatagtagtaatagtcaagaaagtttgagttttccacaatcaaaactagccttcttcaacagcaaaccagctaagaatttagccaaacatgtatctcttatgaaagtcatcaatttcccatcactttgctggaaaaaaccaactatataagaagtagttatgagatcaaagcttctccatttcctctctttagcatacttcttcaaccccatctcaatcctataatactcttcttcatcacttttcttgttgattgattgtttcattaaggcctcagcaagacaccttgctaaaacaatgccatcttccaaggcacagcagccaccttggccgacatcgggtgtcatagggtgaagggcatcccctgcaacacaagcattgcctttgctgatgtttccccataacaacttaaaggggtttctatatgttaatggggatgacataatgcaatctagtgaagttttttcaatcacagccttaactttctctggcatttttcctaacttgctcaatacaaattgcttcatttcagctggatcattttctctacttttcttctctacacaacaaacatgtaactaattagtactaattttgagtgtacaagttattgttttgttataattaatgtaccttgttgtgaaggtgtccaagtgaaaaaccagtagacagagttaacatcacaaggcaaaacaccagatcttacaccttgaccaaagaactgcatgaacttagggtcaaatccatggcttttgttatagaaagtacagcctctaatggcacatcttcctgtaaatgacaccttccccaatcccaaccattttcccaccactgaattcactccatcacacccaatcaacacctatttaattccatacagttaataagattataagaccatttgttatacatagtttcatatattaacgagcattgctattaggtactagaagtgtctagcaattggctattgatattttataatagttattaaattagataatatgggatacaatacttaattcacttaggtggcgtttggttgggaagaatgaaaatataagaataggaatgagaataagaatagaaatagcaatggaatataatttaaaattgataaaaaaaaaattgatatgcattgaaatggtctttctttccatttcaaaatagaatagtcattctaccaaaatagtggaaaggtcattatattggaatgacattctaatactttaatatccaaccaaagaaagaaatagaatgaagattgttttttccattctatttcattacgtttaaccaaacgtcaccttaatcttgtatagtaaagtattttagtttaccttggtcctgataatggttccatcagcaagatgaagaagcttagagaagcctgaatcctcaattgaaaccaccttagaagaaaacctgatagtaccagttgggagttcatttgaaagagtttccaatagaactttccttactacacacctaacttcatggtctcctctgataatatttatacaaaattaaataagtggaattattgtatggcccaaaaacaaataatacatatatatatatatatgagactcactgttttccattggccttaaatgacttctctgaggtctgaactcctgaaatggtagaagtggtagagatcctgtgaaattaaccaaatctcttcgtttaatgctcacttgttacacaaatatgtatacatattggaaaatattagtgatgttttaatgtaaaaaatttccaatatatgttgatgaaagcagaaaagtcttttattatgatttaagtcgaaattccaaaccatgttactgcacggacaagttgctcgagatgctgagtttaattgggccagtaagaactagagagatggcccaattgaacccagcatctcgagtcacttacccagcatagtacttactagagtattattgacctaattgaattgatagtatgactacttttgacattcttacattattttttcttttttatttaagtgtatatattataatgtataatttgagactttaggactactaatacacacatctttttatgaccacacaagaggtgtttgttataagtaagctcaaggagataaggtgggagagagagaaaaacaattttttgtcttgtttctataatttggattgatggtatgactacttttaaatattaaccagcacaaaaagtaacatattattatgagaaatgaaaaattaatggtgtttagtactctactcgttagatattattattagtgtaattaactattaaattt

SEQ ID NO: 380847 - DNA, 1687 bp, Cannabis indica
gagaagataagacatgtatgcacaggttcgacaatataaaagttatgatttcagctccataattgatattacctgctagcagctggagcaaagccaattgtgtaatatgttagaacaacccatatcctgattctataaggacaatgggatcttcaatacacaaacaggtaagctaaatgcccatgcaggataaacagaaatcccttgtttaaagtaacaggaaggttaaatatggtcaaagccatttctgccatgccattgaacatcacattaatcaacccaaaaagagggcaccataaaacttgtttccatcttctaaactacccacatgcatttttgtcttaaggaacactgtcatggcaattagtgacatgattgttatttgagtacccttgaacacatagacaaaagaattacgcttcatcaacaaccactcccttgaaaaacatgcttttaacagttccatagttgaaataccatatttctctttcaccaatgctgcagggtggacttttgacttgtcataaggaacatttaagtcagcttgaagttgttgtccaatgtggaaagatttgaagcctttcacaaagtcattaactggaatgaatgtataaggttggtccttgtttaaccaatattgttcttggtctttcatagaagttacttcttgtagaaagtcagcaactcctttcctctctgggcatttaaatcccatgtactcaaaaaactcaaggacattttctttaggaccttggtatacaatctgaccttctgaaattaagataatgtcatcaaaaagctcaaatgtctcaggtgctggctgtaagagagagacaaccattgttacatctgagatatgaaccagttgtctcatgtagttgcagatttgaaaagttgttgcactatctagacccgttgaaatctcatccattaaaagaactttggctggaccgaccaacatttcccctgcaagttattcaatgcatgagctattaggctatgatgaatattatattaagatgaagtagtttttatcttataattaatttgtaatgaatgaggtgaactattatcaagttctctagatgtgttactctagcatagtaatgaataccaaataatgcaaaatatttttttaggatgttataggacaattttcaattatatatataagtaaaatgtacaataattaaaaaaaaacaacaaaagaatataattacataattctatataattttacgaatttgtaattacaaataaatataaaatttaaaacgaaattaatatatatatatatatatatatacaaattttgtttatattttataaatggtatatatattattattaaatatttgattagtatgctttatgtttataatattattattaatcaagtatatttattatgatatatttcaatagaataaatataatttatttattaaaatgtcataacaattttaaaaataaaatacttatgtttattttattttatcttttgaataaataattttttttattaaaaggccataacaattcttttaaaagaatgtattatgcttattaattattcaaaaatttgtttataaaataaacgaaattataattaataacagtaagcataaatatcatatttatattattattgataatttttattaattattaatctaatatatttatt

SEQ ID NO: 380848 - DNA, 6467 bp, Cannabis indica
ctcaatagctggattatagattgcctttgtggtggcattgtatgcgaacaaaagtctatcgttttcaaaaaataataaaattacaaatttactggataactgcaactgatttatattgggtgggtatttctcataaaaaaatgtcatagtggtcaagttttgctgattgtactctggaagagtttatagttaatactgtttataagaagttacatgaaaaaatgtgatacttattcatcacttgtttggatgtttgttcctttacccagagttttgaagaaagtcacgggtatagtgtcccatctacccgaagttttgaagggaaccatgggtatcatgctccttcctatgacgaggaagatgaagaaccgtcctctgggagcaagctaaagatgagacttaaagagcttcacaagaggtatgtagcacgagggccagatatttgttgtcgttgcttcattttaatttatgtgctactcaacttcattttttatatgatttttctctttctctctctttctccctccatttcatttttttcagcacaacatcgttttcagcattggatcgcaactaccttaccccattcttcacaagtcaaaatggagacgaagatcacggtaaaatctggctcccttctttttctagttcaagatcttctgctgaccaaacatagcaacattgagatcttctatgtcttgcattgttaaattgcactcacatatgtgtcgtgactttgatttccttttattctttttttttttggtgcaacagaggagctcatgcctagttctagaagtagacgagtgagttttcatggtcatacctaatatgtgatatttcattgaggaacatatatgatgcaagatggagtcaacttgtatataccttacaaacttgttccccaaagcatagctgccaaggtgaactcacagaacacaaaaatgtcgttagtgtcatagtagtggatgttaacatcccaaaggagacatttatctacagcatgaagactgttttagaacattcggactattagttgtcaaatttgcacatcatattgattgactcaccactaatctattacactgcacttgtaaatacaagatttggatacttgggaaatttaatggtcacacatgattcgtccactggatctgagaatagggtgttgctcatatttttgttttaatctttctctttttgtttttttttaatctgttgtgctgcagtcgggttatcattgacatctttttgacttgttctggtcacaaggagtttgtggctcagaggtgtgtttaaaaaccaaagaaagtggttaatgtgtcattatcatgaggaggagcaccatgatctctttaagaaagtggctgttatcttctatttctttgggtattatccttttactaatcgtgtatgtaggtgcacctaaattattttctttgattaagattctttgttatagtgttaatcaaaatatccctcattttgatggctcttttggaggtggagtggactgtgtttagtggagatggaccaccagtgtgcctaagatgctcgagtctctaataaaggggccgcttagagcccatttagatggagatttttgggcttggtcgcttggagctaatgttcatctgactcaagccttatagaatctgacttttctgtaaacagctggaaatagaattgtttagtagctaaactggtgcttgaacgtggaacattatttaataccatacaagcccagtagctagagctaacaataggtttcatttttttcaatttcatttttgaaggaaatacattttatatgattggtctataaatagctgaaatattaactaaaaagtctaaaatagtatagcttgtttggagaggttatcgagtcatttaacttttagtactataaatactcgaaaataagagtctaatcattgttcattgttttttcttttttgaaaatagaatcattttacatgaatgtgatcatgcaagtgtgtgtggtatttatacttgtgcggaaaacacttgaggaagtgaaaataaaaatagaaacgaagagtggggatattttcagctaattatgtttcgatagtaattctaaaaacatatattttttttccttttgaaattataattatatattttctacaaataaaataatatttttgtcataaaataaacaataaattactaggcaaattagagaaatttacaaaaatactgaaatttgagttaacttttataaaaatactatgacaatttttttttcaaaaatactgagcttttataaaaataaataacagtggaacacgaaaaagaacaactaaaaacaatattgaaacaacaaaaaaacaaccgtatagcagcactaaaaacttaataaagtacacagtataaaatttacacctaaagtaaaaataaaaattaaaaatttcaaattattacttaattgcatggatggacccatatacaatatgtaggcaatagcctctagtgaaaaaaaatatcaattaaactcttacaaaaatgtaataaatctagtaagaggtataatctattaatcgaatatttcagattaaagaaaacatattaacatagaatccattccatacgtttattgtcttatcaagattgaagacaaagaaagaaaacatggaaagctaaaatactcgatcacaccttattattatagtaatcgattgaattaatttaattgtggctaatgatttgttttctttcttcctttttctttattaatcgatatatgttgatgttgtttcggtaaacaagtgacacgtaggcagattgctccccttgtacttttcaaaagaaaaataaccgttacaacttcacaacccccacacccaacggctagttttttgttcttctacagactccataaccatagccatcattgatttgtcttcacttacttgcgcgatcatttgggggtttctttcttcctcactttctaatctgaaccacttgattcttcttctcactcgaaggatctcgttcggggtttggttcccttcccgtcaaatctcccgattagagaaaattctttatccaaatcccaattttgcagggaaatttaatcatgggagagttaatggttgaatcggcggcggaagccaccgctgcttatgctcctccccctcctcctccgccacctgctcatcctcggcgacctagggttagggaagtgagttctagatttatgtcacctgtggtttcctcttcttcttccaattcctgcgattcctctcatttcttgccagccaaatccccccatcataaacataatctgggttcaactccaattccaaatcatgcggatcatcaagccagaccacgatcttcctctgctaatagacggcgtaggcaactcgatatggaacccttatcttgttccgacgagaatagacccaccgattctgaacctccggctcaaagtcagagttctgaaactcctttcccacttgaacaggttcccaatactctaagacgacaaagatcttcaaagcttctcaaagagaatatcggaggtagaccatcccatcatcctccgcagcatcattcttccttgagaaatgggtatggaaaaggcggtgctttctccacgcccgcaaggcctgatacgccaatgttatcgactagtttggatcggacaatgtcttcgacggcggcgagatacagactgaaccagcagaggtctgcaaatatcgcttcctcagctgctgctaagctcttgcagtcgagtgtgatgtctttaccttctcaatcctctgatttaacaactcaagaatctaattcttcatcccaagatggtcgttcttctgcgaatgctcttccccatgacggcaatcacaatcgcttgagctcttctgttcaatctctaccggattttcgctcttccatgtccgaaacagatatgttgcctactgtttcaggtagactaaggggggagaaaaatggcattagaggtggtggtagcagtagtgccaatacaagtactgattctctgaagttctcattccctaactctcgttatatgagttcgccatttaattcaggggcagagggtggcgagaaaggagcgaatgctgtctcgaatccattagcgaactcagtgaagatgggggggccttgtctgcctccagtcccgccatgtgctaatgcgaagccggctatggaattaaagaaggcaaagaaagtttctagtcaacaggaagatgtacattccttgaaattactttacaatcgttatatgcagtggagatatgccaatgcaagagcacaggtttccttacaagctcagcaaagagaaactgaggttaatcatcttcttaacttttagcaagtcaattttttattctataggaaagagagaaaccatacaaagactctcatagatgtgtaattcgaaattatgagtgataactcttattaacactttttatgcacttgagggattgataacgagtagtttctctgtgattataggaaaaaaacattctttgagtctttattacccatcaagtaatatctatttcattttttcatgtagacaaaagtcaattctctcagggtaaagatgtcagagctatatgattctgtgacgaggaaacgtacagaacttgggatattgcaaaggactaaaactctatcaacaattctcgaagcccaggtaagattgatagctatgactattggattggcttacatattggaagtactcaacttgcttattattatcgttgacatttcattttaggttccatatttgaaccaatggtctgctcttgaagaagattactctatttctgtggctgaatccattcaagctttagttaatgcctcaattcaacttccacttggcgcgaatgttcgggtatatttttcatatcctagttttcttctacagttgagtaattcctcaattgttagctatactaatgagatataaaccctgtaggttgatgtgaaagagcttcaggaggccctgaactctgctatgaaagttatggagataatagcttcgaatgttcaagattttgtaccaaaggtacagttcaagatctctgatagaggaataaagaatattatacgtgatatattatcatagcttgtacagaacagggtcctttccacataaagaaaacataaataactgctctgcttatgtgcacaaatctaattttccaaagggtatatttgttttggttgcttttatttacaggcagaaagaacagagattcttatatcagaacttgccagaatagctggtggtgaaaaagctcttgtggaagaatgtggagacttgttgtcaagaacattcgcatcacaggtatgtatgcctcaacctactagtagttgcctcaacctacgtatagtagttactttatgttcttattgtttgtgacttcatattcatgatagcttgcgtttggcgtttaagattagatatcttaatcttatgaatgtttcttcttctcttcctgtttcttccaggtggacgagtgcagcttaaggagtcagataattcaattgcataaaacatgtgttagcaaggataatgtcttggtaaaagaattagaagtgaataactaactaatcaccacattccattacctgaggccgacaaaggtgtacatacgcataagatttcaatagcaaaatcgtctgtttgttttttacctcaatttttgtgttgtttacaagggtaaaaaagttgagatacgcagcagccaattctttcattctttgcaaatttctgtcagttctgtaatgatggatttgcttttgatttggagttcttatatttgtaacaacatggcaactttaactgtttgttagatcaaatcgttgcttagataaataaagagataatatagtagtcactagtcagtctctatttttttcatggccaatataagaagttaagaacgaccagaatgcaacaagtcgtttagtgaactttgtctttaacggcaaatatgttcaattttgtttctgtggaattaaatgaaaataataatgagaataatgaatggaaatgggaattgaataaaatttaaagtgcctacaaaaatttgataaaaaattattaataaataacattttaattattttttctttaattgatacatttttttttttggataaatactattttgaacttgtgttttgcaaaaattatcaattagactttctgttttgttaaatgataaatagatcttgtattttttaaaatggtacaaataggatcctgatatgattttttgtcaaaataaaatttaataataattcgatctaaagatgttatgacaaaattgcttctattttttgtatcttttcgtattaggttttatcttgaggttggttatattaaaaaaaatctgtcaaaaattaagttttttttttttaccattttagaaaatacatgatttattttgtcattt

SEQ ID NO: 380849 - DNA, 4255 bp, Cannabis indica
tctaccatcatgcgataatctgcctccacttttgctatttggcgtatggctccataaaaaatatagccaactagtaaagtaatagtaaccactccacccgatgaaagaattgccatcattggtaaaggaggtctttccttgaacctacagcaaaatggaaacattttaacagtggaaaaaaaagtgattgtgtcctttttttcacaagataaatatataaaaggagtaaaagatctaacctgcaatgcatttcatgcttgcgaactggatctccaaagtctagactgctagtgtgcaatagaccagtatcagtaacatcagtaccatacatattgataggcgcagatgcattagttgtatcataaacatttacaacaattgtctccttgctggcaagttggtgtaggagcttttcaaccaatgacgggacatcatatgatgcaccaaggtacctaatagaaaatgtcagcaattagacgagtgtaccttggtgaaatggtacatgtctataggcatcttgaaagttaattgattccataaatatggtatctatctagtgactctaatctattttagcttctgacatacagtacaaaatatatcttagaaattttaaacactagcctatagacatgtacaaaaatttacaaaatctgaactttgacacaaaatagtacccaacagtagcctcaatacgttgctctgccgtagcatcaggtggcagttcagtgtcatagactgcgaaagtaagtactacaccaaggttatttgactttaaaagcttaaaaggagaagtaaggactcccttccctgttgccctggcccgcaagatgttctcacgatcttcctataaaatgataacatttgcaatttagcaaaatcaagatgacggatgatcattagcatatataatgcagacaagaggatgattacaaatctaaatagtgacgagtaatattctccttaaaagagaattatcaaacattgaaaagactacctatccttcagttgaaagcctagtcaaattcccaaattaacagaagcaataggacaaacactggcgccataaaaaaaatcaaatttcgcttaacaccatttagtagtattcttgttcaatatcatcatctcaaacattgatcctcctatctcacaaattctattattgcagaattaagagtttcattttaccaatattaatcagtaatatgtgctacatcaactcttctagatcaagtaacaggagcaactcaataaatcatcaaacacatactgtatctaaaagcacacattccaaagtatcattaataagtattctagtagcaaagaaaactatcaatttgatcagttattatttccaaaaatgtccacggaaagcaaggcaacaaaataatcaatattttttcattgggtacatttgaacagcaaagaagagcatacctttcctgacatcatgtcaatagatacaatgtgggagacagtttcttgagaaaatataacaggtgcatattcatcttcaacaggtgcaggatcaaaattttctggaatacaatcatgtactaaagtctgttcctctgtttccattttctttatggtccatccatgttccttctcaaattgttctctctctgagtgaagaactttcaaagcatatgcgacaccactagtaagcggtctctcaaaagatgttctctctgtatattctccaaatgttttctgccaaacaatgcaggggatcgtaattatttagtatttattctggcacagtaatgttacagctttacttctaaatatagaattgcattgctgtgtgttgtcttaatcttcaaataattttgttcaaagaaaaaaacaaaattgcagacaataaagtccaatgtgtagttatgaatgatgataatgtaaaacatcagcataattagacataaaagttacctgatcaatggcagaaggatgttttccatggtgaaaggtagatacaagtatagctaaagcatgaacatgattcatactgacattaaattgatcctgtaacatccgggctcgttcatcacacatattagatagtgtttccttactcccaaaataatgttttctactgaagtgccaatataggaaaaatgataaggcaaatccaagcaagaaaaaaacgactagaagctttttcctccattttccagcacccctaggaggactatggccttggtgttgctgtttgtgtggctgcttctcttgttgagccagcggtctttcattaaccaatttctgctgttgagacaatggctggtcatgaacaatcttctgctgccaactagctggatgctcagcaaccggtaatgtcttttccctccgtaattttgaagctagtttgtaactcaatataagtccagcaaggaaccaccaatatccgattaacaaatcacaaaaaagctggcactgtttccttgcacaggtagtcaaggctgctgattgtaacacattctagaggccaaaatgaacaaaattagtttcagatcaatatcaagtacagaatctctgaacacaaagaatttagatctttcaacagaggataatgaacacagaaacaatttatagaaacacaagcatgcaagttacaaatggatgatttcatatgaaatagatattttagatgtaatagctgctgtgtggagtgaaaatatttatccaacttccgattaagggaaagtatgtccccatataaaaaaaaaaaccttaaagctgcaatgaccagggcatttagagtccaaataacaaaaagttatatgcacatgttcattgcattatcttcgatattgttatcatacttaagtgggtatacttgtaaaccttttcaagaataatcatctcccataggctatttgacctctacagacctcggaataatgttcaaatcaacattagaattgaagctaattacagttttagatatgccctcagatgattagaaaccaccagcaaaacaatagtacagtataccacacactctgacacacagaaatcagtatgtacatgtttctcatctttcatatatttagaggggggagtcaggaattgttaacataatcaactagcacaaatagaaacatgcataatatttcaaaactaaaaagcacgaattcggcattacattctagtacgagcagtgtacctttccagaaatctgacgcatagctgaaattataagctgcaaagcatgtgataaagatgtgtcctttagaggcgcagagtacagcttccaagggttgctttcctcttgaagatctaagcattgatttggcgatcctatatattccacatcccatttgtgaggctttagtgattccaattcgtctgagcaaagtaccctcatagaacagacaatgccatcacttgacatgcttttatttaatggttctttggtacactccagtgatgctatctgcaaggaacatagaagttagaatagtaagaggtaaaggaaattgataacatttacaacttttttcatcttgatgcttaatttgctagtaagtgtcctatgaaacagttattaattctcaaaaagatttgccatcaatcatttgacaatgataacagaaatatcacaagatatatagcaatgttcatttttggtctgattagaatctgagatattcttataagatctaacattatctatttatgagcagattttatatgtgaaacaattaagtttctttgtttgcagtaataaacagtaagagttataataaaactttacacaccagatagtttgtcacgaagagtgaccaaagctcgtaggagccctcttaagtcctaaatctaatttatgagaaattaggttcaataaactggaaatttggcattgcatgtagtgctaaagaatcctattcctaatacaaattaattcataacagtaagatggacatattggaaaatttggcagaacagctttcaaatcttatcccaacaaaattcaaacaaattaccgtatcaacacaagggtagtttcgacaccaaaaaaaaggaaagaaaagaaaaatgtaactgttggaaagcttatttatttgataggaaagaaagaattttgagatttcattgctttcacttgcattacttttcacaactctattcaagatgggttaatcagaagaagaatatagttaagatatacacatatacatatatgtatgtgtgtgcatgtatacagagagagagagagagagagagagagagagagagagagagaggaggagag

SEQ ID NO: 380850 - DNA, 4213 bp, Cannabis indica
aattgtacattacaaacttaataaaattataaaagtttttaacacacgtgttaaccaactagtatatatagagagaggaaatgctggattcttttatgtaaaaaaagatatttgtccttgtttaaaactgtttacactatgaaataattagtaatttgtaattggattgtaaaatctataaatatgtaattagatacttattaatgaatatagaatgagataataaaattttagttcattcgaaaagtgtaattattagtattttcattgagagaataaattaaatttgaagtgtaaataaaataacaattaagagagtttagccgttaaaaattctttttttttttaagaaaatttacataaattactattttcggcaaattttttacactttttccttttatttatttttatttatttttatatttttacagtgttcataaaaacaatactaaaacaataaaaaaactacataaaaataacaagaaaacaacataaaatacaaatgacaaaaaactaacaacaaaataataacaagagtaccaaaatgaaatctaaatttaaattgacttaaggaccaaaatgaaagtttttctataatccaagtctctaaaagtaaataattcaattttcaaaagagaccaacgtatttataaggccttctccttcttcgtcgagtccgtctgttcaaatttcgcgccaaatcccaaaaccagacccaaatgtacaagcttttccagaccaacaatggctatctttgctctactctcagaaatcacttcagaaacttgagaatcttctcacccatttctcaatttcacgacggtctgaatccgaagcttgattttgtattgggggaaattaaagagattcaatcatcgaaacccgtgacagtcgttacccaatcggaatcggactctgatgacgctcgaatccttacagaggcggagaatgtttcttttgagattttgcacccgtggccggagtgggtggatttgatggagtgcttgttgaaacgaggctacttcgaagggagcggaaacccatttcgaaatagtcaattgggtcacaaagaatcgaaatttattcggactgcgtgccttaatttcgcccgagatcattttaatctcataaggtagtaaagattatatgctttctctatatgcagacaacctgtttgattttagacctgaatgaaatatgacttctttagtcctgtattagaattcagattagagtttcctatgactttgaatggcttaacattcaaatcaagtttctggagagagaatgcatgaccccatggtatgaaaattgagctagctagatgtgaacaaaaaccatgaaatgcttgatgatattagctgagctggagtgagcttttgtatacttgcagaaaattgtggatgatttttgttctactaattctaacatctagttttctactatgttttgccctatattatagctatttgatggacatgaagacttgtttttattttctttctatgggctgtaaactgtaaagtatctcattttttttcaaacagaaaattgactgttatttgagttaaactgagtgaatctatttgtattcctttcttcaggttcttatctaagaaaaatatccaggtcatttctggatgtggatgtccaagtttggatagaaaagttgtaaactcagggaagcgtttgagggcatacgcaggcgtcaatgaaggagatgtaatatactaaagtctttctatacttgtcctttttggttaaatgaacctattaaattaaatttcctaagcaaggtttttatataaatatattagttgattttgatttctactataaggaacagtattttttttcgtccaactaatcttggactgagatagagacatagatatgttagttgctcttcatcatctaatctaatcagtcattttggtagacttgcagctcctgcaatttgaggggacattgtgagagagcttatgtaaaggctcgtgaagatgaaggtgggcgaacagtggatgttatgcgtttcttgttgacatatgggcttgatcccattgctggtacggtggaaaacatgccatgtctaaacaaaatggtcaaagaatcggtaagaacactactcaaagagatggtagaacatagcatgaggagtatgaataccaattacccaaagttaaagacagtagaaaagtttgtaccagttgaagatccaaaaattccacaagaaaaaggccggatacatgtcccaatgaagcaaggcgactggctgtgtccaacgtaattttaaagctctatcatgttctaatttaattttatgttccttaattttagtttcactctgattcaccttattgttattttgtattccagatgcaactttctaaactttgctaaaaatatcaaatgcctgcgctgtgatggtttgttcgaagaaaaactgaagcaactaagagagaatcaggataatcttccattgaagaagggagattggatttgtgacaagtaattgctcctggtgtcatttaacttcaccataccttatggtaatttcttattgggaaattttaatttttgcagatgtaatttcttgaatttcgctaagaacacaaaatgcttgcaatgcaaagagaagcctccaatgcggcagctcaatcaaggggaatgggaatgtccatcgtgagttgttttaactgcataatttgacaacctttacattcggtctctaggttttagtaacatacttataaatgattttatgagtcgatacatttcataaacttatagtttaatgttgtgcttaggtgcaactatatcaatttcagaagaaacatggtctgtttaaaatgtgaccatagaagacagaaggcaatgaattcttcagaaagaagtgaccttgaaaatgtgcggtactgtaatagtagatcaatgaatgttgaaggtgacaatgctgataataatatttgtcgaaacaatagtgcaaacatgtggagatttgtggaagaagagaatgaagaatgtactcatccaaagtcaaagaatgaggcttctggttttgttgattttccaattgctggaggtaagaccgatttgtctcaaaatgcagaaaagagagagagatggaaatcagaaatgctagagagaagcaaaggtacatttaaggccacagaagacgatggtgacgagttaagacctgcccgtctccagagaaggtcagagtttgcatattctgctgacgatgaagaaatggccgaatggttcggccctggaaagttggaaagaaaagggattgttcatggacatgagaaaattcaagattgaagattagatctctcctgtcagattggggtggtcaaccatgaaaagcttgtgaaatcagcattaaccacaacaaccactctcttcttgagtttctaaacccaacggtgaagaaattctattaccccaatggaaacaaataaatgccaaatgatggtaagtctttgaagaactcgattactttaaggttagtttttaaaagcttacacaattttcgtagatgttcacattgagagctgtttctctccatttattcttgtatttgcttctgtttatgagcattttatgcttcaaaatcagagtttgtttcttctttgagttagagcaacagttacagttcgtaagatcgatcttcaaagggtaacagtatcttctgtctgtttacctaacacaaacatacattatttacttgatagttatgttttgacagagaaacttcattagatgaagtaagacaaagtttacagaaaacaatacaaatacaatagtgagaaaatccagaaaagcttgtgtaataataaatatatcataggtttgagtgaaatcaagtggtgatcttaaagaaattctttaaggatttctcatccaattccttggtgaagaaccttcgcaagaattctgtcaaggtaaactgtcgatacaattgcggtttttctttcgatgttagctctggcaaaggaccatatagttcctctcttttacttggatacaagaaaactgcagtagacactcttggttctctattcatattagccaacactctgtgatccacgcttttgtatacatcatttgacataatctgaaattgtgctaatattaggctaaaatgaatgaaacaactgtaatatccagattaaaatagttatttaattttttttttttggatatt

SEQ ID NO: 380851 - DNA, 4679 bp, Cannabis indica
acttagtaatttacgttataaataaagtctaaaaaaatataattttaataaatattacataatttatatttttaatgtgaccattgaatagtcacaaaaaatgtaaccatggttagagttaatcatatcaaacataacaatgaccaaaattaataaactcatacttaaaagaattgcatatttattttctccctagggttttaagaccctagggtttgagtcagttgccatcagtggtagttttcttcctttatggccaaggcttgtcagatcctttatctttatgggtttggttgtggtggggggttattgttagggtgtttgaagatggattctaaataaggatcggtgtcattcgtctttagtacttttgggaggctctgtttcatggttgttgggatcgagatcgactagatctggtgtggggttggtgttggtggatggtctgttcctgataattgtgacggtgtcctaaaatcatcggtggtggtgtttggtttttccttcaatcttctttggtttgttattttcctttttctatgtttaagagggtgtgtattttactattttttttacatccatgtttgacttctagtcctttttggatttggttgaacaagttattctagtttctttttcggtgtcttttgacaccttgttttatggttcatcgatagctaatgtcaagaattttgaacatggtttttcatttattctctataattctagttgaataattggggtatttttacataatttttattggaagatttttagctaatttttattgataggtgtgatctgtcacatgttcattcaagataaaaatctagtattcttcatattttttatgcttcacagctggcggcttataggtcatttagtttaatacgttgttatagtttttgtcctatttaatgtaaacggcttgcttaacctatttttgttgagtatgctcgatgaacaatctctgcatgtaatcaactatgtctactttatctattaatgaaaattctatttttctcaataaataaaataagctcacactatagtttgaaaaaaaattcacaattaaacattagcataattatattttaaaatgtgtattaaatcacactctagtctaataattagtattagtattctaaatttttataaaattatatcctattaagtaaaattttcttatatgaaatgaaaaagttaaaacaggggagaaaagagaagaagagaatacaataaatgcttagtaaaacttgcctcaattagagaaaaaacactttagttatagcaagagagagagtacaaatgtaaccaaaaattctattgtaaatagaattagttagctaacaagattagctaaccgaactaactaaacacaaaaactaattactaacttttggttatcatcccccctcaaacgaaaaggggcagacaccacttttagtttgtctttgagatacttgaatcattctttgggaaggcatttggtgaagatgtctacaacctagtctacagtgggaacactttagagaaaaagagaatacaaatgcaataaatgcttagtaaaacttgcctcaattagagaaaaaacactttagttatagcaagagagagagtacaaatgattagtaaaacttgcctcaattagagaaaaaacactttagttatagcaagagagagagtacaaatgcaaccaaaagtccattgtaaatagaattagttagttaacaagattagttatagaaaagagaagaagagaatacaataaatgtttagtaaaccttgcttcaattagagaaaaaacactttagttatagcaagagagagagtacaaatgcaaccaaaaattctattgtaaatagaattagttagttaacaagattagtaaccgaataactaaacacaaaagccaattactaactttggttatcatcccccctcaaacgaaaaaggggcagagaccacttttagtttgtctttgagatacttgaatcattctttaggaaggcatttggtgaagatgtctacaacctagtctacagtgggaacataatgcacatcaactttccttgttcagctgatcatgaacaaaatgttgtttaattttgatgtgtttgcattgagcatggaagataggattgattgctaaagaggctacaccttggttatcaactcaaatcacatgaacagctgctagcttgacttgtaattcagtgagaaaatattaaagccacttgattttagcagctgtatttgctaatgcacgaaactcaaattcagtggaggacgtagcaactacctgcttctttgcagaccaagaaatgagattgaatgcaagaaaaactacatagcttcttgtggacctttgatcatcaattcagcttgcccaatttgcgcattagagtatgcttcaagagacattctaagagctggtctaagaagaataccattagagatagtacctttcagatatcaaagaagtcttttacaagcttcctagtgaacatgtgttggagcatgaataaactgagataacttgttgattatgtaagccacatctggtctagttagtgtcaaatattgaagtgcttctaatgtactttgataaagggtgacatcttcaaatggagatccttcaataagtgaaagtttttgagatgtggaagtgggactagcacaactcttagcaccctccaaatgaaccttgagtaatagatctgtaatatatttggcttgagagaaatagagacatatagagcttctatgaatctcaactcttaaaaaataatgcactagacccaaatctttaagtgaaaatgcagtattgagatcagtaattaacctttgacattagggcctgtgacaagaatatcatctacataaatcaagagaatatccaagttagaactggctccataaaccaaaagtgcagtgtcagcctttgatacagcaaaaccccagttgaaaagggtagatttgagcttgtcattccatgctcagggggcctctttaagaccatacaaggccttgtgaagtttacagacatgattaagtttatgtggatcatataaactatatcttgaagagtcccattgaggaaggaatttgcaacatcaagttgtctgatttcccattgagatgagacaactaattttagcaccaatctaactatgattgatttaaccacaagattaaaagtgtcctcaaagtcaattcctagtttttgaagataacatttagctaccagtcttgatttttactatcaatagtacattagcattgagtttaactctatgaacacatttgtaattagatgcatgtgaggttcatagggagcaagtgtccaagtgcttgtggagatgaaagctttgaactccttgttcattgaagcaaaccaccctggatgtttgagatcatctttgagcgacttgggttcaattggaaagagagcttttgacaattgatgtttggtagctaagtatgcctttggtttataaatgcctcggtgagttctcaaagggtctggtggagcatgagcaactccaacatgtaaagaagtaaaagcaacatctagtttagaatgatgatgttgggatgttacagccactgtggagggagctgaatgagaattagacattgcaggcacaagataaggcaatggtaagccatttgaataggctggcaaactagagatagaattctcagggttactagcagcaacaagaataggtgtatgatctggagaaggagttgcaccatggtgctcagatgatgcattggacacagcaagagtatgcataggattggtgtctgcaagtgcatgatttgtagaatattgagcagtataggaacaagggaaggttcaagaaatacttgagatgaagatttaactcaaagagcaggataagcatgatcattgagcaccacatttcgagctatgaacatccttccaacattattctcaaaaatatagcctttatgctttggtgaataacccaaaaatatacactcttcaggcctgtactcaagtttaggaaaaatcataaggcctcaaatgaggaaaatagacacaactaaaggcttttaagatgttgtaatcaagacctgttaaaacatgcactcaaaagaactaaggtgattgagcacatgtgtaggcattctatttatataataagttgcatattaaaaatcatgccaccaataggtcatatcaaggccaaagtgagaaaggaggattaaacctattttagttatgtgcctatgcttcctttcaactcccccattatgttcatgagtgtgaggacaagagtgctgaaaccatatgccttgatctttcaaaaacctatcaaaaatttcgtattggcactactacgaaaacgggtttttgcatcggtcaacgtgtttggtcaaacttgttgaccgacgtaaaaagcaacccacgcttttttacttcagtaatccaccgacataaataattattaattagcatcggttatctatctgacgctaaaacaaaaactgaagcaaaagatgaaatataaaaaaaaaaagttgtatacattattagtgtcggtctacaaccgatgtaaaaagtcattatatacactattagcgccggtgcacaaccgaagcaaaaaagacattaaaaaaattcagttatgggctttagcccattt

SEQ ID NO: 380852 - DNA, 773 bp, Cannabis indica
atatatctttatctatattaaaaaagattatataacagaattttatttagcattctcatgtttttctattctatcaaattttaatagaatacatttttgtttatttgacagaattttcatatagttaactttgaaataaattacttttgatccataacggtaaccttaatatgaattcagctatttagaaacataaattcctttaaacctataacatttttgttgatatgcgattgcgattggagatgactcctacgcgaaaggactatcgtattcttaatcttggatttcgtcaatcttccaattgagattttgtttgttcactggatatttctcaattaatttcagtttttggatggagataccgctctccaatcgattttctttattgattctctttacaccaagagtagtcttgataaggtgatctcttagagtcgagcactttcgagtcatagaaggttaactttggagggatccttagccttgcgtgagttagaaaatttcgggatggaagtttaaaatttaataacttgaatctaattcattatatttcaatattctgcaccgacatatgtaacaacctaatgcatggatgcgtgagctaaaattgtacgaacttgcaatttagaagccaatcttactactacaacaattgttttttgcttcaatttttattaggcatggcaaaaagatccattcattcggatcggatcagtgatccgatccgacagatcattactgatccgaacattcggatagttattggatct

SEQ ID NO: 380853 - DNA, 3627 bp, Cannabis indica
attttgtattaatttatcaattacttttcacacttgttccatgataaaattgaatagaacataataaaatgaccatgttattgtaaaaattatattttgagaaatattattaacgaatcgtatattataagagtacaacttagtgtaaaaaatctaaaggacgaaaataataattattctaaataaaatagtaaataaataacttcttgtttctagaaattatatgttacatttaaaaaaaaaatgtacaatggcacaaattattggaatcactctcttctcttctctatgtattatatataattacataaatatgaagctaaaataaataaatataattttataaacataaaagctcttattattatttaccttacaaaaaaaaaaagatattaatttttaaagtggggtttgtgattgggtgtaggaatgaagcatgtcccaatcatctcatcaaaaccgctattggaaagaaaatcaatccatgggcaaaattaaagatctcacataatccccatataaaaattattaaaaattccaataaaagaggaacacgtttccttccttcatccattgacttcactaaaaagtatataggaaattttgttaggtatgatccttatccagtaagagcttttttactttttatttttttaaataaaatgaacttctcattataaggcatctagatgttttttttgaagacctacttgggttcccttctcaccaaaaaattgtgtttattattgaactagttttgggaacaaaatcagtatctaaagcaccatgccgaatgactcttgcaaagttgaaagaattgaagattcagttgcaagaattacttgatataggattcagttgtagaacatcaaaagtcaggaggatttttatagccttcaagtctttttgaattgaaatgggaagatattactatgaattttgtgattggattatccaatactatggggcaatatgattctatgtgggtaatagttgataggtatacaaagtcaactcacttcttacctgtccgaatgaacttttccattgatcagtatgcttagttatacgttagaaaaatagtttgtattcatagtgctctaaagtttattgtatctgatagagatccgaaattcacatcaagattttaggagtgtcttcagcgagcactgggtacaaagtaaagttcagcacaacattccatcctcagacagatggacaatccgaaaggactattcagattctagaagacatgttacggacatgtgtgttggattttgaaggatcttgggtgaagtaccttccattgattgagttttcttataacaacaactatcaatcaactattgggatgcccctttatgaattgttatatggaggaaaatatagatcacttatccattgagatgaaatgggtgaaaagaagttcttaggtcacgaagttgttcagagaacaagtgagacaattgatagaattagagctagaatgctcgttgaccagagtaggcgaaaaagttatgtagatccaaagcgttgaaatgttgactttcaagtcggagatatggtatttctctagatatcacctatgaaaggtgtgaagtgctttggaaagaaaaagaaagttaagcccaaggttcgtaggaccttttcgatttcttagaaaagatagggcaagtggtgtataggttggctatgcccccagcacatgcacctgtacacaatgtgtttcatgtttcaatgtgtgatagttaatagtcccatgatccgtaagaggaaagactaggtaagctgtgcaatcccacactgtctgggaaaggtcatgtgtgatgattttgcgactgtgtaagtatatgactatatagttgaagaaggcttaaatggattgattggtactacctatatcaacaaaggtgcatcttgtttttcgttagcccatcacgaaagaactctacggttaagtgtgtttgacctagggtaatttcaggatgggtgacctcctggggagttttcacaagaagtgtgtgagtgaagacaaagcacactggaaatacttgtgctggtttgtagggccagtcatcagtgcatgaagcagccagagtgacatacttgtgtataagagtcatcattccgtgagtgtaaggcccaatggaggcttgaagcgaggacgttatgtacacaatgcttcaaaagtatgtgtcacattcatcccatattttaagttacgaactttgaaacttcagccagacctctcgtatgaggaacagctggtaccgatacttgataaaagagagaaagtcttgtggagcaagacattgacactagtgaaggtgttatggaggaatagtaaggtctaagaagcgacctgggagttagaaactgatatgagacaatgttatcctatattgttcaagtaaatttcgggatgaaatttctataagaaatggataattataatatccgaaaaatgagctatcgattggcaatcctaatcaacttaattaaaaattcatgtgggattatattatcatattatccaatattacatgacattatatgtgaatttttgaatttaagatcctatttatgtgttagggacatttttataattttgagttgataagagtaaaattataattttattattctatgtgctaacagaatacattattatgtagagtgttcattttgaggtgttatatgtgattttgtcaagttagtgtggtatagtcataaatgggtattttggctcagaccgagttcagagcccaaatatgtgaaattatgtgttatggatatttataaatatgtatgactatatttatgtagttgtgttatattaggaatggcttttatgcccttagtctttatttatgttgatattagtaatgggataaaatggtcatttgaccatattttactaagtgctcaactatgtaatccaacatcattttcttcaccaaccacttttttgttggatacaagtttgggttctcaatttctaaaagagcatttaggcactaacgtatttagtatattacatttcacaaaggcattaagacaagatattgaattgcactaaatattggatagctcatcaactgaatcccctctttccaacacagccatagctcccatgccagtccctgcaacaaatcacacacaaatatttttcaatactcatcacaccaaacactataaaacttgttctatatttcatttcatttttatttagtttttaatgatgaaacacaaacctatgctcatgaaaacaactttgcttctcgttaagcaaagttgcaacgcagtgcctaaaggatggccaaagacactggacgccccggttgacattaactttttcgggatcaagcctgaaaaagtggtgctaattttgtcctaaaacaaaaacaaagaagaggaagaaaaaattcccttgccttattaattttgaataaatcgatgttatcaagttcaagaccagcagattgcactgtagctgggattgcaacttgaggtttacttttcttagaagaaagatagaaaaacacttgaaaagaatgttagacatttatatgtataaactgaaatatatatgtttaagtataaagtgcggaattaatcaaacatata

SEQ ID NO: 380854 - DNA, 2610 bp, Cannabis indica
aattaattaattaattaaaaacattatattagtatattatgtgagtgtgtaactatttttagttgagatgaaaaatcctaagggttttttttttttttttatatatatataatttattaaattatatatatttaggtaatcctcaatctcatcaactatcgttcattcatattcatgcccacatgttattgttatctatttatgtactagtctctagttttctttatatggaatatactttggtacctatattttctttttataattttatttttattttgttgaaaggggattcgttgtgatcaaggttaaaaaagacaaaaaccctatacgataatgtagaaaaaattggtacaaaaactcaaagattgctaaggaaaactgttattcggatttttagataggtcacatgtataattctaaaattctatatcagctgagacgggtttaaataggcccaacaactaggtcaaactaaaactctggtccatgaatgagctataatttgctaagaccgccaaggtcgaatcgtgttgatctggaagaggccatctcgaccagaaacttagagtctctcaatacttatcggaggcctccaagatgcaatcctgaagcgggtaattgaagagtcactctaatagattccagagctcaattaactcggaaccctttagatacagggccccaccatgtcagagtttgtctcttgcttcagcctagctgagtgtgtgtgctactaaaagaatgtcacactttgttccaacgccatattctatgacatccttggtacggaaacaataccttcaaatggtcttagcttgtatggaatatctttagctcgtgaattgggcctactcaattggcccaaagtcaataaacattgtattttatcccatcagatggtctagttgacacccataaactctaccgggtttgggtatgcccatacccgattctttcctataaatagaattactccttcgtccaagggggagagggatcaatttttaaggagaagaactaagaattagggttcttactagagcataaatacttgtaagaaatactttagaccttttcttgcttaataacattgactcgtagactagagtttgttaacactcaaaccacgtaaaaatttgggtctcatcatctttaatttatttttttcttaaacttatttatttaaatacttagttttcaaaaatctcagtaaataagaataaaagggcaaaaaacacacctaaagctaatgacactaaaggcaaagggtgttaaacactattattacaaagaaaataaaataaactaaatgatcatgccactaagtcgctctataaactcaaacaccgagtggaaaggagccctaatatcatcctagatcatgtagaaaaatgggtagagaaagcagtagaaaactcccatcgataacaatccattctcagcctcccaataaggttcaaaacggtgaaggagccaagacatggatgcacttcccttaagtaaagctcaagtctctccctctacaattacaaatttgccggagctcaaaaaagagctttgtgcatcagagtcgaacacttggaatgaacaccagagctaacaccaagaacaaaatatataaaagagaatcacactaaaacccaattggcaactgtgacagttagagtttcgtgatccgtaaagaaaaatataggtaagctatgcaatcccacatcgcatggacagggtcaagtgtgatgattctaagattgtataagtatgagactatacaattgaagaacacttaaatggattgatgggtatattttcttttctatagtctatcttttaagtactacaaaattaattgtgtttgacctgatacaatcttatgataggaaaacctcttgagaaaataacgtacatgtgtatactatataagtatgggactacacaaataaaacggagacattacaacaacatgaacatttagcatgaaagtataaaataaattattttgaatttttttttaagaagagtatttaaagcaacatgaatatttagcctgagaatttaaataaattattttaaattttcctttaagaggaggatttagagcaatataaacatgataaagttttaatatatttttttaatacttcagttaaacctaataatttcttttaaacttttatatttatttttagactaatctttttaatttaaatatacacttagcactaacatgacaatgccacatcactaaattaaattttaatgattaaagagtttgtatttccaaataagtcccactttttaaattaaaatagtagtaatgttaatctacttttttgttttgttttgttttcaagagctagatccttcatgtctctctctcaacattggagtgaatatagagtagttgtaatttcattcccaaatatagctaaaaaatgttattttaaagagaccatttgaatgaagaactagtcatatatcaacatcacttggccactcctttagatgggcattattcctcttcatttgacattatgacaatccttcatatcaaatttcacatccatttctattaggtaaacaaaaaaaaaaaaaaaaaaaaaaagaacc

SEQ ID NO: 380855 - DNA, 4236 bp, Cannabis indica
agtttatttatgtcatcctgcaaaattttaagaaattcgaaaacctttcccacgccaaaaactgttttcaaacagtgtggtgcacgcgtaactattttattttatacgcgtgtaaaatagactatttaaattttattttctatattataaattattccgaatttctcaaaattttataggatatactaaatatttataacatacatgaatatgaaaaaaattaaaataaaaaattcttctggatgccgaaacaagtagaggggagtgcattatagaatcacccattaacttttaaaactcattttttagtagttaaatttcctaaactcgtaatttgttagcaactagccacttttatctaaatttttctgttaaatatcatgttatactatccacgtgtatattctgtgtatactctttacacatggtatatttttattaatccgtgtaatatacttattaacaaatttattttaaattaaaattaatttaacttaaaaataattaaaaaaaaataatttttttttaaaaaaaaattaacaaattagttcgtttttttttttcccttcaacttcttccctctcccgtaagtaccattgcctaaccaccagccaaacttccgtcaccgcaaccactccattgagaccatctccaccattacaagatcaacatcactacaagcacaaaataaaacacaaactagattcaaaccaacacctattaaaacacaaaataaaaattgacaagaattatgctctgtctatttactctgttttactgtccttggttagttgtaatattagttaagtcggttggcagttatattagttaatgtaggtcctacactttcggttgttagttgctagtccagcttctctttatatatacttccctatctttgtacatattccttaattcaattcatcaataaaatacatttctggttttacgctcatccgcaatatggtatcagagcaaggaagatatgcttcctttcgatcctgaattcctctgttccttctcgccgtgtcacacttcttctccggtgacgatcatcgtctgtattgaagaattcatttcttcattgaaattcttcatcgacaccttcctttcttctctacgttttctaatctttctgtcatcttccttcgtcttcaatcatgtcgacaaatgaccaagaaacaagagctatagatggagcttcgactcaaaccaacaatggcaaaaatcaaagtcagatgactgatgtgggagtcaatgcacagctgaccagatcaagaaaccagattgaagatccttcagatccatacttcctacaccacagtgataatcctgggaacgttttggtgtcccaattgctgactggacaggaaaactatgttgcttggagtcgagcaatggagctggtcatttctgtcaagaacaaattgggcttcttgaacggctccatttctaaacctcctatttccaatcatgttctttacaatgcttggatccgtaataataacatcgtgatttcttggatcattaactcggtttctaaggaaatttcatctagcattttatacgatgagtcggctgctacaatttggaatgatatcagggtaagatttcaacaaagaaatggtgcacacatctacaatctcaagaaagacttattgaacctaaggcaagaaaatcaaaccgtgagcatgtatttcacaaagctcaaaactgtttgggagcaattgtccaatttcagacttagttgtacctgcaatggctgctcatgtggaggagtcaagaaattgcaagaacattaccacatggagtacatcatgtcttttctaatggggatgtctgatctttatgcacaagtgagaggtaatattcttgttatggatcctttacctgagattaatagattttttcacctactttcacaggatgaaaatcagagagggggcaaaatgtatccacaaacccgaatggcaacatggcttttgcctttcaaggagaaagaaccatgggaaaatcagaaccgtcaaaaactcagccacaaaaacgtggcaaaccctcctacacacactgcaatatgcatggacacaccatcgaaaagtgctataaaatacacggctatccaccggggtacaacaaaaatgggaaatcaaaagatgctgcagcaaaccagtttcagacttctaatgaaacttgttccagttctaatgaaaacaacaccatgttgccccagcttacaccaaatcagtttcagcaactcctaaatctccttgctgcccaaaccagcaatctgccgcttactgatcttggtccatcaacaggtaactcaggtattatcctaaccaattattctcctttacctaaaattaattcttggatagttgatccatgtgctactaggcacatttgttcagatataaattcctttcaaagtgttcatccaatttgtccaaccaaaccaattttttcgaataatgaacatctcatggtatataaaagtggtaatgtttatcttgacagtaaactcatacttcatgaagttctgtatgttcctaattttaagtataatatcatctttgttagttgtttaactaaagatgatactcacaccataaaattctttgctcacaagttttacatacaagaaacacacaccaagaagatgattggcaaaggtgattcggataatggtctctacatcttggacaccacacccgtttctatcaatgctcttacatctactgaaacttggcacaaacgtttaggtcatttgtcaaataaatacttggatttgcttcaagattctttgcattgtaataccaagaatttgcataatattgagccatgttacatctgccctttggctaaacagaaaaagctttcttttcctaataatgcaaattttacttctcattgctttgatgttatacactgtgatgtttggggaccttatcatgttgcttcccattctaaccataagtattttttaaccttaattgatgatcactcaatgtttacttgggtctatcttctcaaataaaaattagatgttcttctaatcatacctgaatttatttcatatatacaaactcaatacaattgcgttttcaagcgcttcaggtttgacaatgcacctaagctcaccttcaaagatttgtttgcaaaacatagtattttgcatgactttacttgcatagaaacgcctgagcaaaatgttgtcgctgagagaaaacatcagcaccttcttaatgttgctagagcattattttttcaatcaagatttcctatccaatacttgactgaatgcctcttaactgctattgttttaattaatcgcactcctacaccaaatctctaaaaacagacgccttatgagactttgtttggtaagccacctgaatatgacaacttaagatgcttcggatgtctagcctttgcttcgaccattacttctcacataactaaattcgaaccacgggctagaacatgttgtttccttggctatcctagaggtataaaaggatataaattatatgatctacactctaaataaatctttatttgacgaaatgtggtttttcacgagaatgtctatcctttccacaagattaatactaatcatcatacaattgatcccttctcacttcttgtcctccccaatacgcatgttactctcacgcacattaatgattatcccacacaacatacttgcactattactcccaacccgattttgcaagaagaaattgatgagacacaagaaacaaacaatgcaaaagacactgcaactccaaaccagcaggatctcccatcacaacttgttgcaataccaagaagatcaactcgggtctcacgaccacctagctatttacaagattttgaatgctataacttaccccaagataaaactactactagttatcccatatcaaagtttatgtcttattctaaactttcaaaaacttataaagcattcattcttgcagttgcaactgaattcgaaccacaaagttacaaacaagcaatccaattcaagcgttggcttcaagctatggacaatgaactcttggctctcatcactaacaacacttggacagtggtgcctcttccaccaaacaaacgtgttatagggtgtcgttgggtataaaagatcaagtataacagtgatggtagtgtggaatgcctcaaagcccgtttagttgcccaaggttacacgcaacaagaaggattggatttttt

SEQ ID NO: 380856 - DNA, 3151 bp, Cannabis indica
acaagaagatcaaatatggtgactatgttagaacttccatgaagatgaaacatgatgggaaagcccatattcagattgcaaaggcacagactaatgaaatttctgttttcacaatttgagatggaggaaaagtttcagtagtgtgatctcctctaacgaccctccccttctcactctatgcttatctgttcaaggcaatatgctagcttatagatatgcgtttgatgactccaaatttaccatcaccttgttttcctcatttgtagtaagatctcattgttgaggatgaaaaaatcttctatgttttttttcttttcttttcctttataggtcaaaactttgtgttttaaagatgtagttgaaaaactacagtgatgagttatgtaatgtctatgcggtcgcaagtttaatggaaattacttttgcctttataatttggacttggtggaagaatgcaacttattttcttaatgcttggttaatagttaaatagtgagtattttctaatcaaattcttattgaaattcttttcaaaaaaaaaaaaaattacttattgaaatcattaattgttttttattagaaccggcaaacaacaatttaaatctgaactgtaataatctaaattactgtagatggtaatcagtgagactgttttgagactgttttttggagtccagttaattacctaaaatatcttacttacacaatgattgaattaccttaaaagaatacaactatgaaacattacttattattatgttatgttttaactttgaaaatatttttatattgttattttatttattataaacttattatttatcatattaaatatatatttcgaaatataaaatcaaaaacatcctaaatacaataacttaaaaaaatttataaactctacttaaattacttaaaaaaaatcggatcaaaataatttgtgaacatccctaatctctctaactaaacaaatccatccctgagaatctcaaattaagatactaaaatattctgctaacaaacaaagctaactagcgatcataactaaaagccatacatgcatgaaagcaaagttcttgcggaatatctaaaatgaggatccaaaggaaaaaatatgggttctacttaaatccctaggcagaaaaagaaatgctgaagaaatcttaaatgtatcatcaacttgcatctaaacttcatgcttaaagggaaaaaaggaagattaatgaaaccatggtttggaataggatttgttatacgaaatgagattttgaatgtcacgtagtaggaatcagcaaatggccaaaggccaaaagggtttatacaaagagaaaaataagatttcattgccaccaaacgacatacaaatctatgcacagcacatgcatacgcagtatcccaagatcagatacaagtatgtaaaccttcgtaatttagtaaaaccataaattacaagcaaaggcgaaggtattacataaactgctcaaggaaaagtaattcactaattcctattgctctctccctgaagtattattgccattctctgtagccccagaactcccttgaacatcggcagcagatggtgccgtacctaaacctagaagtaacgggtttgcttttgtttcagtttgagtggttctctcagccgaaggatttgcagcccatgctcggagaggagattcaaaatgcttgcttgcaacatcaggagctggtgcgggcgcatcttctccaggaagaacaagaagacccttctcttgaagagaagatggttcattaaagtatgtctgccaaagggaatccacaaggtgcctctcttctctggctgctccaagatcttctggagacatcagacagataccattaattctctcttgaagaatttgtttcagtttgtcatcattgacatcagtcactcttccacttgtctcgccacttttgtctcgtgcaagctcaagaaggcctcgaagagaagcttctcgtacctctgcgtcttcactagaagcaaggtgcaacataatgcgaggaaatcctagctcagatactatgctgcagtctgaactattctcatgcagtagataatggaccaagttcaaagctttcctgaacatgtttcatgtacaggtattataatctccttaggcatatgaaaataaacactaaattgaaaaaaatacagatagttctatatggtacctttgaaatctcacgttttctgaacttaaagcatctctcaaggccgcatatccatttgcaagacgaaatgcaatactggcaggtttgttatgccggattaacgctgcattgcaaaagcaaaccgtatataaaaaattcattcagaaaagcaagggaaggcccaaaacataacttaaaaaactagaaactcatacgtacaagatatagcaccgagagctttggttcgaactgtcacatcaggatcagatgtaaaattagaaagaagaggctctaatccattggcttccataaccagctgttgactccgttcattattctgtacaatagttgttacaacctcagcagcctttgctcttatgttagcatgtgagttcttgaggtaaccaagaagagggaccaaaccgccaatggaatgaagatctgtcacaagatagaagattgcgtatcagctgtattgtactgctgtattgtactgactactaattgaaatcaactcatcaaatagcaaatgaacaaacgaggtaaaacataactcaagagtaatggaattcgtttggtgtgtgataggtgggattagatagcattgaattgaattatactataaataagaggtaaggccagacaagaatttctaaattattgtctcactaataatatatatgaagaaagaggtacaataatttagtaactgaattaatcaatccaatatattttgtaatttcattcgaatgacctccccaacgggtaaatgaaaaagtcaaaaaacaaggggcttacaagataacttaataggcataccgagcatatacattaaggtggcgtttggttggaggtaatgaaatagaatagaatggaaaccattttcattccatttctttgtttggttgcattttaaagtattggaatagcattccaatagaatgctctttccactattttggtagaatgactattccattttaaa

SEQ ID NO: 380857 - DNA, 1355 bp, Cannabis indica
ctgactattgaattggtccttagttggatatgtataatttttctttaaactttttgaaaaaataataccatatttaataacgtaataatatctttatcaaaccaaaaaaaaaaaaaaaaaaaaaacagaattgtattgtatgtaagtgtatatcttcaattataatggattcgaattttacaaagcgtgttaatattttaaaatacgttttaaaaactttggtagaaaaggtaaaaactagagaaaaaatggcattttacatatttggaaggaattatgtaaatattagtaattatattatattacattataagtcataattatatataattttttatttttcatgtttgataaataattttaattacataaaaaataacattttttaataaatgatttttaaaataattttatttcataattatgattacacctaattttaatcaggttgagaattaagaatttaaatgaagcaattatctcaaattatactattagtaatagtgagtaattacttgattaaacaagagaccacttctcaaattacacttattaattacaatgtaacttttcaaatacacttgaaaaattattttactgtgctcgtgtacaagtaatttgtgaaatttatattatatataattactaaatttttaaccttattatatgcatttgggtaattaagttaatgttatagcttagctatgtgtgtaattgaaatctaaaatactagtgaatctatcatattgagggaaaaagataatgagattataattataaggtcattaatataaaatatgaaataaatattagtgtgagctgcatttcaatgttattaggtggcattccattccatcaaactcaacgtgtgaaacacaaagtagactttgacataaattaaatatgctttgcatatactcacccaacccacctcttcacaataatagctgaatttccataacattgttatgttataattatgattaaagttttttttttttctacttttaaatctttaaatagtgaggaaacaaatgtgcagattcttttctccttttaatatggcatgatgctattactatcattaatcgaggctataatagtaatcataatatcattatccaacacttatagaagttagacataagctaaagaattaaattcagattaattatgagaaatttacatctagcacctttaatttggtataatttataattatgtgttatcttatctattattttattttttacttttttttaattgttgttttactatttagtcgaattttctattgtctttcttttttattttttctttattttttttctttttatttctttttcttttttctt

SEQ ID NO: 380858 - DNA, 5382 bp, Cannabis indica
gtattataatatttataaagagtccgaagttgaagaccttggccccagtccccgaatccagatctagaccgaaacccaaacctagacccagacacgaaccacggacacaaactctgaaccttgatcccaaccagaacccggactctaaacatggacttggaccccgactgacccaggaccccggaccccgacccagaccccgaccctggatcccaaacctcaacccgaacctcgaaccctggcccagacccagactcgaacccaaaccccagaccctagacccgaaccttagaccctaacccagacctgaacttggactcggaccccggaccttgaaaccggacgttgacctgaccccagactcttgaccccaaaccccagacccagacccgaatctggactcagagctaaaccaaaactggacctggaccccaaaccccggacttggacttcgaaccttattttcagtattgtaaaatattcatattttttgaaaattttacaagtgatcttaaatagttacaacttacacgatcattaactttgactaatttttttttgaatgccaacatataagtagtctactagaatgaccttttagtgggtctactacaaattttttttatattatatatagatatatgaaatatattttatctataggaaatataggaaactttgaattggtttaaatttaacttaggtataatttatttaagttatatatattaagagggaaaaagcataacgttacaagtctaggtgacataaaatcgaaaactttgaaaaactctcacccggatttatctatttcaatttttttcttctttgttttttctacttttttggttgtgggtcagtcgagtttacgagtttgaacccgaatgttcagccctactttgtgggtcagtcgagtttacgagtttgaacccgaatgttcagccctactttgtgaggctccgaaacagctctctggactatacatgcattgcagcaccaattcccctttaatttgtgctgcaacgccgatttgcagccccttcaataaacgctgcaacccctaagcccacttttaaaattctcctgctatgacgaataatattttggtcataattttcttgatacggttcgaaatttgacaattcaagatgttttagaaagataaaagacatctcacaaattttatttaaaacgtcttcctaaaaaaatgaaaggatcttagtcaaaacgtcttcacaaattttatttaaaacgtcttcccaaaaaatgaaaggatcctagtcaaaaacaggcttgaatcttcagacataatcttcgatcacaaacaaagcgtgttaaacatctcaaacttaaaattttccactcacatcattttaaaacttcaaaattaatgtcaaatacatcatattcatcttatttatcatgtttcttctcattacaatccatattatatacttcatcatgaaaacttaaaataagaagaaaacaagtctaattctgcacaaaacacactaaacatctaaaaataataaaaaaaaattttagtctaaattttttctataatcgtgtacgttgtacttgtttaaaaccacttataaatatttaaaatattctgaataatttacaatactaaaaataagattcaaataattatttattacacatataagaaacaacactactcaaaccttattaataaaccaaaataaatgacaaggatacaaggattgcaaaagtataagttagtggaatggacttcatatcttcttttgtacggtctttccggtttaacccttcatgttgaaatcggcctcagaaggatttgagcaccgtatttaggttgcaccgttataaacaacataggagaatggacgtaggttggtgacaccatgagatagtaacgctgtatgaggatggccaagattattttggcctcaaccattgctagattttggccggcacaaattctaggaccgaggccaaatggacagaatgaagctacatgtttccgaggctcagaaaacctcgatggattgaactcattagcatcttccccccatatctcaggttcgtgatgaaccgcagtcaatgccaaatacaactgtgtgttagcaggaatgtctagacttccaagcttaactttcttcaatgtcttcctcatcatcattgcagcaggagcatagagtcgaagtgtttcgttgattatcattgtcagctattatttatttatcaatgagcaaaagttcaagtaaagataaatttcttttataaatactaaactctgaaagacctatagatcaagactgagaacacttacaagtttaagatcacttaaattatctgcaagtggaagtccattgaatccgcaaactctaactacttcttccctggccttgttctgccattcctggtgctgagctaagagaaggagagcccaagtcaagagattggcagtggtttcctttcctgcaaaatagaaagtcttgcactcgtctacgatttcttctactcctagtttcttttccttgccatcatgatttttatgtgaagacattagaagagtaagtaggttccttgaattttcacttgtcttgctatttgtcattattagcctcttcactgaatcacgagtctccttatctagtctccacctctctctgttgtccttcgtgggcaaaaacctgtgtttgtaattgtaaacaccattgcttcgttcaaaacaatacatgtacaccattgaacaatgcttataatattaaattataaagattttgtagccaaaaaacaagacataaattacctgaatcctggaatatagatacttctaactgccttagagaaaagatacatttgcatatcttgtaagtcgaatatgcgtttcccttcttcaaaactacttccgaaagctgttctagatataatgtctgccgaaacttcatgaatttccttgtgcacatctatttcaaattcatctcttcctcctcttgtttcctcccacttttcaacttttcttattatacttgttaccatatctggcacccaactctaaaaaacgaaaaacaaagaaacaaatcatgaagatattgcatagataacattatagttttgggataaaagttttgtgccatagccaaaataatgtagacgtgaaaataagatgccttttcttcaaaaaaaaaatacacccattgttataataataactaatgtaattaaattactatacaatttaaattttttagagcaaatagtatttggtttcacattagtatttgtgggattcatagtaattgttctggcctttgagttatatgggaaagtgtggaggagagagtgaatttagtggggcatctaaaactctcatttacaaaatatttaacacatgaaacttagacagttttaaagaaaattccaccccacaataaatacaaaaaagttaaaaatttgtgtgtacaaattccattttgtgtttagtaccttgacacgatccatagtaaaggcttggtttgcaatccttcgatgaaaagcccattggtctccctcaagcccaacaaggccctgtccaaacaactgcttattggaggggttaaacccgacctttccaaaatgcccactggtgttcttaaggacctcctttatcagaatggggtcagcaattgccaacctgggcttgggcccaaaccaatacaagaaagtcttcccgtacatgcgagaccacctatggtaaaaaggggccaccaatggaagcacatcgttgtcggtcagagttgactttgactgaatctcggtgtaaagacgccggatttgggctgtgttcccaaacaaaacacggtagcctgggcctctcacaccttgcttcttaaactgcctctgaattttcaatgggacccaaagtgtggagtaggcgaattttgcaaggcttacgaagattagaagtataaggagaacaacaacaataagaagcaatacactcatcgtattcaatttattacagaaatttcctttgcagggttagaagtagtacaagataagatatattatattatacttctgttttgttttcacttagaaaaataccacaatatgcaaaacttgtaatccagaaacctgacaaagaaaagaaaacattacatgtgacattagaagatcatctactccaattccaaccaacataattaaaactatgatccaatccaatggtatttaggttcagaaaattaactcaaaatgaaaataagaaacctcaccttgattgcagagcaatcggaagttggagtcaaagctaggcttggttttttttttctatcgcaccggacccgacgtattaaataatagtaattatttcactaatacataaaatcaataaaaagaattacaaaaaatacgattttatacttgttaatttgttgttatttatatgtcatttattattgttgtggggatattattttcttgttacctttatataattttctttcatattatttttatagaaaatcataaaaatatatataaaaaaaaatcttaaaacctaaaaatataatatttttgcaaaaaaattatattttatgtaattatcctaaataataatagagtttttaaaccacatactataatttttaaaaaaataccgtgtaagttttatactatatactgtgaagttttcactgttgttccacggttgttttttaattgtttcactgttgttttaattgttctattttgttatttacgattatttaataaaaagacaatatttttgtaaaaaaattatgtgacacaataaaattttatacttctactcaaaattcaatatttttataaaaatctttttttatacataaaattaatagaacagagccggttgagtgccttttatttattatttagatttggacaaatcttggttttggaatttggatttttgggtaattgttttgtgtcatatagcagtgtagttaggagaagttcatgaatcatgactttatttattcatatttattttatttgagtttactactttatttatagactcttcgtgaataattagtttaatcggattttgtcttttattatgatattttatccaacatattatttttaggctaattttcatatttatactgtcaaaataaaaaaattacatttttaccaaaagaaaaaaaaacaaagatcacttttacaatttttttttttttttaatttataattccatggagcctcatataagaaatataaaaataataggcaaataataagaaaatacaataaagtgaatagtccatatttttatataaaaacaattttttgacttttttagtttttttttttgaagaaaagcgtaataatacattaaatgaaattagacctcatggtcgttac

SEQ ID NO: 380859 - DNA, 3752 bp, Cannabis indica
atttatatattaacatgaatattattatacaaaactaaattaaattaagtttagacaaaaaaaaaaaattaaaataaaaaactaaattcaataaataaatagtattgttcgtaggagtgcacaaaatgagtatgtaaattaaaattaatataattaacaattctaatactatgataatatcgtaccttatcacgaattactgataacattataacttaattaggtttcctttgactaaaattagccctaaacttttttttagcttattcaactcaaattgacttataaatcccaatattattctaaaatgatttaattttcttttcttcaaaaaaaaaaatagattcaatttttcattaattaaatttagttacgaaagtctagtcatgacacttgtgaaatttccacgtactaattccacgtgtcaaattctctgtacaaacaaacaatcatccaacattgattataaatatataaataaatttgcaaaaatacatttttatttattatgtaatcaatatcgtttctaactttctattgtcattattttcgaattgttgttattagttagtacaaactcagaggagcatttcatttctgttttcaaattttatttaaacagagttttaaaaaatgaaattgattttttaaaaaaaaacattgcaattatcaaaacaaataacaattattaactcaaatgttatttatttatttatgataatggaaatgaaagtaataaaataaaagtcaaaaagtcaaaaagtcatattagatagtttgggtactcaaaattccgcctcacacgcctcaggtcttgtgctgtgcgttaaattttggttctttaaaaacttggactgtatcccatgacggcatctccccgtacaaaatatttattttattttattttaattaattaatttaattttaaataaagttggaacaagaagactagactcatctcctccactatacaattagagagcctttggtggaagaaactaggagaacgattcttcaatcccacaaaaagtttccatactacaaacaaacactttctgacaatatcccttttcatcttctatcttcttttcttttttaatttctgaaacaaagagaaaaagctctgaaagccagaacctttactcttctggagctctctaaggtttaatggtggtttaatgctcactgagattttggttgagtattaactgtgtctgagctttgttttgctcacccttttctccgttttctctccctttctctctctcactctctctttatttgtttaacaatggctgagtatatatgtttactgaaccaggttcgtttactttcctttttgcagtacccatatttaaatattaattttatatatttgtgggcgttttgtttaaatctctgaaattgttgttctttagtcggttctttcagtttgtgggtacggaagataaatgttcatggggggctttagaaatgtgcttcctttttccttgcatgaccgatctggacttagatagtttcagaataatttattttataatcagagttaacccattttaaatctatttatcttagtctagaaaagttaaacttttgaacttttctgtaggattttagtagtggtactcttatttacatactaaattattgtacttaggtacccttaaatctttaatctttgacactttgtacattgatgattagaactctttagtaatcttccatttatggcttttgttgatttagctctttcattttctttattgttggcaggattctatcattattaaggctcctaagaaaaacaccctcttgttgaggatgttagtattggtgtttgccatggtttgtggagtttatatctgctcaatatgtgtgaagcagatcaattttcaaacccttacctcaaatcaaagcatccaagttgtggaaagtccttgtcttgataatggaattaagctactggaataccctcatgtgcattatcccaaccccaaaacctttagcaggtagctaatcaaaggggtttctagttctgattgttaagttttgttttcggttttactgagtttgtgttttggtgcttttgtaggggtgagtgtgagcataatcctgttaggttcttcgctatcttgtccatgcagagatcgggaagtgggtggtttgagagcctcttaaatagtcatattaatgtaagttctaatggagagatattttctcgttggcataggaggcgaaatatttcttccattgtagagactatggatcaggtttataatttggattggcagagtagtgcttcgaaaaatcagtgctctgcagcagttggcttcaagtggatgcttaatcaggtaactgttggataatgtcatcttataattatgaatttatgcttcatggaaaattgagaatttgtctgcataatgtgaaatattgggaaccactattcattcaagccaatttgtattgatactcaaaacttatattaagcagatgctgagactttgaaatttgattacaagtctttgttgtgttaaattgtacaattcattgttcgacttgatagactctttcagcgttcaaggtcaaaacttagaacccaaccttagttctcatgggtcatgagataaattcaagctcagtttatgtgttaggtttatgaatgcagctagagcatcttagcaaatggactgctaccatttaaatttatcatggaaactgttagttactttctagtattgactcaaacttttaatgtgtgtattgtctctaccatataaggaagcagagtaaccgggtaaacgaaatttgtagcccctctcatgtcttgctgtgatttttgcagggcttgatggagcatcataaagaaatagccgattactttaaccgtaggggtgtttctgcaatatttctcttccgtaagaatttattacgtcggatggtctcagatcttgccaattcgtatgatcgatatgctaagctattgaatggaactcacaaggctcatgtacattcggccgaggaggttcttttctgtcttatctattttattttattgagttcatttatcatgatgaatattcttcaattcctgcattaaacttcttgtaggctgaaaaactgtcaacatacaagccagtaatcaattctacatctttgatcaatgatctggtgaaaatggagttagcaactaaggcggctttggtatcctttaacaccactagacacatagttttgtactacgaggatgttgtgaagaaccctgccgtaagttttctctaggaaccttagttgttgatcgtttcttaccctacaccgagttacatctactgagatttatcctcctatttcatatttttcaacagaaactgaacgaagttcaagtgtttcttggactaccagtgatggagctaaagagccatcaggtgaaaatacacaaaggatcactatcagaccacatcaagaactgggacgatgtcaacaggacacttagtggaacaacatacgagcattttctctactctgattattaatagtcccgagtcccgaatctgctgctaactcctggattggtgtaaataccagcctaacttattattacacagaagcttggctaacagggtaccaccggtcaaggttagaattttttgtggctgcaacattttcttggcaattagtgtcaacaattcgttgatgtgataattagttcctttgatgctctctctacaaaattgtacatgtcattttgttca

SEQ ID NO: 380860 - DNA, 5074 bp, Cannabis indica
ggtacaactgaaatcaagacaatcagtcagtcacctcaactcaccacaccaactagtaaattaatgcatgcttaccttctctttattactaatttcataatcgctaaagtctctgttttgcccgaacatattatttccctctgttcgcatcatgtttccataattcttctctgttccgcctccaccaccactatacaactgaaattaaatttcattgatacatagtacttaattagtgcaatccctatagttaacacaccctacttcttttgaattatagtgcaattaaacctataattatataataaaggagttaacacaccttagtcttctcttttgtttcatactctctatacattccacgttcaggtgaaagagcataaccttgatcatcatgatcaataatattgtactttggacttgggcgtccttttgctccatacacctacgaaattggtcaatatgatgatgatgatgatcatgaaattgttatatgttagtcagtatttaacaatttatttagcattaaaaccttttcctttgtttcatattcgctgtaatggtgacgatcatgttttgcatccatgttgtaatggtcgaattcttttgtaggtcttcccatatgtgcaggtgcagggtaccctttaacaggtgatgattcattatgtccataaaacccctggacgccacgatcgaaaaggtagttaatagaatagaatttattaaaagtctacttcacttaaagataatttgaaatctatctactcaccctgtggtcattggaataattggaatactgatcagtttcttcattactataagtagtatgattattaggctgcataatcatatagtttctttctgatctcttccaacttgtctctggtggtacccgccgccgctacctttcactgtctcatgatgacctgtacttgtaaatgcctacaaattcccaaacagttaatccttaataagtttattactatagacatcgtgaatatatatatatatggtatagttgattgttgacatgtgtgtgtatgtatgcacctgttcgttctttccaatgaaacctccatcggatatatacatattatccattttttctctgacggcaaccatgatatcaatggccttattgtttcctccaacaacagcaccaccaccaccaccaacaactccaagtcctattcggttctgggccagagtgtggaccgttttgatattcacaaaaggcttggcatggacaccgatagcatccaaatgaagcccagtagttcgtccatgaaagcccacgatcttggcaccagtcaaggaaaaggagaagtgagtccctttctgaaagccataaggcccaaatcttctcttgtttgtgtcaaaggcaagggatcggaccatgataggcccacagtcgttgatactcccaaagtaaccgctgacagagataaggtactcatctgggtagtcaagcttcaccttatcagtcttgattccgccactcccgccgtgtttctccgaccaaagggagcaacccctcgtatcgtactcgatctggattgaatctattacggctccatggctgattatcatttgccttatggagcagtgaacgccgtcgtcccacctggtcccacactctcctccccacggcccagctgacttgtaactcatctcgtttccctctatataactctgtacgtaaacatattatacataattatgtttttaactctacgtacgtacacatgtattttataatttaagcttaattataagactatataatataatactaataataatatatgtaaacgcattacggaatacaatagcaaattaaaaaggatatgttttatttcaacatataatctaaagataacttaccataattttttcaataaatgaagaaaattaataagtgctgaagaaggcttcaaaagccaagttgaagatagtgtagggaggtgtttgagtgtgtgtgtatatttatatatgttagacaaaatgtatttgagtgcatggataagctgagataccaaattcgaatactattcatgataaaattttccgtgtatatatatataaatattaaattgaaaagaaatatatatagtagtgcgcatataataactttttatgccaatataaagcatgtctaatcaaaacatgcttaatatataaatagttccatagatcaatgatgaaaatctcaggagtacattcgtaaatagtcattataaaagtatttttttttttaattttagaaacaaattgtttttaagggcaatattgctcattaatatctttttttacaataaacaaactgtaaaaagaaaggagaagaagaatctaatctatcaaaaacacgaatcttcacagaaagtgccaactaattgacccttcaaaaatgttcgaaacgcataaaatgtccaattgataccatcaattatttttctatctcaaacgatactctctgcaatatgattttcatccatacacgtacattttggattaataccaacgcaattgtataaatatatatatatatatatatgaatttttaaagcattttcatggactgaaaaaaaatcccatatactgaaattggttacttcttttcgttttagatgataattccgagttaataaaattgtgatactcagaaaattgtggaggattctgtagagatctgcttgaaattcaaagagaagaagatctaattagttcatcaattaataattgataatatattgctacagaaaaaattcaaaggttaaaagtgattaaataaaaggagccaatatattctcttgcgttcccaatgtaagaatcccaatcttaatttgtttaaatcattattttagaaaaacataggatgttacattattagattataattaacatacgtggtagtaaataaaatcatagtaaaataagctccaacaattaacttcagagccttgacaatgtttactttaatgcataaatatattttaaaatgatttaaaatgttatggatgtgatttggatattttcagatttaaagcttgtaattgatgattttatgtgaattttttatatgtatctttgatacaatatttctttattagtgtatataattgcataaaaataattattcgggatcgaaattgaaccaaaactaacccaaaatgcccaaaagggcctgctggctgagacacacacataaatagcccaatgagattaagatttctcggccagcaccttaagccgcatgcgcatcctatgggtgcatggccgagaaatctcagccacccatgtctcacactcggacacccaaggtgttaggccaagatttctcggccagagcatcagaacccgctcgtgtctcttgtcgatctgcactcacctggggtcttcttgggaagtttttaatgtaacggttttaaactgtcgactatattgttcactattgctaaaatcgtcagctattgtgttcactattgctgacgattttaaatcgtgtaaagtttttcgccaattgttttgaaccgtcacctattctacccagttttacaacggtcgaataggcaacgattaaagagactgacaacaatacttcgggctgtttaaaacagttgagaaacccaattttttagagttgtgtactgtaaaagtgtgatgtaaataaaaaaaacattgatgatgtattttaaagaatagagtagagaggcggttggtgagagtgagcattttccccttctttgggccatatcacatttttttaagagaaattgtcaaaaatgactttttttttatctaattatcaaaaatgacttagtcaagtttcaataataattttatttgttttattatgtttgaatacccttgttttacctctctctcttcttttttttttcctttctcttaccttactttctttttcaggttcttctttctctttttcttatttttctttcttctttcaaacttcaaaaataatttctaatcacgtcgttactcggatgagcctaaaaaaataccattgcgatctaatattcaatgtgaacatttcaagatgtggaagtatattttttttgttatttctagaaaaaaaaaacatttggtcactaatataataattagttactgttttataatttttttaaattttagttaacaacatttatttagaattaagctaattgaattatattatatttaattagctttcaaaataataaaaaggtatataaaataatcattatataaaatagtagcttgttacactatatgacaactcattagtttcaatttttttaaggttacttaaatgtattttaaattataatctactataatataacttaaaatagctaattagttattaaaatgtatacaaagaagtttgtagagactaaccaaaatatatctcaaattatataatataaaaataaaattttttatataaagataactaattagtttcctatcaacactattagtaattaaaaagttacttttaaaaacgcaagaaaattaaaaaaaaaaaaacgtcaaaaagcgtcaaaaaggtcagaaacgtcaaatttaactcacgtgacatgtcaataataataataaatttattattataaattagataaaaaaaataaatattattataaacttttctttttttaatgatttgggatggccatgaaaaaccaaatttaccatgtattagtcaatctgcaacagtggcctttaaattgtaaaacgaaaagatctatattgaaaaaaaaaatcctattaaccttttttttcttgctaatttcttttgaaagtttatataattgagtggttctagaagatctttcaaaataaagtagtaaactagtaatgatgtttttcagctttttctattatcacaacaaccgtatttttaaatttaggtgtacaaattaaaacggtatgtattgttactttttgcacaacaaaaaagaaaaattaaaattcaaaaattcaaaatttgatctatcctctaatttatcataaaaaattaagttttagtttgagttaattataaataaaaataatttttaaattataatta

SEQ ID NO: 380861 - DNA, 3756 bp, Cannabis indica
tatatatatattttttgaagtttgtgccatattattttggttaatttgtgttattttattaggctaattttgtgaagttttgttggctcaatttagaaagcacttaaagattttcacttataagtttaaatctcttgttttggtttttactttaataaattttgaggactttctttcaataatttatattatcatttcattaatattttttattagtttacaaattaattacgacataatggtgataatcttaatcaaaaaaaccttcaaagatatggatgggtttttcgattggaagttagtcggtcatagaattgtcaaatataagttttattttcaataaaatgttgagctacattgttttcttgctaaatattttaactttattatgatcaattttagtgtgctaattttcattttgcatttaacttttattaattgtataggtgttttctttgtttaattctttctcatagaagtgatatccaagatttagatcaaacatataaattagtttcggtgacacaatttaatcaagaagttttcaaaaaataaatttttacttgtttaatttttatttctcttcataacagaaatatagttagaattttatttctaatataaaattttcattctatttttgtctatttattttgtaggttcgctttaattgataagttaaaccatatgttatttttgagtggtattattttgtctaaatttttaagataacttaatcttatataagttttattattttatagcgattcatattctaactttaaatataccttttaactataatttattggtttgtgagctagaattccctttactctaaaaatgataaaaacctaagatattgctaaccaagttgacaaacgagtatagctaaattattaagtaattaataataagttgaatctattaatagttacttgtattaagaagaaaaaaacactaaaatccaaatagctaatcatttggtcatctctaataggacggcaaaacttcaaaaataataaaattttgatacaaaaatagtttaacttaactttaaatatcatcttatatataagggagtttacagtagagtaggtaaatgtttttttttttaagttgactagctagcaatatatatcttagtgcaatcttaaattttttgttcattgaatctttataagttagggtattctcaaattttttttggaattatcaaaacaaatataaaaagaaaatacatagatagaaacatgcaaagacaaaagatcattctcattctcattctttaatttgtcttttaattaattattcctccatatatatattgattaaagagaaaactgagtgaattgttaattaagcattttttgacaaaatcgataagcttggatattactctgtcgtacgatgttcttgcttgaattatattattattatttactcccaattgtatggcatgacatggcttatacaaaccgaccagtactgtacacacaaaaaaaacacacacacacattaatacttattatttaagagaaaaatttgtcgattaaactatcttaattttttaagtttaaattttaatggtaaagtgttttaaattataaaactgttagtaaatttaaagtgttattaactataccgacataaattgtttatgtgtatactcttatacacgtagtatatttatattagtagtacacgtaatattgttattttaaaattcaataaaattataaaaataaaaaatattaaaaaataaaaaatattataaattttaaaatattcttttacaattttcaaataataatattagatgtattaatatacacatactacgtgtataaaagtgtatatataagaaatttatgttggcagttaactatgaaaaataaatattgtgactttaaatttatcagtagtttaataatttagagggttttactactaaaatttgagtttgaaaatttaaatggaagttaaatgatagttaaaagagttgtagtcgtaaaaaactcttaaaaaaaaagaaaaagtaagaaaacaagaggagtattactgaaaagagaaatgttaaagggtatcagtggtgtttagcattctatgtgtcaatataactattggtctaactaagtattgagtctcatataatttaatataataatttttaaagaatatcgttaaccgattgtaacgtgacatgtcgtgaaggtgctaggcaccactagtgccgcacggttgatgatgggtggggaatgaaatagtgagatgagattgatgatttgacagcatcacgtgtggggttgcctcaacatgcacacatgacttgttcctttctcttcttccttattggtggctcccactttccaatacacactattttgttttatagagccccttttctttttagttttaggtcttaacatccccacacgtggaatcatcattgcttcctttgcttcatccaaaataaataaataataataataagagtgtactgaaattttttggtatactctctcaaaaaaaaaaaaaaaaaatattggtatactaaaaccttagtgatgattcgaatgggagataataaatagttatttgtttaatttaatattgtattttatattttttaatttaataaataatataaaaaaatttaaatcacttactatttgttatattgtatagtattgtacactttaaattatttattaatagtaatgttctatatttgtggatctcctttaataaaaggatgtatctagctctataattttgccaaataaattggtagtatgtttttagtattatttaattcatttttctagtttcagcaatggtgttttttctattttgagttaatattactttaaataaacatttatactattacaagcaaaaataaacatttatattttattaatttcaaaaatactattttcaaagtttcttatttacaaaaatacggtagaaaaactcccctagatgcgcaaggagaagtgtgacacacatgtggctatgtgggcgagtgagactcacacgcgagtgagggacaaagccttcagagttgtctgacgctcacaaactgtagcgtcagaacacagcagtcgttgccacgtggcgaattcggacaaagtggattttaacatgtagggcttcttttctcagcgcaaaacaactaaataacaacacaaaaacaactaaaaaacaacttaaccataacatataaatcaattaaagttgtttgcaacatcttatttcaactttaaaatattatataaaatcaagttgtttttatgttgttctatagttgttatgaattgttatacactacactagttgttcaataagtaaaaaaatagagttttacatgttaaaacaaaaacttatattatctcttatattaagacatggaaaataataagagaacacaaattatgttgattttgaattaagtgaaaaattgataggaagagattgtaaatatgaataaaaattacataaatttagtaataacattatttgttgttttatcggttgttttaaagttgtaaatatgttattttttgagcatgttgctttgagttgtttgtacgttgagtctcagtggtcaaaatctgtagatttccagttatttttatgtttttatatcgttgctaaattgttgttaacaatttaaaaaagccattaacaactattatctttttttaaaatatatatataattataccaatacttgatgtagaaattaaaaat

SEQ ID NO: 380862 - DNA, 1756 bp, Cannabis indica
tcaattctcattcttatattttttatgtttttattctttttaaaccaaacgtcaccttaaagatcaatgctaagactaagagacccgatgtcaagcatacaaagagtgtcaaattgttattaatgtattttaatatcgagtcacacatattttaatttaaaaataatataaaaaattactaactatctgtgacgcgctatattactataatattaagcattttaaaatgtgaaatagtaatttattcaaaaaagatattgttggtgaaaaatgaaagtactggctctatgatagagataggtacctataaaatccaaatagaagttctaaataaaatttcactagatttgtgataaatttcttactttattttactatttaattatttatatgtttttttgaataatttgtttcttaaatttttatatgattacttgaggaattaatttacgattagtatttttattttaataatatgaaaggggtgtcttcaaaagaaagcacccattatttaaacaaaaaagaggaaaactaattcagagtccaaactaagctaaatttaggagtgtcaattcgtgtttataggttatgttaatgttgtgtcaagggtttagatattacaagcaaaactaaacctgacccatttaatatcgtgttaaaaattaaaactcaaagacaactctcttatcaacaagttcacttaatccaatttatttaaggaaaatttactaaaatattcgaatttgagttaatttttattgaaatactgccatacgattctttttttccccaaagatactgtgtttttataaaacaacatatatggaacacaaaatagaacaactaaaaataacagtggaacaactaaaaaataactgtggaacaacaggaaaaacttaacacagcatacagcataaaacttacacaatatttttgagaaaaaatacagtactatttttgaaaaaaattctgcccacaataaaaaagtaaaaaaattaaaaatttcagtatgtggtgtaaataatcttttatttaacccatttatacatgtgtaaaagatgcttaatttttattaatttatcaatttatactaatttaactagtttaatacaatttatttgtaataaattataataaatatactaatttatattttaaagaggtttttgtcgtgttatttttgaatattaacatattaaattaattactcataaatgtgtagtaagaggattaaaatttgttaaaaacatgttaatgggtttatattgacgaaattgttaatgggttatataaacatgttaattgtcgtgttatttttggattagagatttgtttaatgtacgagttagcagtgttaatttgaaaataacaaaatcttatttatttagggaaatttacatgatatactaagtttagctatttttttacaaaaatattgtcaggcggtactttttacttttttactgtgttttttttataagtttcatactgcagtatactgtgttaagttttcactggtgttttttagttgttctattgttgttttgagttgttctgttttgtaatttactggtgttttataaaaacacagtatttttgaaaaaaaatttcgtgtgaccgtatttttgtaaaagttaactcaaattctaatatttttgtaaatttccctttatttagtgcagttgtcaagtgttgttattgtatttggcccattttgttgccctttgtttttttctaattacataaggcactattt

SEQ ID NO: 380863 - DNA, 1994 bp, Cannabis indica
tttacaagtttcctattctccacactagtccccaattagtgttgatagtaggacaagaaagatttgtttaccgttacaggatcttcaactctgtctccttcaacattgataatagtaagaattctattttgacatctcctttctctgatgctttaatggaaaaaagcagtattcccatcaccctctttaagctagttcagttttgatttctagtaaaaaaaaaaaaaaaaaaaaaaaaaaaggaaagcagcagttctgtccacatcagcataaacattcatggcctcaatttcttgctactggagctctctattcaatggctcattttgcaatttagactaacattcattgagcttctcttgagcttgagtttctataatatgaatctcagaaaaacgaagctgattaagctccttgaacacaggtttgagagccttaagcttagccataatttgaaacatctttgttcctttaacttcaccttgccataccttgctaacttgctgatggtatagaggatgtgtagcccacatcttgaaatatttgaatggcttcctacaacttggataatctggatgagctgtgaggactaccagtgtgttatcaaatatgccctcattaagaaacaaggcttcaacagtttgaaaattatctatccaagcaggattggccagtaccctatcgagtttagagataattttatcagaggcttgatgcttgttgctccaagtaaagtaattcccactgtatttaacatcttcaagttggaaattattgacacaattcaaaaaagcacaagaggaagtatgccttgctctaactcctattctttcatccctactcagaacatcattgaagtccccaagaacaatctagggatcacctttagcaatcccctataggtctttccacaaacttttccaacactcttcatcattaaaatcataaacgaaagtagccaagaaattatacttattattaacagtagtaaccaacaagtgtatatattggctggaacaactgaaaatacttaaattgaatcttaaaggattccatgccactataatccttcctcctttatgccacgcaatatttgaagtgaaacaccacctagaaaacatatgtacatataaggctccaagcttcggagccttaaccctcgtcttgagaagaccaactaagctaacattctgttttgctataaaatttctcattatagcttgtttttatggctcttgatcccttagacgttctagcttagtattttatccattcaagagaggaggctctccccccctcctgtattatccaacatggccaccagctggttctggtttccttcattctaaatctctcatgtaataccacttgttgaagtattagaatcatctaaaacttgataagaattagatatagccgtaccattcagtttagctttattcttaaccttccaccctttcgtaactaactgaaactcatcaacaacttgtttccctgtctcagtctcctctgtcttcctattgtcttttttgattacccattcttgctgctttctttctttctttcgacagtcactagcaaaatgtcccattcctttgaaatgactacaaataatgggtttccatttgtaagttatagctatagaaacattagagccaaactcgtcttcaaagtgaatgatgttaggaaattcttattgaattgacacttcaataagaactctcagaaacctgagtttacctcttcccttagttccatcatctaccattagtggctctccaacctgaccaataatcttaaataaagacttttgaccccagtattttagctctaagtcattcaactaaacccaaattggaaaagtacaagtgtcttccttcttgaaatcggtatttggatcccattcatgatcattggtcatttattgaggaagatgatgttgggttttgtaccctaaataaaacccattttaaaataattagatttactaatta

SEQ ID NO: 380864 - DNA, 3942 bp, Cannabis indica
tttacaaaagaaagaaaaagagaaagctgttcgcaaatttacatgcttgtttgccttttaccaaaaatcccaactcaaacaaggacaacagcttcagctatcatcactaccaatataataatttgagagaaagaaagaaagagagaaagagagagagaaagagagagagatactactacctttccggagactcaaggaccagaccaaacaagctcttttcttccttcctaccctcaaatttcgtgtacaagatttatgtcccgctttattgagatgttctcgcagacgaagcctcacccaaagagacggaagtaagagaagaagcccaaactcgggcactccttgcaccttctcgcaaattcctagtcttgcattgtctcagcttggtccagaaaccgctcacgtctatcatgtggctgactcgctccattatctggttcgtttctctaattattcctaagttcaggtgaggagcacatgaaacccaaaatgctttgacgcgagataacacccttgggaaaatggatacgagaaccctgaaacagaggaacaatatagagaaaaccaagtatggttccctcttcgatacctctttcaaagctgaaccgttcattgactgaaatatggacttttcaccactttccaagccaatcggttgctcctcgtctacatagaagactggttcaagtcctgaaacacataaataggaatttgaaatcagctccaaaacaaaaggtaagcattaatagctctgcaaatgtggtgttcattgaaggttactgcaaaagtacaatactagggaatcaaggaattagtaattatctcaatcaagttctcgatgacaaacgtacaataatggtaacaattgcaaattgaaaggcataacaacaacacagcgaaagcccgtttctgttggaggtttattatatatattattttatttaataatccataaatcccaagttcctctctgtcttaaccccagttgtccccaactcgcttgtttggggttttggttcaggttgtttttcagattatacaagacgcccgaccctctcaaagtaactaaacatgttgttttccataacagctctgttcattcatccaattaaatggaaatgaattttagtctgagtcgctgtgttgagagtttatctagtgctagggttctatcataaccaaccctaatattggcaacaaaaaaaaagaagaatcacctcaattgaaacgagagggattatactgatcctacctaacaaaaaaaccacaaaccaataaaatgaatggagttaaaaagcacccttatatgcaacccaagcgtctcccagggctcgagatacacaacacatgatcctccaatccctttctttatgcaaatcatagatatataacatatcagttaaagggttctgacattttccccccattcttcaaccccagatgtgatgtatcaacattgaatgggtcaaacaataccattaaatgatatatgagtaagtatatgtcaaacttatatggggtcaactgatacaaaatctgaatttaaagaaaagaccgggtcaagagctgaagaccagtaagctcaacatcattgacatacttctatacatatgatagaaacagtgcaacgaatctggttcgattttgcttccttcgtgtgaggaagattactgataattaatgtataattagtctttttatattatttaataattaatatatttttgagaatatgaaaagaaagaaaaagggccctacatcagttaaaatcaactaagacaacctcccatgaacagttggaacaggaaaataattacatatcgatgagctggaatcaataatttcgacgaaaaacatgtgtccctattggtgagatgacatctcatgtcaggacaaacatgagtaatttgatagaagaagacaagatatgtcactgtcttcctcttgatgtgttgggtttaaggcaacattttctttttatcattttgctattatcaataagtttggccaggtactgccatgattgtgtattggtattgaaaggaaagccatttggtactgaaaagaaagcacggttttggaaacgtttgggggtagttagagacaaataacagggaaggacaagtttttggacagacactcgatttcataaagggtggtgtctaattctagagagttaaaagatcattgatttatttgaattaagcgcaatgtagtacaaactgattatttacaaacataatgaaactaagatatagttaacaccagaataatgtactcgtattcacataaatcagaaagtaatggagcaagcggaaaaagaattaaatattttctatcttcaaaagaatcttaccagtggttttctcatagaattggacaagggatgacagatctttaggaccataataccggactcttgatgtctgattcaccagaaatactgaaggcaggctatgaattccatatcttgaaaagacactgcaacaaaggaagaaaaggctaaacattataactaacaatatcgctgcaacttcaaaagagacaattctgtgaacttcgttaactaaacttgactctcgatcctatttgttgttgttcattaatttttgctttacaagttgctggatataataatgcaataattggaaacagataaatattccaaggtttatacgcaagttttaactgaaatatcttacgggtgatggtttctagtgttgccggttttaggatcaagcaaatccatatataagcagaaatacattatcttttaaatccaatgttacttagcttattttccctctattatttaagtataaaaaaacaagcaagtatgttaatacaaatatattatcatcaaattccaagcaggtcaaactaataacacaccttggtgctgctgaagattgttcaactgccaaatgctctatttgcgggaacatagagcttagtgcctcaaattttggatatacaccacgcgagaatggacaccaagaaccataaaagaggacagctgtatatccaattttctgtttagatgtcagtgttctgtcaaggaagcctccagtcacctgaagataataaagaaacaagtgactgttaaaagaatataccttcttttatattaaaagcatattattagaactccatgaagcataaagtaatgagtaataacaagagtatgtgaacactggtttatattgacggtaatcacaaagggtcataactctaggctccaccaattaaacctttactagattcaaattctaaatgttatcaatttgcctaccatatatcagaacatttatgtaaagaataaatgaagaattttaggactgtagaaatgttctatcctacatgcataaaataggtaatacaatttttttagaatcattctaatacaagaaacatacacgcacacacacacactctctaatatatatgtgatactttaaaaccttatcaatattcaaatttctgagcttcaaatcccaaaactatcaaacaaaggcaaccaaggcgaccaagttaattgccaaagttttatgtacattcacatgcaaaaataataagctttgcaatttaaatgtttcaaagagtaatctatttttaaaggcctccatgcaagtttacatcatcacataggtgagatatttgaatcatggtgtagttacatggtgcaagacaagaattttatagaagtctcagcagaacccctacccatttgtttcttctatataaagcaataagcattgagatgctggcacatatttggaattttgccttaaaatgagagtgtgcttgagagtaagcctcaaagtcatccatatttctaactcaataagtaagcctcaaagtcatccatatttctaactcaataaggcatcatactcttaaaataaaagcagcacatgctttttttaatctcaaaaatccacg

SEQ ID NO: 380865 - DNA, 1881 bp, Cannabis indica
tttttaactattatgaagacattgattatggagagtcctagagtcctagatacataaacaatcacaaatatagcaaaatatattacatatgtatatgtatatatttcttcatatagtctccatgttttgtgtcacataaacatcaatcacattgttcattaattttcataaaattaataataaaatcatagaaagaaataagatcaagagtaatattgtccttggaaaaatagtttgaattgaaccctacactacatgttatgactatgatattttatcatgcttgaatgaatagttgttacataaaagctaggcaagaaagaaaaatcttatttttaaaagaaaaaatgtaaaataaagagataaatatgagatgagtgtaatcctaaagaaatacacgtggagagcattaattggttgtaatctattaagtgggcccaataaattggtggacgagagaaagccatataggcatcaaaaaacaaaaccaaaaatcttgatatccaatgagattgaagatatagataccataagataagagtaaaattactattaatatgtcacaaaacttaaccaaagtttctcattccaacatttttctcacatatccaaccccctaaaaaaacacatttggtgaaactcttaaatttttttcctctctttttcaaattctcaaccaaccatgtctgcctcttccaccatggctctttcctccccggctttcgccggtaaggccgtcgagctggcgcccgccgccaacaaaatgaacggcggacgagtcaacatgaggaaaactgcctcaaagcaagtttcctcaggaagcccatggtacggcccagacagagttaagtacttgggcccattttcaggtgagccaccaagttacttaactggtgaatttcctggtgactatggttgggacactgctgggctttcagctgacccagaaacttttgccaagaaccgtgagcttgaagtgatccacagtagatgggccatgcttggagctttgggctgtgttttcccagagctattgtcaagaaatggtgttaagtttggtgaggctgtttggttcaaggctggctcacaaatcttcagtgaaggtgggcttgactatttgggtaacccaagtttggtccatgctcagagcatcttggctatttgggccactcaagtgatcttaatgggagctgttgagggttaccgtattgctggtgggcctcttggtgaggttactgacccaatctacccaggtggtagttttgacccattgggccttgctgatgacccagaagcttttgctgagcttaaagttaaggaactcaaaaatggtaggttggctatgttttccatgtttggattctttgttcaagccattgttactggtaaaggtcctttggaaaacttggctgatcaccttgctgacccagtcaacaacaatgcttggtcatatgctaccaactttgtccctggaaagtgaagagtttaggaagagaaagagagagagaatgagagaaagagaagagtttgtattgttcatattggtaatgttatgggttttatcttttctttgtttggtgatgatgtaaatgtgttgagaatcaatgaatgaaaaatcatattgtgaatcttgtcgtgtgctaatatcatttctcgttttaatctcactttattatctatttgttttgtggtcatcatgaaactttttattaatttatctaaagatgtcaaagactgagaatagatgattaatgaaaaaataataaaaaaaattgcaaatataaaatatttaaaatttgaattttttgacgtaataatatcttacttataatttaaattttttatagtaatacgtaatgtaaactgttacataataatttt

SEQ ID NO: 380866 - DNA, 3240 bp, Cannabis indica
atttctaatacttgaaattgatggaaatagaatattgttatgatggaaaaagatatttgggctatctcgggtaagcaagataacttttggctttgacccgtacttcttggagttagatcactataaatatcccatgattaatttttatgatagggtagatgaaatagttgaaagcccgacccattttctttcgcctacctaatgtattgaagtagactcgtttgtttagatgaaatatccgagattctttcaatacagtatcttcttaggcagggaagacatttcattattttctttgggggatcaaaaatatagtagtgttaatggttggacccaaacattgctaatgtgtttattacttccatatggcttactttttttatgttcttctctgcaaaaaaaaccccagaccatccagatgggtcttataaacaacttcttgggaaatattgttgccagaactaaggagggaagggaggacgcaaagccagccaaggggaaaggtaagtctgggacatcttcctggaccagagttaaagaatcaacacctccacctaaggtgcaagaggttgttcctcgggctttgacattggaagctgttctaagatcccacaccctagaggctacggcggaagcacctatccaggaagctgctcctggatctcaaggtcaagaagttgtggctggagttccctcctaggaaactattggggcttcggctcttcaagtggaacgtttgcagcaggttccacttgccactcaacatgtcatcaccgttgaggaagatgatgaggaagatggtgaaggaatggtcttcaacaagaagaggacagggtccaacatcgataaagagggcaagaggttaaaagcagaaatcaatttaaaataataaagctaaagaaaatgaatcaaaaatgaagaatgagactagatattttacgtggttcaagaattagcaacctctagtccacgagtcaatattattacatggttagaaaagcctatttgcacaagtattttgccaagtatctgaaccctagaatttgcatgagcactcaaagaatgagcttctaactatttgcatgaatgaattttcatatatttatagagctagggttctaatacgtgaaccttgcccactgatgagataaatacagataacatattgacattgagtccatttgatggagcccgacccatgaggcattgatattttgttgacatggatgcggcatcatgttgatagttgtcaaaaatgtgtcttatctttgtggataataaagacacataaatacatgattgacaacgaatttgatactaaactagctatctggacgcttcttagttacccttctggaggcactgcttaatgacactcagatggctgttgtggtggatgcttatatctgaatggcttaactttgttaatagatccaatccattatattgattaggccttcaattaggcctattgtagctaaactgaatcatcttggaattacacatgtcctttaactgcaaacacagataacattgaggttcgtctcgctaagtactgcgatttattcactaaaaagtgtctccacttttccagctcgtcaagtatcataatttattgaatatggagttgttcatctcttttttttctccaagtaaattgtttctacatgatgtttctaccatttttctattatgttcgtttatagtaagcttaggtttagatgaacataacgaacattatcccagataattttatcttctctaagtgaacagattaggtcatgttcaagcagatttgattataacttttaaccacaagtcttgctttgaaccttcagctgatttgatcaacaccttcttgttgattataactcttagccacaagtcttgctttgaacctttctacataaccatcaacattatatttgattttgtaaacccatctgcaacctatagcatgttgtttagcgggcaatgtcacgactatccaagtatggttcttctcaagggcatcaaattcattgtccatcgcattatcccactcaagtatgccttgagcttgactgaaaaattctggttcataatggctagaaatggccaatattgctgctcaaaaagtggggaatagtttgctgtagtcaacaacctgagagatggggtaaggagtaacatgagaaggtttttgaaacacattaaaaaagttagtctgagttagaaaacaatgataatcctgtaaatacgatagcttgtgagagacttaacaggtctatttttggaaagatcattattttgtgaaggagaatcagaattagacatgtcactattctgtggggaaagtgtagacatgagatttttaggatgttgactctcatcacttgagagatcagtggctgacttagagaaaaaattctgatattcatcaagaaaagaatcatctgaatgaaaaaggaagatagtttcatgaaattggacatctctagagcaaaagattctgttggaattaagatccaacaacttgtaggctttcgtaccagtagggtagcctagaaaaatacatgggactactcttggggaaaattttaatctattaacagataatgtggaagcataggccagacaaccaaatgctctcaaatgagtataatttggtggtttagatttaagaacttggaagggagagacatgttgtaattttggtgttggagtcctatttatcaagtaggtagcagttgacacacattcattccaataaacttagggtacatatgactgaaacaagaaagctcgagcaagatttagtaaatgttgatgcttcctcacgacaacagagttctattgaggtctataaatgcaagagtgaaaatgaacaataccaagcttactaacaaatccacaaactgtaattccttggcattatctgatctaatggctttgatggtctttcggtactgagttttgataagttggataaaattagggatagcaatttgtgcttcacctttgtttttaataaaatgtatccaaggatacctagaatgatcatctacaatagtgataaaatatttgtgtcctccaacagtaagtgtattaaaaggtccccatatatatacagtagaacctctatccaagaatacacttgggaccaagtaaattatattctaatttggaagttataactaaatagagttacactagaaaaaaaaaattaaaaaccaaagaatatcaatgtaacaataataa

SEQ ID NO: 380867 - DNA, 1255 bp, Cannabis indica
atataatacacatacacatatttcatatataaatgtgttcaatgctattcttacctcatttctaaattcaattgtactggttgacctgaacggaaaattacacgctagatggatgccctatgtcacatttacgttaatggataaataacacgttaaaacctaatccaaagactgaaactcacaactacaagttttgctatcgataactaacttgacaataccttaattatcaaggaaacactaaaattaggactctaaaaatgacacgaattggtaaatcggttaactggtttacactagagaaccccaaaaattccaaaacatgcctaaattgttcccaaacttcacaaaaccttccggaccacctataataacatccatgagtaaaatccaactggaaacaacaataagaaaccacaaaaattcaaaacaccattgtcgagtcaagtttgagttctttaaactcaaacttgctcaacacaaacattatgcctcaatacaacttcaaactagctctaatcaacctaaaataaatctaaaaaataaaccctaactaccccataatcagatagtactaaattaaaaactttgtatgctcaaactcaactaataactcataagatctttgtgctacctcaaaatcttaaagaaaactcagaaagcagtcacaattgaggatgatttcctctggctctagctagggttgaaggagagagagagagagataacatttcaattttttctcttttctctttgtgtttttctttaattgattaattcaaataatcgttgggaaattaagctgaattaaaatgaaatggccagctgccaaaatggacaaagcaacctaattttctaatgaaaaataccaaaaatgccccccttgcaacttacgcaattataagcctaggggtaatatggtccaaaactataagctcgcttaaacctagcattctaaatatctcaaatatttgtctcattaagtattaagttctaaacttacccatgtgactctaacggtcatccagcgcatttcccatcgtcacttaggaaacatcataaaaattacatatttctgttgggttttgtgccctaaagaaaacccatttcaatataatcagatttactagttaataaagatcagaattaacattttatgatgcatggttcacatgatttatttcatgattgtttgatctgtaaattctattaagtccaaaacatatgtatttgatcatgattatagtgttgtcag

SEQ ID NO: 380868 - DNA, 3232 bp, Cannabis indica
tacagtcagtatttcactttctcaaataattacataaaggacagaataaacattaaaaattaagaattaggtctttctttcgttgtggcatcttatttgtctaacctatctatttgttatattgtagctatatcaattaacctagtattataaacaatactagttaattgtgttttatttttttcttgttccacacaattattggtggtccaaagtccaaacctgtaacctcaccatgtgttcaaaagacatataataaagcattatgaaaaatccctacacataacaatttaagtaataaaaatattggtcaacatcatgtcataaatttttattctaaaattttttatcaaggataaaatttggaacgctgctgcaaatcgctatatatcttatcatctgggtgtgtaactggctccagcagataaagtatctccaaattaacgctgtcgttttcaatattggttctaggagggacatgggaaggagtccttgctgcaacgtacaaggattgaagaaaggtgcgtggacaccagaggaagaccagaagcttctttcttatattcaacaacacggtgaaggaggctggcgttccttaccccaaaaagctggtaattatcatttcttttaattacttcattcatcataatatgtatataaatatttatgttctatttattatatgtatgcgtatgttgatcaagatggtaatttgttataaattaaggcctttcgagatgtggaaagagctgcagattgagatgggctaattacttaagacctgatattaagagaggtgcattcagcccagaggaagaactgactattgttcgacttcattctgttctaggcaacaggtaaatttttgtttttattatattagtgggtttttgtttgtttccataaaatttgactagctacagtacgtataacttactttaacctgtaggcactaaataatttacatactaatacacctaacaattaatggaagagcttaagtcgtagtacatattcatagcaactcaaacaataaaaataataataaaaaaagttaaaaaaatagtatattaaatcattctacctattttatatagaaaattattattatatatattcaatttaaagaaaatgaaatataataaaacgttttaatcatctaattttgttacattaatattaactaatgaacatggctaacatatttcatcaggtggtccgccatagccaaaaatctaccaaaacgaacagataacgaaatcaagaatcattggaatactcgcctaaagaaatgcttgatcgaatcagcagcatatcatcatcaaaattacaattcttcttctactacttcaactattcatttgaaaaaaaatgatggaactgatccagcaaaatcaataggctcaaatacttcaactactacttcagctcatttactactcaatgagctagctgcatctcccaagctcaaatcctctaataattcccttgctttactcttatcccaaccataccgggccggcaatggcgatggcgacgttgaaggcgcccgacataaaaaggtcttgaattcggtaactgtgcttaacaaattggccacaacttgtttaaaacacaatgaattaccaaactgcacaattcatgatactctcaagacagttttatccaaatcatgtgccccatcttgtgatgctgcaaaacatagtaagagttccagtatttcaattccaatcatcgaaatacctaataaatgtagtactgttatggagagtacaaaggaggggaatggatcaatattagaccaagaggcaaagtatgtgaatcctgccacatcacctcgagtaatagtattgaatgagatggcttcaaagttggctcaagtgaaacgacgttgtcctgcgttgcttaataaaagtacggacttggtagcaagcggtgttgtgaccgagtccaatgggtcatcaccggctttgcaaatccctggccctgctgagtcacctgtttcccgcaatgatctgtggctactccatgacatcgggttccgcacacgaggggtatcctcggaggaaactcctggtgccaaggacgagttgaagtatgttacgtttagtgaacttggtgatgaacttgatcaagttgatcagtttatgagaaacttgatgtccaattttggagatgatctcattaattgatatataaacttgtgacttatcgaccaatgtactccaagtttttgtaagatccatgtaacttttttttccctgtatatgtatattaacacactacaacaaatgagatttttgctagcgtatttttgttctcgcaataattgggtattgtgatggtaaaacaatatttagttgtacaggtgcctttttgcgctcccaaaagggattagtaaatctgtgttggcattggaacttttactagtgcaaaaagaaaatagctagtgaaaataatttttctcagagcataaatacgctggtaaaaattagaattttgtcagtgcaaatgtgcgctggcaaaagtctaacttttaccagcacattaacgtactggtaaaagtttaacttttaccaaaacattaacgtgttgggaaatgtgttaacttttgccaacaaaaatgtgcgctaggaaaaatttttatttttaccatctcattaacgtgttggtaaaaagttacttttaatagatggatatttgatttttatgagcgcaataataaatcggtaaaactttttatttttttttaattaatataatttaatttataatttttatcaattattttaaaattaaaataaataaaaaaaacatgaaaggttaattataaataattaataaaataaaatattaaatttaattgttctaattatacatttataatataattataatagtctaaaagttagtaaataaataaatatctagaataccaacataaatttaattttcacaaataaaataaaattaaatactattatgagtcatcatcaatatcctcattctcatgacatgttgtggtattttcaacacgcaagtatatgtattgttaacaaattatagactcacaaagagtgaggtcgatcccacaaggatagtatgtaagtactttaaaattaaatttttacttctatttggctatataaaatttaagagaaaatttaaataaaaaaacagtaaaaataagaagcaagtaaattaataagggaattaacaatgaataaaggtt

SEQ ID NO: 380869 - DNA, 2535 bp, Cannabis indica
ttgaattaaatatattatttttactaaaatgaattaagcaatttaaatagttagataattacatattaaaatttcttcaaaattgtaagtaattttatatagtaaaatttatatggtaacctatatgacaatacttgagtataatgtatatattaaatttgagcacgttattggtttacaagtatataagatattttattttagctttagtgctatactaatacaaagatatcaatattactatgttataggtacaattaacacacatgtttctcagcttacactcttccacgaacctacgccagccaacgcttttcatcgaaaacataaattcaataaaatataaatattataagtatatatatgtactaaggagtccattctttactcttatggtccaccaaaacaaatatataatatatttatgacttttacgttgaaatctgatctggtcaatgtgttaaaaactgaactttatgtgagaaacatataaacaacaattaatatgcatatttcactcatcaatgctatatatataaatatatatatatagtaattgtatatttatcaagaataaaacacgtgcacgcgtcatgacccatgcatcttatttaattcagttaattattatgcatgattatatccaatgaagaaagtttggcttataaatagaagagattatgagtccccaaacatatatctctaattatcttctctgctatatattaatctcgtatagctgcaattccaaactatacataaatatatatattctagttacttattcgactcatacacttgaggaagaaaatattatcgattcttcaaaaggtttagttaatatatacactagtataaattagctgtttttcttcatttatattgttatatatttattagtactgcaactataacacaaaggggtctatgtaattaatatataaatatccacatatatacactcagctgaatctgaatctatgtgtaataataacaaacgcttaattaattgcctgaatttgcagaaaggatttatacaaacagattgaaaacaatggccgaagaacagtattcccaatttgccaactatgaatgcgccgtcaagaagaatctagtgatcataaggtaggtacctaattaattactatagctagattaattagatattattatgtatatatatatatatatatttatacattaattaatttacattatagtgattaattattaaaaaaattgattgaatagtgagaaggtcgaaagcgagagcgagagtgaagaggatgaaagctttgacaaagtacgaccagctgagcacgatctcattgttgatcctcttaagagaattgctcatggatttaagcactttctttccaacaaatataagtaagagttaataaattatatataactttttttctaatgtttatttaatattattaacatttataatataaaaatatatgcatttgtttttgaaaaaaaaaccacatgcctaattaattaattatcttattttgcagcaagtatccacgcttgttcgatgaacttgccgtaactcaacatccaaaggtacgaatgcaaaccttaattaataattaacacaaatgttacacgtacatatttatttttgttgatctatctgtatatttacttaatctgcattaattacatgaacagtttttggtgtttgcatgctctgattctcgagtgagtccttcgcatatcttaaattttcaacctggagaagctttcatggctcgcaatattggcaatttgattcccacttttgacaaagtaattaattaatagttaatcaaaatatacattataaaatctaaattatttcactaattaattaaataagaatgttattaacttattatataattaattatttttgtagggtaaaggctgtgaagttggatcaatcattgaatatgcggtagaagagcttaaaatagagaatattttggtgattgggcatagtcattgtggtggcgtcaaaaggcttatgtctcaccccgaagatggttcacgtcccttgtaagaatattaatttcaaacttattttctttactaattaatcaatatgaatgtacatatataatttcttttattatatacttaatcatgatataattaacttgttgatcactattaaatttgcagcaatttcattgataattgggtcaacatcgctcaagctgctaaggataaagtcaaagctgaacacaaaaatttatcatttgaggaacaatgcgaaatatgtgctgaggtatatataatacttaaatttattaaatatatataatgatgttacataaatataacaattaatctaacatattttattgtttaataattaattgaattgcaggaagcagtgaatatctcccttaaaaatctatattcttatccatttgttcgaaggggaattcaagaaaaaatgatagcacttaggggtggatactacgactttgtggctggatctttcaagctatgggaacttcagtagtacttaaatattaa

SEQ ID NO: 380870 - DNA, 1732 bp, Cannabis indica
aataaatgcagcaacaaaagtactacaatcactgtgtaataaaacagttattaaaatagttaaaaacaattatactgaaacacatgaaaaactaaaatgcaacgacgcaaataaaattcacttattttcctgactaagtagggaagcaatctccactactcttagtgaagctttcacatcagaacaaaaatctacagcaatctataaatatcatcacgaatatcaaacaaaaaaaaaataaaaataaatcataaacgaaacttaagaaatttatgaaaaataataaaaacaacaaatcgcactacagtaagcattcaacatacataaattcaaaactataaaaataaaaaaatcaacagcaagtagtataaactattaaaaagagaaacatgatttcgaagttgagaaatggaaagaaacctaaaaccaactaatatgaaatacggatgaaactcaataacagatctaaaataaactaggaaataatatttatcaaagcataagaaccatacctaaaagcaataaaaactaaaatatggcaaaattaaaaaaaaaatgcaatgcaaacctcaatcaaatgaagagcttgattctttctctttttacaatcaaactcccctcgactttctctcctttaatgattttaaattcttcttggaatgagctcaacaaaattatcatctaacttccttctttctttcccttttttagaaatagatttcaattccatttttaaagtttgagggtgtgtaactgtaactttttccaagagggagatggagaagaggaagaacgaattattgctatttaaatagaaaactgtaagaaaaaaaataaaaataaaaacgtggctaaatcttggacaatagttgaagatcgtgggtttcatgttttttgaagaaacatcttattcaaatcgtgtaaagatttaaaaaataaaaaaagaaaatagaaaaaaaaaaaaagaaaaaaaaacttaaaattgtgtgtgtgcaagtttcttcaaaatgggaaagtttgcaaggcttgaaagagttgaactttatttggtgtggaaactcattgataggaaagaaacttttttggaaaaaagttgctcctttgccccaaagaggttgttgaagagaacctgttactgcagcagtagctccaatacaaccctgcatagtggactggtgaagaaggtgttactgtcaccatgttggttgccggagacttaaaattttgggttttgagattttcacataaataaatatttaagtgtaacagttcatttataaatatataatatggaaaataaaatattatagtattcatgacgattgttagtgtgaggtccaaagctttatatgcaagtttcatcaatgaaaattgtgtgtgcaaatggtattttggtaaataaaactaaagaaaaataaaattgttacccaatccttgtgaatgtatttttgtaaataaaataacaatttgtatttttcacgtaaaatttttattataatattcattgcagtaatatttaatattactatattattaccatatagttttatttcacttttatattatactaatctgttattgattttaattgtagagttctttctaatattaattttgttttatatttatttttagttgaattaatatgtttttgatagatttaatcacaaaaaaataatatttaatcatttattaaaggaataattacataaaaaatataaattgacatttt

SEQ ID NO: 380871 - DNA, 2315 bp, Cannabis indica
atatttatatatatagaaaataatggcatgctttctaggtctgggtccaggtcactatgcaagtgcacataatcaaatagtattcacacatgtgaggtagatctcacagaaaaataaactgaataccattaaattatacttatatttctatttggtaaacaataacttttatgaaaaataaaaagtaagactaataaaaataaaattaagcagtaaaagtatttactcaaaggatgaaaaattagggaaaagaatcatgttgttaaattacccaattattaatgctaattattattcttctttctttaagttaatgacagattataaaattaacctaactcttttaagatcttttaggccctaaatcatatgttatctattcatctcttggatagactaatatataatatgcattaaactataatctaaatgtcacaaaggctatgcgaatactctcatcttacatcaaaatcaagcttatccaattttagtattctcaatgcacacttttcagattttgtattgagatcataaatcatgcctaaggtgatcaatctcaaatatgtaattaagtaaatatgaataaattcacaatcaagaaagcaaaaatagcaattagcataaactcatggcataatctcaaacaacattcataaaatccctacaaaggagtttagttcataatttccataatcaaacttaaaacagaaaatagcatagaaaaaattaagagagaataaaaaactagttggagaaatcgattcggattgccaccagctgctcttgaagttctctcctttgattctaagtctctaattcgaaatgaatgacttaaaaatcgcatgttctttttgaaaagaactaggtttcccacttaaaattgtgaaagtacaaaactgcccacaaatttgtaatgaaggcgtcgccgtgaccataaaaaccctagtcgcggcgaccgttgaaactcaaaaatacaatgttatggaaagcttcgctgcagccataactcatgctcaccgcagcgagctttgccagagatagcttgaattttttttttttcatttttcccaactttgtctagtctaactctcgtgaatattttctttaaacacccctggaacctaaaacagagagaaacaagcgtaaaattttcctaaaagtagatacaaagagcaaaaacaacactaaaaagtgactcgaaacttaggctaaaaatagcctaacaggtccaggtttggtctcgggtcccgatctggggttcaattcccaggttcgggtccctagtcccaggtccaggtcactgatcttgggtctgggtccccagtcctgggttcgattcttgggtccaggttcaagtctgggtctcgggtttagtctcgagtcttgggttttgccttgggtttgagtttgggtccaggttcaggtcagggttcaagtatgggtccaggtcccaagtttggtcttcgatcctgggtctgggtcttaggtctggtccgggtctagatctgggtttgtttctcggctctaggtttggatcccaagtctgagtcccaaggtcggatctcaagtcagggttcgggtccgtgtccaggttggagattgagattgaccccaaatccttttgtaaatattataatacaagctaatacagactatttgttatgtattaaataatacaacttaaattgtattaaattttttgtcgtaattattaatacaatacattgttttatccaaagcatagtattatttattatgtaatacaatacgacccttatacagcctaccaaacaggccctaaaggaattaaatctgattctttcagaaagcttaggtttcacttattgtatgttatgttcccagtcatccatcttattaagtttccaaaataaacttaataagaatcatcttctttgagaaacttgaacgagtgaattaaaaaacttaaagatcacaaacaagagttcacgaatactcaagatttagatagatctactaatgattttgtgatataaataactcttttatgataaaagacgtgtagataaaagatgtttgtttatatcggtctaatcatgtacaatcaaattatacacaatacatttactaaatgtcactactagttagtgcttagtaaatcgtacttagtaattctatattaaagattccatacttgaatacactaccgactagttttattcaaatggtatgatcttaattctcttgtactcttacaagaccatacactctctatatgaataataatttttctaatatttattaattattttttaataattaacatattcatttat

SEQ ID NO: 380872 - DNA, 1423 bp, Cannabis indica
gttcaaaaaaaataccacgtgtcaacaaattattggtttaaattatatttttaatttaaaatgatttaaattaaaaaaataaaataaatgatttaaaaactaaaattttttaataattataaaattatttgtttatttttctttacgtttttttttttttttttttttcttatttttctattttccttttctctttcaatttgttcatgctcactgcccatatcgtcaatggcaccacccaccaccaccatctaaaataatttacgattcccacccaccatggatccgatcatcgatcaatggttcaaaaaaaaaacaagttcagtgatcgttccacctgactcaccttctccttctcccacctccatcgtatttagattgtcaatgatagaaatcaatctcagatccaataatgggttctccgattttcagaaggaagttgttgtagaaggctctggtcattactggcgaactttaggtcgacattggtgtggtcctctacctgtcacctctacagatctctggttgaatcgagtccatacctggagtttgagatctggactgaaatacgcgtcactaaatcagcaagaaccgaattgggtcacgggagaaattctaggttatgatcaaaatgtgacgcacatcttcttcttcttcgatggcttcatcgccgtttggggctcggtgaggtttatgctagttcaatacaaatatgtttagaagatcggatgggtggggtttgggataaacaaatatgttttttttagaataaacactattattataaattaaactggtaagtcatttacaacaacagagtagataggttgaggggtgacctcagaccaaaaataagcttcttccagccctaatgcaaacttagctaagtcgtgagcagccgaattagctaaacgcttaacatgtgataaagttacatcagggaaaaaggaaagaaagcaagagacatctacaattagatcattaaatgctgaaattgtagaaggagtgcgtaaagcattaacaaccagcagtgcatccgattcaacctctttaatttggagctgccattgagatgcccaatttaagctgtgaaagagagccttagcttccatctaatgagaggaaaaaaattccaacaattggcattgagagggcagcaaccacttgaccacgaaagtcttgcacgatagctccaactccaatggttttcttgttggcatcgacagcagcatctacattcagcttaaaagtaccccaaggtaggaggataccatggaatagaggcagtagctggaggttctctggttgtcatcaatattgcagcaacaaagagggacagcagcagcaacttcattgttgctgtgatattgttggtggctgctctgtaattgctgatataagaggcagcaaaagttgcaagatc

SEQ ID NO: 380873 - DNA, 1244 bp, Cannabis indica
tttttcaaatattaatttttttttttgaagcaaaggagaaaaggttattcaaaacatccaccaaaatagtataaacaagctgccaaagaccagcaaaaatagccaatacttatacattgttattacatcccttacatgagtctctttttttgaacacagtaaacaaattaccacccatcactcttgctttcattgctgatctaatttgagaactaacaaccttagccgaaaaacaaaaagactcaaaagacacatatttttgttacaccaaatgaagtagatggtagcagctttagtagcgttaattatagaagactgaaaatcaactctagggtgctcaacattgctttccaaactagataattagtaggccaaataaattgaccaaaccaaagatgaatctcccgaaccgctgagtgaaaacacaatcaaaaaacacatactagagcatctcattttgagcctcacaaacagaacaaaacaggaaatctaagtccataaatttcccaaggcaatcacgggtaagcaggtggttgtttatcgcttgccaacaaataaagcgatgatttgacacacacagccgataccaaatagttttggaatacaacactttttcagaagtaatgaaagacaaataaaattcctttaccttaaatcttccttttcacacagctcctaacacagaggcacgatccaatttatccctcagcttgacaagttcttgaaagtactagttgtaagtcatgctctttcaagtacatggccttaggcaatcttgcttcgtagatatagcccaaataaaccttactccaccaaactttttaagaagacacacttgctcccaagacaagaaatgcaacttactacgcggacctattttaccccaaaggaactttctacaaagtttatcaatctcagcagtgaccttataagataaaataaacaaactcatccaataatctcgcactctcatttataagaactgaatgaataagctaggatctatcagcaaaagacaaattcctgctagaccagtgattcttatgaatcttgtcaataatactcctgcaatctgccgctttccacttaggaggcgtttggttgggagtaatgaaaatataagaatgagaatgggaatgagaataagaataggaatggaataaaatttaaaatgcataaaaaaattgataaaaaaatcattaaattttttttcttgttacattggaatggtcattcctttcttt

SEQ ID NO: 380874 - DNA, 5176 bp, Cannabis indica
aaaataataaattaaaaaaattactcattgaaataacaccctccctcctcattggttcttctcttatttagtatattgtattagcttctccatcatctatctatctatctaagctctaaactctaaactctctctctccccaccaagaaaatcaagaaaggaactctaagcactaatttattgaagaaaaacagtttcgagatatgggtggcggcaatggcaatggcggtgtcgtttttcctttagttttcttctctttcttcttcttcttcttcacttcaggtgattttgcagttgcattaatcttgatttttttttttaatctcttctcttcttgttcatacactttaatctttgggtctttttttttctgttaaaaatgtagttattatagttttcactctttttggttgcattttttgatgtgaaattaagtgttttatctttctaggctatggtaagaagaatttctataaatttataaaggaaaaagaactaaatatatgcaagcattaaggattttatacacttgtatatttttatttatttattaacttttttaaaattgattttataaactattataaggaagtgtctcactagctagattctaattagtaattatagctttatgttaccatttttgttcatttcaaatattcagacattaatttgttacttcatatatggccaaacataaaagaatgtttatatatactcattcatgcatgtatagaattttttggttgttcaattcatgtgttttatgtttcaatcttttagttccattcatgttcataattatttgtgttctatcttcaggtctaagtttggcagagaaacctcacttgaaagcaatccagagaaatgaaattaaagagaatcaagaaaacgagatacctttctcaacttcggggttttctgaagagttggattcgattcctgttgtcaacccgactccaactctaactcctactgcaccgtcgtttaaccagccttcccaaacaccaccgcaactgacaccgccaacaatgacacagccaaccccaacaacaacgacccctacaacaacgacccccacagcgccaaccacaacaacaccgacaactccatcatcatcgggtggaggaagctggtgtgttgcgagtcaatcagcttcagagactgctatacaggtagctcttgattatgcttgtggctatggaggtgcagactgttcagcaattcaaccaagtggaagctgttataacccgaacactcttcgtgatcatgcttcttatgccttcaacgattactactcgaagaatccagctcctactagctgtgtcttcggtggagcagctcaacttaccaacactgatccaagtaaggcttttatcctgaaaaacttcagctcatcattaagatatctgataagaacatgaaatttaaagactttccatggtcgtttagtgatttcgagaagtaacttaaactcaaagattattaatccctaaactaaatgtgcttctcattgcaggtagcggaaactgtcactatgcatcagctaaatcatcatccaggtaaaaaatttcgaaactacctctagcatataatttcctagtgaaaataaagaaaaaggaaaatcaaattgagttcttggtatgtaaatgcagcatgcctccaccatccccaatgaatccgagcccaatgattccgagcccgatgaatccaagcccaatggttccaactaccccgagcatggacacacctgccatggatacaccaccaggatcatctatcttcggtacagagccaacagcatctcccaactcagccatctctgtctcgtactccagaacattgttattcatcaccactggtctctttggcgcgaccattgcagcaacctatcattaaacagaataaaaccatgtcccaacaaattctctgcaagggaggaggcggttattacacttgccgccaccaaaaccagaagaaattcgaggaggcaaagagaatcttgagctataatattctctcaaggcctctcaatcttagcatttgagttatttttatacttcaatatatgtatacctattattagtagactaaagaagcaatagggagaaaacagaagaggaaagaaatttaggttcttgtacttgtaggcacatccttgttctctctatagcaatagaacaaataaatttattatacaaactcatactaaacactgactattgctaacttattgattgactaatcataatagaagtgagtgaaaaaacaactgaataaggcatgtcacaactaactagagattacaattttaacaacattctctaacagaatgaaactagcataatggcagagttagttaaataatctttttagatcacaagatggcattatactgttttgatcaccgacaacttaacaaagtcggtatcacttatctgcttactgtatggaatatttttctgcatttttatttttcaaattcataatctggtagaatgtaaatcttagactgatccagacactgaatatggaagcacaatgcacaagttaacttattggctcatataaacaaaaatacaataagttcaaatttacatttacaatgcaccacagctattatttcttattgcatttgctgaacaagatattcatacacctaatctaacaaggtaaagaacaaacaaacaaacaaacaaaaatcgaagacatcacttacatacttatttcaaacaacttgctattattctgaggattacaaaagattaaataagcagcaacaatgatacaacagtggtacaaatgatagctatggtggcaacaattgaaccttggtcaaatgatttctgcaagcttcctgttcgtgtaaaatgctggaatgctaaatatccagcaatcaccaatgatattatagccccttcttgtgttcccctaccaatgagaacgggaatgagaatgagaaaaaaaaaataaaaaaataatgcaaactcatattctggtgagctggtatcaattacctaaggttcataacttgataaggagccacaatcaccaacaataaccccagaaatggcaactcgagctcacctaaatacatgacaagtccaacacaagatttttgagaaggaaagtaagattcagagcaagccacacaaaatgcatatacatagaaaaaagtaaattaagagaacttaccaggaaaagagaaaaagaggcgaacaactagagctaggaatgcagcccaaataccatactcacccctgtaatagaatcaacaaaaattgaataagggataaatccattcagaatcagctcaatacttgttggtgctttaaggtatagtattttagatagaatatctgaaagacttacttaatccatgcgacgatacttgctggtgcttgtaaggcaaacaatggaatgagaaaagatttatgaataccagttcccttaacaagcattaaaaccctggcatagtgattgaacatccatcaatgcatattttacttaagcaggccacagtgttcattcaataatatcagtaagaaaaaaatatattgcaaaggagctatccaaaaacaaactgagtgtggtttcattaaatatcagaaaacatgacagtaaattttctaaactgttgattaatttggtcttaaagacacttaaaagagaaagtgtttggaaaggaagaggaaataataaaaaattgtcatattttcaaatctccatgtttcaaatttagtaagcaaacacaagaaaatataagaaaggaaacactttcctaacttttatcccactacagtaatgaccagtagacaaggcctttttttttcacaagaatgtgatgaagctctcagcccattaaaataatagttttgatagttttaggccatacaatgttcaaaattcaccttgagctatctaaaacactacatttccaatacaaatcactagctaataaaactgccacctttacccaacaaagtaatcatttttagatacttggctgaataaacgataagctcagaaaacaaagatatcgagctgacacgtggcattgcatatatacatatacacatatacaaaaagagataagagagaagattacacagaagaaattgtggagatccattgaagattccgaacagagagtggcgcagcataacacaccgcaccagatcccctcctcctcctattcttcaccgccattatgctctcgtttccaatcgaaaatctgaaccaaaatccaaaacaataaggagatacagtttcaaaaaattcagatatgaaatcgctcgaatattacaaacctaagctcgctcaagctcgagctggaattcaagttcaaaatctgagctgatcgagtaacaaaattcactcgctcgattttcttcttctgctgagttcgaagagagaggaaaccatagctatggctattgctgtagagagagaaagtagtattaactgacggtttacacgagagagaaagcgacgccatttttaacagttttttttttgtacttgacaacgaaaacgaaagctactggtttatatatagatggagttagggcacacgaaggttatggtgggtagtaagtgcagctgattctgatctcttgacgagactcgttaccgtacagttggtgcattgttattggttggagtagggaagttatgttaggtagcagaagtagaggattattgtatgtaaaagttgagattattttttaataataaaaaaaaaaatttgtgatatttttacataaacgtctattattgcgttctaatgtataattataaattttaatgtatactacaaaaaaaaaaaaaaaaattataaattttaatgtaaaatttaatatattaactaatgttgacttaatatttttttaaaaaatataaaataataaaatgtcatttttactattttttaaactaaaaatttttaataaaactttaataaaaagtattaggtgattctacaatgcactcttttaaaagagatgtactgatgcactttctacttatttcggcattcagaaaaaaaaatttagtctaatttttttcatattcatatacgttatagctatttaagatatcctacaaaattttgagagattcggaataatttacaatataaaaaataatgttcaaacagtctattttacacgagtat

SEQ ID NO: 380875 - DNA, 2100 bp, Cannabis indica
aaggaatatcaattaaattatgaggttcaggcgaggcaacttctcacaaatagtatttaccctaaattatttcttgtaagaatttctatagtgactagagatttcgtcttggttggttttaataagatgatccctaatttttacatcatttatctcaagaatagtttagggtatgtgtattttgggtctgaatggaatggctgaaatttgaggacaatttgattctaaggattctgggattgtaatttctggaataaattgggtcatacttataaacagtgctatcctaatttctaaaaaaatagaacacgactttaacccataaaatttatgaatcgaataacctaaattttttcctagacctagaactattcagacaaataaaattaaatttacctaaataacaaaggaatgcagaaaaggaaacatcaatcaaggagaaaaattaataaaatgagaaagaatatgacttactgtcttgactgtgattacagaagaaattagaatttcgcaattgaaatttcaaagattaaaggatgggttctgattgtttctggaataatagacgtgatctgatgtaacacgtaggaagaaagtgaaagacaatgagggcatgcaaatttatgcattatttatttatgccatataaaaataaattctaatttttctaaatttatgaaagatctccttttttatctttgaaataacttcaaactttattaatcaagttgccccaataatgagaaatacaaccaataatgtcatcttgagagccagattataaaaattgtctctaaagcaaactttttccaatgtatggccaacatatttccaaaaataaattgacaagaactgctgtaatttagtttgttttttgtttttgaaaacattcatcatttttatttaaatgcaatctatattaattacatggcataaatccggagtaacatcactactcctgatcacacgatcagtaactaaataggatgctctagctaagaagtgagcaacactattcgcagaacgtctaataaaatgaacggaaacatcacataactcattcaacaacaacttacagtcagaaataatactcccaaagtaagaaaccattgggattgaacttcgtaaagcttgtaccaatgtaaggctatcagtttcaattaccacttgcttccatgacttcttcttaacccaactcaaagcttctttcactcacaacgcctccaccatttcaggttgcagcacacccgatcgacaacagctaaaagctagccacggatccagcaacacattaatccttgaaccatcaccaactctgcatcttgcccccctacgaacaatatcttgtgtttcaaaaatactacgccaaacaaagctcggattactttccaattctgttgtcaaaaaattccattctgatagtaacgagctttgaatattctaccaacaagagatttagaccgactaaagaatctccaaccttgtttgcaaagtaaactcaaattaaaatctcagagatttcgaaaccccatgccaccttttgacttgtgaatcgccaatttatcccacttcttccaatgaattcctttattattcttcgatgatcgccaccaaaacttacacatcaattactccatctcattgcaagtttctactgggagcaaaaacacactcatcgcataacttgggagcgattgagcaacagatttaatcagaaattccttcctagctctcgatagcaaccttccttcccatccctggatttttttcctcattttatccttcagaaaaccaagtagagctgttttatttgcgacccataatgttaggcaaacccaaataagtgctaccctcgtctgcctcatgaacgcccaagatagagcacactcgctgcctaactccattatctgtgttagcactaaagaaaacagaagatttttgcagatttacttgttgacccgaagccatctgaaaagtatgaagcatatctaacacattagtagcactatctttagaggccttacaaaatacatagcaatcatcagcaaaaaaaacatatgtgatatcataggcccccctcttgctgtaacaccctaacta

SEQ ID NO: 380876 - DNA, 1584 bp, Cannabis indica
tcatatggagagaaaagtttccaatgtgtttaactgtgtctaaaggataaaatccactagcataaataaagttatgaaataaaaccaaaacaaaaaaaaaaaacaaaacaaaacaaaacaaaaatgaaaagaaaactattgttaaatctttaacatgtcttaagcaagagatatataccatatttgacctttaacatgtcagtttaaaaatgtacattaacaaatatggaatggattgtaatggaagttagctatatccacttgataactatcacaaactgtcaaatttatcattttcagttctaagagtacaatcaaggacgcaacatatgtaatgtgtaaataaattcaatgaacaataatatagacaactacttacttacactattcttttgcaaatactgaaactcaggccctcctttatttcatcactgttatgccggtcactggaataatctatatctattgttgatccttctgtcccagaacctcctttactgatttacaatgcaaaccttatacttacaaactcatctgccacatttccacacaaatttttacgtgaagagaacctggaccttctctttcatcgatgtacttgtcacatcaccccttctctcaaacctctttaactgatcacagaacaatcaccactcttgtattttttttacttcttttgatttcgacttcccaataaatagtaaagagttttctaaaaaaaagaaaaaaatagtaaagaattaccaaaccgtgttacagtgttgtcgagttcatacccttcaagtggacactcttctttcgatcgttcgattgatcaaacgttgtagctctgaatgtgtttaatgatgaatcgatgattcgttgtggaaaacatggaaagataagactatggcgtttgacccttactttccctcacttatggtttggtttgggcccaaacccaattgtgcaggaatggttgtcgtcgttcaaggatcacgtggcgcacgtgctaatgatgagctttgataggtggctttggattttcttgtgtggttttcttttaaaatattgattattatatagatggattgatatggttggtcttggtcttttaacattttttatatttaactaatgtattaataaacacacggtatttagttacgctcacgtatggtgtggtccatgtgttgattttatttacttatcatactactaataatgtttgttccaaaagaatagactttttgacttctataaccatgtaacaatttctaacacatcgggaaattgtaataagagtctttttttaaaagactcttattgcaagatcgcttgtgtttctggttgtattttatgattggaaattgttacatgtggtctcaatcgtcgttccttctctctgtacgaaggactcgtccgcccgaggccatcgttggtcgttcttccgctgttagagcccacatcccgccagatctccttgattctttaaaaagaaagttattgttcaaaaaaaaaagtttgttgttagctagttcaaaaagttattgttaattgtttgttaaaatataattagttttgatgatttttttttttaaaaaa

SEQ ID NO: 380877 - DNA, 1220 bp, Cannabis indica
aataataatagttaacagattatatatatagctcaaataatatccaactgcaagaatgtaaaaaaataattatgatatgtacaatagtatctctaagctttttatcccgaaaatattgaaaagaattatcttccattcctactaatgcatatctaatttctctctacttctgttcttttttactaagcagcctaaagtaatagacaccagtttcaatttatccatatttaattctcagttataatttttttagacacctccccaccaaaaaaggggaaaaggttcttcagcactagttcaactaataactttggagcacatatcttttcaatgattactctaatatattccaaaattaacatttatgcatattaataattaaatggtgcaatcaacatatatgcaagaattaacctttcaaacagatatgaaaactgcaagaaagggagtcatattagatgaaatttaacagttagcattaacattaaagaagactgactatggaacaaagcagaatcaaactgaaaggttacattatgcaaatcagattttgaagctgattttaatttctttgcggacgtccatattctcgcttccataatagctctacatcgaagatcttgcatgtctgtttctgcaacacaggtaacaccatcagccatacatatgtaataattttgcaagccaaaatatttattttcttttaagaagtcctacctatggatgcttcatttggcatcaaagtcacactcccattttctgcatctttggtgttgaaaccatctacaactcttgatttaataatctttattaatttattacactcttccctggtcaaaggaaaaaaatctcaataaatatagtaaaatcactaagaaactcaatccaccagaaactagcataggaaaaagaaaaaacatgtaaatttatgagaatgcaaataacttcaatttgtaaaaacgataacccttcagtaagcaaaaataagtccttactaagtatagatttaagttcataaaatcaaggactgtgaaagtacaaaacaatgtcaggcagctaatcacagaaaaccaattgaatgtaatttaattctcattctgagatacgccttatgctaaaagtttgaggagcttgtaaaatattgataacaaagacggtgaagaaaataagctgaacacagcaccaaaaagagtaccagatagtgtgtgtgtgtgtgtgtg

SEQ ID NO: 380878 - DNA, 1415 bp, Cannabis indica
catgctggtctccagaataatcaaggtttacctgtaatgcatgttgctaagtggctagcaatggaggtacttattctgatttaatttgatataaattatctttattacgtgcactggatattggaactatatctacttgtcttacattacatctcatggtgtttgaaactaggaagaggacatggacagccttttagaataccatggcttccttataaaggtttttgatgagccatatatggtgaaggaaggaccatttctcaatggtgataaggactatcctaccagatgctctaaacttgttgatatgaaaaaatcagatctgataatggaggatgtgttgccttctattgaagtcgtatctcctactaaagcaccaaaagtacaggtagctgagccaaccaagagtaaactaaatgtttctaggattggtgaaagggaaagacctgttcatgatattccatcagctgcagtacatagtcctaagcatgcagttgatgaagaaatgtgtgattttgaacttgtttcaccccataaaaaacacaaacaaacaaaattaaggactgaaatacccgtagttagtgtccaacgtgaagatgagtctaaggtggttggtttcaatcctcctttatggggtttctccatgcctaaacccctgcctagcaaagtcagtaatgagagtaaatcaaattatgaggcttctctaaatattcccgcacagagaaatttgtttcaaatagaagaaccactaggagtaggcacatcaaatcaaatgccactgcaacttgcttcacaaacagcttcacaagatagacatcttgatgctccatttaaatgtgctgaagagaattcagtaccaagaagcctggttaataaagtggaagttgaagaaccttttgatgtcccccacgaagatgaaagtgaggaacttatagaagattatcaagatgaagttgctgaggcgaaactcaaattattactaaggttttatttatatgtaaatttttcactttttactcttttttttccccattttgtgctggaaactctagtctttgaatgatcattgagaattattatctaaccatgtgctttgctgcttctggatgtctccgtttaggttatggaaaagacgtacatcaaggaagagagagttgagagaacaaaggcaatctgctgcacatacagcattggattcattaccattgggtccaccagttcaattgaaaagagatgtaagcttttccaaattgtgcagtgtactggtatttccattataagtttgcataatagtagcattccagcaagtcattgacatgattccccctctttccctatatatctattgaacggtcaaataaacgagctcgtgatttctttcaaccttgatgtctgtgtttcttttgtcttcacct

SEQ ID NO: 380879 - DNA, 3915 bp, Cannabis indica
agtttttttacttttttgttagtttctttttagttttaggttttttggttttttttttttttttttttttttttaagtttgattgagtttcaagagatgaacttcatgatcttagtttaggttgagttttttttttttgaaaggtagtttagttgatttagttggttgaaagatttgatattttattttttgtctcaactaaattaggaaagtgaaaaaaaaggactatttttaccatttattagttaagagattttcttgaaagcctgtcttttttaaaaactaaggtgaaataattttcatttgattgtattttcggtggcgtttggttgggaggaatgaaaatataagaataagaatgagaataggaatatgaatggaacgaaataaaatttaaaaaatataaaaaaattgataaaataattattaattttttcttggatgtattagaatggtctttcttccaatttcaaaatggaatagtcattctctacaaaaaattgaaaattgtttcctttcattccatttcattacctccaactatacgccacgtattagaatgttattttaatgaaatgatttttctactattttggtagaatgattattctattttgaaatagaaagaatgaaaaaatttagtagattttttatcaatttatttttatacatcctaaattttatttcatttttatttttattattactcttatattttcattcttctaaattaaacccgacccaaataatgtcattaattgaattaatcaacatcttggttttcttctaaatctcaattattttctttacctttacaaagaaaaaatctcaagtattttccttttttagccgatcatagtggttggaattaaatgattagtttaatgcttttaaatgatcattgatcacattaattctaccattatttgatttcaaagttagggatcaatagggatattgagctatgacattaaagaaaatcaataaaaattctaatacctgatactaaatgtcaattgaattttctaccatggtttttagagaaatgctaaagggcactcgtggtgtctagcactctcctacgtgtcaatatcgcgattggtccaactaaatatcgggtcccatataatttaatataatagcttttaaagagtatcgctagccaatcgcaacgcgacatatcgcaaaggtgctaaagaccactaatgcctaataacaatgctttgatttttaataccttgaaattttttctaagctcaaaaagtatttacaggcttgacaattagctatatttggtaaatgtagttggtggtggtcctagaattatattattgtttttcaaatcaaatcaaagaattttgtgccaaggcactttaaaagttagggtgtttcagtgggtaaaggttaagacaaaagccaattccttgggtcccttcatcccattaagccatgttgtgttagtgtctcatttcttctaagctttcaattttcatatcatctaaaactaaaactctatgtgctcgttgtgacatgttagtttttaaatttgaaaaataatcatttcacaatgttgatatattttttattttatttaatttattattattattatttttaaaaaatagcctactaaaaacaccacctccaaacaaaatgctaaagaagggtccaagactaagagaattcattaattaaataaatggcatcagccgaaatagagttgttgatacacaaaggtaactaggctactatacaacactaaaaggagccataatgtaacgaaacgccacgagttaagattatattatgctaatttcgttaactggggtctaataaatatagtaaattaaaatataataactcgtaattaaaaacatcttgtaataccttttaatttaagagcattgctattaggtaccagtggtgcctagcactttttcgacatgtcgcgttgcgattagctagcgatactctctaaaagctattatattaaattatgtgggactcgatacttagttgaaccaatagcggtattgacacataggagggtgctaggcaccactggtgccctttaacatttctcttaatttaaaccaaaatattaatacaattctgggatcccgtaaaatcttttataaaatattacaagttctttacataaaagtcaacctaagtggcaaaatgagacttctatacaatttccctgttggatccaaccctcgcggtctagtttggccgaaacatgtacaattcatcatcaaaaccctcgaactcaaggttgtcctaatattactttacctttgcttgcacaatagagcacctatgagcaaaggtccaacaagaaagcataatcaaacccaaataacatatagcatacgtatcacatttaatacgccactgagtagataactgtgccatcacactaatataacatggcaccgtgtttatgatgatgccacaatatcctaagtctatattgtatagacaccacgtgttacgctcacacatccatttactatataaagcattatcagagtttttctcagttttgattaccgagtctaacctagttatgccttgattgcataactcttatcatatatgcatagttcatacattatgctctcacaaggatttatcctcatagtgtttatcaggcctaatacaattatatcttacacacataactcttaatatatatacataattcatttaacacatgctcaaatatagaaattttaggggtaataaccctaactcacatttctatctaattatccacataatatataagtgagccattacgctatactctaagggcagggtttgctttcttacttggattctaatgtacgtatgaggagagtttcaatccataagtgatcttgaacaagtgccaataaccctagttataattctgagtttaaaacacaatagggtaaatacttaattttataacataaatattcacatttaggactctaactctaaatgaagtaatagacctcgtaatgagctttccaacaatataaagaatattcaaaacaaaattcggagtaaaaaattatgaccaaaataaaatgggaaaaattaaattgtcgctttggagttgccacgactaattatcaccgtgaccaaactacgtaggggctatcccttattttatgcaagggctcgtcgtggtaactgggttcgaaaaacctaaaaaacccaattttagagctttgaaaatgtacaaaaccaaaatcgactttactcatacaatgcacttggtttctaagcccaaaacagagtgtatgcaagtacaaaatctcataaaataacacatgcttaaatgaaatcacagctcaataatcacataattccacaactcaaaacttaagagaaaccaaactagtttaagctaaagctcaaactcatactcaaaattcaaaacttctgcttcaaaatacataataccaaaaatgaccaagaatgaaaccaacaagagtcataaattgattttattccttaactcaattcaccacaaaattattatagtttaaaccatgattttaatccatagaataacacaacaaagcttaattcaagaaaaattgcccaatctccaaaccctaagattcactttcagttgaaaagaaaatcaaagaaatcccttacctcaagttggattccaaactcaagctcaaattgaaccaactgagtttcgtgttgatatcaaatcaataattgcactagcaaagaattcagtctttcacgaaaaaagtaaacacatcgatacccgctatcattacataagataatgcattgaaagaaaagaagtaagagtggaatatgtcaaatctcaagatcaagcaatagacatttttacgaagccactcaagagagaaacattcatcaaactacgaagtatta

SEQ ID NO: 380880 - DNA, 2985 bp, Cannabis indica
tgtgcctatgaaatctctcaattcttgttcttctgatggagccagtttgagaacgcttttagggtatgcatgtcagctctgtaatggttaatagtgaagtcaacaaactcaggccatgtaaaatctgggtaaattcgagggctccaatcattgaccaactcacttggtggacttatcaatttatcactattaacagtcaaaaagaatgccagagttttcctaggcttttcgctattcacaactacacgatgaaagcagctcttgtagatcccattagaaagtgccttcacaaacaaaaaacaacaaaaaaaagttaaggaaaatgccatcccaaatgttattaagaattgatatggtttttagtttagagagttaccatgaatgtatcaccgatgttaacaacaaaggcatcagaatttgaactaattctctgccatttattatcgacgaacacttgaagtccttccacttggtgttggtgaagaattgttatggaagatggatcagaatgaggtccgattcctaatgttagctcaggttttggacatatagggtagttattaagtctcattatggagtcggtttcttcataaaaatccttaaaacgagctttacctactccaaggctagctcccaaaagttctacaattttaagggatagcttattcattgcttcagctaaatcctgaaaaaccctcctaataatgaaagaaaacaaatgaaataaataaataataaaaaataatttaacatataattaataataaattagaaaaaggaagtattgtaccctgtctcttcgaaattttcacccaatttgttttgaaaataatttttgatgatgttggtaggagtgttttttatagtagaataacgaacagaaagggtttctttccatgggagtttggactggaaacgaccaatcaaactactggagtagccgaacaactctccttgtttttttagagccttctctttttccaagggtggcagctcaaagaagctgtccatgaagcgatgagcatcagcaataagtttggagtcaataccgtgattgacaacaaggaagaatccatgctttcgacaggcctcgtcaacaagctgacaagcctccattaccttctcttggtcacctgagagaaaggcagacaagttgatgagcgggacttggagatgtggggcatcgataatggacctttcttcctcaggccatatgaattgggtgggtatgttagagtggtctttcagcgctgaaaaatcaaaaaccaatgttttttgatcttcatattcattcatggttttagttgatattggaggacgggccattaacataaaattatatcttaatcttatattctagtttgtctcttcctctttttgataagttgttacaggaatgaaatcataaataaatatatttataatgtattttacattatgaaattgaaatctagcctaaaagaagaaagaaagaaatcataatctgaatattcattctttatgattttttcattaaatagaaaaaaaaaaatctgaatattattatgctttcctaaaaaaaatctccatgtgatttttttttacttaatttagattttttaaattaatggcagattgtaattttacttttgtaggaattattttcttttgtagatgtttctttcaaaaataaaaaagtacgaaatatacattgttttggttcatgaaacttttccttgctctagttttaatggaaagatttcattatagtatttacttttaaatcaaaaattataaagtatttcttgcacttttaaatttttgggcttttttaggaaattaatatcataagtgttattagattttattttatgctaaatcaaacttttattacgaatttacatatacaaggtattttaaacatttgtatttcttataaagttttaattaaaaattacctctgctcatactattggttttattattggttttatgatactaaatcaaatacgcagcggaagagtttagtaatggtgattttcatgtaccacatcccaaagggtctccagatgtgtgtatcccttaaccagtgatgaggataatgcaattggacttacacaagtatcttcaaaattattccactacacacaaagaatagtcttcactattcagataaagtgcataagtttgttcttgttgagttttcaatatatgaacaagaacagatgagaaaaaaattcttcgtttcttatactctttatatttttaaattatagtgtcaaaatgtccatttgatttctcaagtcaagcttcttttgatagtagttaaatatcttttattaaatcatatttaactatttaaataaataaatatctataaccgaattttgttactgatatgtatgaaagaatctctcaaacacttgacataatatctcagcaactttgaaatatctataatcactttttaaattagatatttaccttattaaattaattaattaacaaaaaaaaaataaatccataggacagactatatgctaagcgcctacctttgtctgtttcggacaaggttggtgccttttttcctgacaacttttgtctcaacaaatcctttcttaacaaattttgtcttaacaattattgtcttttccatatttaattaatttgaaaattatttatttattatataaaaaaaataaataattacaatttttataatgcaaaataaatttttctaaatgacattatacaactgtttatcccaacccttgacagtatttcaaggtggagattcacggataatgaacctataattctaagctcacaataaacttgtttattaatttcatgattaccccactaaatatatggaactgaactcttagtaattaaggaattatatttatcgaattttaatgcagtgtctattgattagccctctatgtctttgtttgtaattagtttttgtcaaattaccattttaccattctaattacttcttta

SEQ ID NO: 380881 - DNA, 1859 bp, Cannabis indica
aataataatttaataaagggataaataattaattgagaaatcaaaagaggaaagataaggatcatgtataatttgtcataattagtcaaaattacccaatttgtggataattaagcatatataaatattgccctagctaggtcctttaaaaaaattactttctttcaccaaacaatgatgagataattgatcattgatttcataatataataatgtaacttattagctagctatagaaggggtcaaataaataaatcataacaaaagcctatatatatacatataatatgatatatatatatatttatatatggataaagtgtggttaataaactgtcattttcatgtaaatacaatcatagtaatattttctctttcataattattttctctcgaatgatccagaataatcataaattatatttgaatggattaattatcatagtaatttcattaaaagaacagtggtaatttactatagttaatttttataatgcacattaaaaattaaaatctatgtataattacttaattaacagagaatacggttgttaattatatattataatattaattaatgatggataatattcatcttcatctattctcacctttcattaaaatattttaatcaattataatattcttaaagttaaaagcatagacaatttgaaagatttgttaaaggtgtattggttattcaataaatatattttatttatttattttattaaagatgaattaaatgtaaagcttttctaaattggaaaagttacaaaattgatagttttaataaagaaatcaattctttattgtgttatatttttccagtgttgcttattgtattttgatctaatattcattttctaattaatttgattaaatattgtgcgaagaaaattgaaattagactttcattttctaaggtgtttgtctcttcctttgttttatgtattttgtattgtcttgagtctataatcaagaatctacaaagaagaagaacaacaatgctatctttgagagaagttctacaagcttttttggaggtgaattttcaagtcttacctaggaaggaaacaatcactcttcaaggagatcaaaaggaattcgaacacttgaagtttcagcaagattcgtttgagaatgtgaaatacaataagcttgttattttcttttatttgagtttaaataatcgggttgtcattactaatttttattgaaagatatctttgattaataggtgtgattcgtctcttgttcatttagattaaatatctaacatttttcgtacttctttttaatgtttcgccattggcgtcttattagtttttttttgttggaagtgttgttaggattttctttcctcttattgtaaacaaaatagtttgcctgttttgtttgatatactctttgagcaatttcatcatacaatgaatttgtttgatatattaacgaaaatcttcaatttttcccaatcaatcaataattaaaatattcccaacacaaatttcctatttttatagtccataagcatacttcaatcaccaacaattatttatttttgagatagttgtataatcatcaatttaatcattatacaaaacaattaacaaacataaaatcaaaatgatgtaagtctttattgttaatatttgcaaattcataattataggttcaccgcaattaattgcaattaatcaaaacataaacgatagagaataagaatcgatccaatacagcaagaagcccaactgggtagcccaaatccaatacagcaagaagcccaactgggtagcccaaatccaatacagcaagaagcccaactgggtagcccaaatccaatacagcaagaagcccaa

SEQ ID NO: 380882 - DNA, 5386 bp, Cannabis indica
ttttttttattttttttttcactccagggttttgagtggtgtgttttatttctttgcttgtttaaaacttgtattaggttgcgatcaatgagaggggaagtacagctagagccaatgggggctcaggaacatgatgattcagaccctttgctggggaagcaggttgattctatttcttcctcctcagggagctcaaatgaaataaaggatgaagatgatattgaggctggctctattccttgttgccgcatttgtcttgaaagtgatgctgaaccaggtgatttgaacctcatgttacattaaaaaaacaaattgtattatttgatcttttgtatttatgtctattaacagaagcatggagattcttgatattttcttgctcctgtatctgaggctgaaatttggctgttagcttgtaaaatgttagaatagctcagtaggagttacggaagttttaatggggaacaagtagaatttggacttatcttgctattaatagcaagacttgggtatacagtatacttcaataatgtgaaccttgagatgtaaaattggtatagattggtcgagctcacttgctcttgtttaattttttttcttatttgtttcaggtatcaattttccttagctttttatcagtttctgagatggtagcaaaccacataaattaaaagctaggcattttaaatagttagttgctaactttttgcatcccccaaataaagggtatgttcgttaggaagtgtcctttctaaaaatttaaaatgtattcataagggtatgttcattctagtgttgttgttttacctttgtatccatcatacccattacatgtcaataattaatatgtccatttaggttatggaaaatgtaattgctactaaaacacatgtccatattctcagcctaaaatcctgttgttcaatcttatagaggacgaaatgatttctccttgcatgtgcaaaggcacccagcaatttgttcaccgatcatgtcttgaccattggcgttctgttaaggtaattcttttttgacacttattactaatgttgtgttgctaagcttcagcggtaatctaaatctggcaacattctgagtatttttatttttattttaggaaggattcgctttctctcattgcacaacttgtaaagctcaatttcacctacgagttgaatcatttgaggacaattcatggcgtaaagttaaatttcgactgtttgttgcaagagatgttgttcttgtgtttttggctgtacaaactgtaagatattatactatttgaattttcatgaatcatggaactgtttgtgtaaattctatagtttcatttatttactacaaaaggcactagttctatagttttgaattttgatcatacaacttaatttgctaataaagtacacatctgttctttcatatttttaatttatttgtttgaacttgactgcggtttaacttgttgaagcatgttaatgtatattattttgacctctagtagataggacatttatattgttaatatgtgaaagagatctttaatgaattatgtcatctgttcagaattattataagtgagcttcttgtatattgttcagaatgtggacagagtcgtttggtatattatgttgatattgttaatggaataaggtactgtgtgtgatatgttggttgttttatgaggtacaattattaacttagcgcttgatttcaaggtttgtgcttcatagccaaatgtaggtttgataaaaatgttagtgccttctatattgattatgcattattgtttcagttgaaatttagttcttcattccccccattttttatataacagaagtatgcataatgtggcacatgtaattctaggtaattgctgccatggctggcttcgcatatctaatggataaagatggagcattcagaaattcatttagcgatggctgggatcgcattctgtcaaaacatcctatacctttttattattgtataggtaaactatttccttcaaaccatgttatacagtcttattaattattcctgcttgcaatgagggatcatgctgcacttgtgattgctatcttactataattgttatcataggcggtaggccatgtcttatgtctttttctgggcttttaggatattacaggtctatcacttacaacattataaggaagaggaaaatcgcagtaataataattttttttgtttctctctctctctctctctcttaaaagaacaaaaaaagagccagaaaaggaaaatgctgtagaagtgtttcaattcacattcaatttctcacattggatcttttgttgaaatggtgtgctgtgttcttgaaactttcaggggtactggccttttttgtgatgcttggatttttcgggcttatactgcattgctcatcacttaatagcaacgatccacgaatggctggctgccagaactgttgttatggttggggaatcttggattgctttccagcatccatggaagcatgttttgctcttgttattgtatttgttgtggtgtttgcgattcttggcatagcttatggatttcttgctgccaccatggctatacagaggatttggcagagacattaccacatccttacgaagagggaactcactagggtaggttctgaaggttttctatttctgtttacttctgcatggttgtttttttgattttgtggctaagaatacttgcacataatggggttgtttctgaaattttgcaggagtacatagtggaggatcttcatggatgttataccccaccgaagttggatccagaaaatgaagaacgtttgaaaatgcttaagttgttgtaattatgtataagaacatgaatttatgcctttcgagtgtttaagaaaaaaaaaatgaaaaagaaaagaatgtctgttactgtgttatataagtttgtattggaatgttatacatctgtttaataaatagttttgtatttcatttggtcgttatcttttaatgcgttctttagattgtctttcacatatattttgcacctgatactgttaagaatggcagtactactactttttgaatacttgaagaatcacaattcacaacctcacattaaagtgattttcacagctgtatgattagagatccaaaggatagtttgtgtcaggtgaccaacggtcttccttatgactatttgttagacattgcaaccaaaatatttatttcattgacaacttttcatgtatgattagctgattagttacctaataatatactaagctgaacaaaatacgtcataggaggttaaagtctataagtgaacactcatcgtgaattttcctcgtgcctttgtaaactaactagttgattcagtttttatggcattcatattattgtgctacttttgtatcaaagactgctggtgtatgtgctgtagtgaagcgtacatctttttatttttggtctgataagaagctgtagttgtattaatgtctataagtaaatacaagtctgaaaaaactccatctgtagttaactcagtaaacaagaaacccttaaactctattactgtttaagaagtctttgatataaaagaaactgttgggaggaaacttttcacttcatcctctatggctctatggtgaaaaagagctattcacaatacctaaaaatcgcaagaattataaatttttgaacccattgctatggccaaataagtttttgtggatttttagataaattttaatcggtagagacaaattaggctttcaatttagtgtcaaattcattagtcaacaacgtgatataaacattggacttcttatgttagattctatttaataccgatgacttttctgaataagattatttttgctttggaaaataatcttttgtggtaatgtgtagatgcatttgaggagaagcatttcggtgatgtcaatgttgaaggaaatgaaggggactgattgagagacctggtttgacataatatgtttgagacggtcggttgaagtaaatgtattattttagggcgaattctacaaagtaatagattcttcagatgttgttgtccaggtctgttttctctaggtccattatttgaataggttttacttcaattttattgaagttggacttttgctcatcttcaaataaatatcgtctcaattgcttgtatgccaatttttcattctttcttttttacctttttgttttgttttgtatgatacatcctggaatggttatataggattcaggaatttcatatagcgatcatgtaatttaaagccaattctcctattaaatgggcactgatattctagaatctttcttcatttatctacaaactctacagtcacagttcccacttatgagtgaataccactatcagtaaatcactaaatagagtgttatatccgctttcttaaaagggtaggttcaaataggtttttgttgtcttaccatgtatgatcatgcttaataattgtcagtaaactattgaatgttttttttttttttttcaatcactcttcctctaaatttctgacaaggcatcctcaatagggtaaaataggatattgttagaataagatgtagtgttggggcatattggtatgtgtagggagattagtagttgagcagttatggctgttattttagttaggagcaatagttctagcactagttgggagagatttccgaaccgttgaaagtttggaactttatttgtattttaagatatttataagcaataagagaagtaatttgagatttgattcaagattcatcttgggtagagaagaaattcctatcaatttcatttcttcatccacctagatattgttgagagtgttcttatttatcagtaatgaagaagccttgtcagtaaatatagtaaccggttcttacttatcggtgatatagaagcattctcagtaaatcattaaatcttctagtatagtatatagctagttttctgttgtcttaccataccatatcttatgatgttaaataattgttaatacaagagttggatgcgaggacccacaaggtacaagatgttatcacttgggaaatcatttgaaatggcattgctaacacaaaaatatgattctcttgttaaacaaggtctgtttctcatcttgtgttttagacatcaattatacatttgaggcttgggctttcctttgttttcagtgtgatttgattcctggatgcatgggatggctgaggctgagagtatccaaagattatccaactctttccatgctagcttcaaacaaagtcataatcattttattatatacaatttactatgttgctttgaggcatgattttatcaaattaaattttacggaccataatttcgtacatatcaaagttcgaggacaaaaatt

SEQ ID NO: 380883 - DNA, 1254 bp, Cannabis indica
aagaaatcagttttttggtgatttctcttgcgacagtgctaattctgatgactttttcggtgtcgacagcaactccaaaggcttttccgacaccgacagctactccagcgactttttcggcaccgacagcaaacttcggtgacttttctggcaccattgacaactccggtgattattgcagtttcatttgttttatttttttgaaaaaaaaatatgaaggaaattttaatattttttatggtaatataaataacatatgttatatatgttaagttttttttattttaaatactatatttttttcctataaagtttacttaacatatttatgtaaactaaatttcttattattatacttatgtaaataacccaaaggaaatgggcagttgggaaagcatggaggcccaacctaaggagagtcaactgaaagaagaagcaagacctattagctataacacttcagtagaggagatctagtatagcaaggaaataaggaaagaaaatgctagaccaaagaaagagagtaacaaaccttaatggcaaaaaattatgtaattatgtaatgagacttggtcgttaggaaaaaagaatgctatcttttttctattagatttgggattttatttttcttaccaatataaggtaaaatataataattgaaaagattattgatgaataaaaattacaactagtatgcttaggagattgactttgtctcgaagaaggcttgttctaatactggtgcttacattttttcgtccctttcaggatgaagagtgaagacattgtgcaattgtttagggaatagagcaaggagctcgagcaaaaatgagaacaaagggatttatcacaaaaggaggaactcaaagatatattggatgagcgtctttctcacctatcgcctccgccgtcgcctgaccgtggtggtgagaatagtgcagctagcgtcattgcaaaccatagactcgatccacctctaatatggataatgactatcgtgatgttatttcaatcctcaagacgttgcaagttaaggttccctattttgatggatctgaggtggaggattggatttacaagattaataatttttttgatcttcaagatgcatcttattttttggtagcccatcacattagttaagcgtgcttgacctagggtaatttcaagatgggtgacctcctgcgaagtttatccaagaagcgtgcgagtgaggacaaagcatgttagaaacactcgtgttggtttgtaggg

SEQ ID NO: 380884 - DNA, 1034 bp, Cannabis indica
tgcaaagtgtatgaattgttactttggttcctttatgtgatcaaagaatgatgttactttaagtttgtgaagaatgaaagcaagagtagtcaaagctatattattgtgtatcaaattgggaggtatattgattgcttaagtgatagtgtaacatacggaaatataacaaacaaaaaattcttttgcggtgtgacatttttagagctccaacattatagatgaaataaagataaaaaaaagtgtttatattgagaattgacacgccaaccatttaagacgtcatccacatctctctcaaatccattgtctttaagtacattgaaaataaatataataaattattattttttaaaacttggttaccaattgacttgatcgagtatgaaaaataaaactagtgttaaatcttgcgtaggtagggccactattttttcatctttttctttttttaattagaataaaagatattttaatatctgccacgaactagtcttggatcaaggtttaagataatacaatatgtcagtgcagtgtgcaaaatactctgccaaccaaacaatcactaactaataatagactaaacaaaaactattttaatgttaacagccaaactcttaagtctcatttccaaagttttgattggcaaaatctagatactagttttggcatgagatctttaagaagttacgtgtagttatagcactaatgattcaagtcaactaatatttgattttaattttcgttttagattttgttgtcgtatatgtggatgtagtctaaagtgaaggtggcttttttctctctcttaatatatatatatatcaattacaaaacagttcaattaaaaaaagtacgaaaaataattttatgtattattttttaattttttttaaaaaatttacgatataggttgttccggtgatttcttcaatagtttttgtgtaggttgctattgtaaattttaattacaatttaagttattctgttagttgctatagaattttttatgtataatttcgtaaaaatacaaaaaa

SEQ ID NO: 380885 - DNA, 4119 bp, Cannabis indica
aacaaagatatacataaacaacattaaggcattccataaatttacaattgtaaaacaacaccatatgaggatacaaccttttttaaaattcaaacaccagcagtttcaatcaatcaattaccccaaaatgcaggtcaggccaagtaactaaagcccttataaacaacacaagacatgtcaaacaaaaagtaagaaatcagtagtacattaatataataggctattaggtactagtagtagtagtagtagatagtgttcttacaatttcacaaagttcataataaaacttccaaagcaataaaaaaaaaagcaaacctactaagaaaatttaaaaacaaaaccctacatatgtttgtttattccccctatcattattgctaaggtagaatttggagaacaaagccagttcttacgaaaatgttatatcctcatttacataacaaaaggcatcatcatcatcattttatgtccagaactcgaaaagcaaaatattccgaaatccaattgggttatctgttcagaagatgcagacttacattaatcctcttcaccaatgctcttcttctccgaacaagtaccattctccaccgccatcgccacctccgagttacccttttcttcttcttcttcctcctcctcctcctcgatttcggccacagcttcttctgctccctcctccccagtcttaacagcaacctgttcttcatccttagtctcagcaacaatgtcattgtgtcccaattcttccatttccttagaatcgccatcgaaatctctactcccttcatgtccagataaatcaggagcaccagaaccaccatcactctcattctcagattcattctcaacaacttcttcatgaacatcaccaacaacaccatgattaagattactctgtctctcaagaaactgaagccttcttctaaaatcactcaactccctttccatcaaaaaaagcctttctttcaatgttaaattctcttcctctaattgagctatatgggtatcttgatcatcaactctattctccaaaacattattataatccattccactgtaattagggtaaatcatctcaaacctactcaaatcatgatccaatcttctctcaacttcaacatgttcttcaacatcactctcaccttcttcatcatcatcttcatcttcattatcattcccaggtgaacgaagcctaatcaaacccttcatagaaccatacccatcaacaccccattcttccttagccatatcacctaaaatctccctcgacggagaaaatatcggcgtcggaagaaccgccggagtaaccggacagggagaaaccaaagaagctattccgccggatttcttagcacggattatgaaagatgttgtgtttctaggcgcataaggtgcaaatctattgttgaacttcttttttggatagaatttcctggcttttaatcgattctgtgactgtaattcgtgaagagttggaggtttataactgttcggaccactaggaagaactggttcgtttcttcttggatctgaatttttctttcctttccaattgtttcttcctcctcctccttgattttgagcagagaaatttggcttcgatgaattctgaaacttgtcttgcttctgttgattttgctggttttgttgttgttgttgttgagaagaccaaaccttattatagccatggcgaagaggaagaggttgttgagattgacctgctgacatcatctgagactgattcatcagaggttgagaagaagactgattcatcatcatcatctgagattgttgattcaaactcatcatctgagcctgattcatcatctgagattgatcgttcatcttttcttttcccccaaaatctaaaaaacctaaaaaaaaaaaaaactcttgaaattttccaacagaatccaaaatgttattagatgtaattttaagatgggagaatcgtgaaatttttatgatatatggcctttaaaattttccttagaatcttttatgataaaattttctcgggaaaatttgagttcttcgtttttctttgagagcgaatcttttgatgccgttgaaagtaatgctaggcggttcctagggctccttttataggtgaagggagtttgattggccgttggatctgtatccgaatattttgacggtgtagattaaacacgcgtagtggacacgtggaagccgaatagttatggatttcaaaagaagattttagggatttaattttttttcttttttggttttaaattaaattaaaatcttatttatttttgtggcgaaggattttttttttatcataaaggatataaataattttaaagtgatacttaaactaaatctctagcataagagagctatagtagtacgggcacctttagtatgcggaaatgtattgtattgtattgtgtggtattatattgtattagtttatttaatattatattatatctactatgggttgggttcaagtttgggtctcgaggcggggtttaggttcgagtctcaggtcttgcgttcgggttgggtatcgagttcgaatttggggttcgggtcggatcgagtcctgtcttggtccggtttggaaccagaattcaggtctgcgttcaggtctaggtccctaaatctgaatcgaaaattggggttaactctgtctcctttgtaaatattataatataagctaatacaaactatttgtattatattaaaatttttaatcgtaataattaatacaatatattatttttaaataaaataatattatttattgtctactaaagcagtcttagcatttataaaaatattatatacatgttttaaatatttttaattaattttaaacttatcctacttttccatcttttatttactgttatttgaataaataaatgatttttttaataaataactaaataagaggaaaattttagaatatatccctttttaagtggtgtatccattttaattttagtctaatttttttatggtctttgttattatataagatatttttgaaaagtttaaaaaattcgaaacaatttaaaaattgataacaaaatttaaataaaatttcttatataactataacatatacaattatacaaaaaaaaattaattaaattttttataaaatatcgaaatagaaaggaatatattagttcaaccatttattagagatacattgtaaaaacaatcaataatatgaataaaatataaataaagttttaaaatggctttaaaataacaaaatatatctttttcttttttcttttatgtataaaagtaatatcttaacactacatttgagtgaaatgcagatataaaattacatgcgatcattatgacacttaatgcaaaataagtgtgtttattaatttaataaaaaaattacatgatgatgttagtaccatcttgacatagccagttgtggccagtattaaatataggaagtaattgtagccagaatgccattttccataactgttactaactgtgaatatgaataatgtttatggacaataatttaaatttctacatttatatttatatgaattaggtggaaaacaatggagtcaaagacaatactaacgtttttttatttaactatttttttgctagaaaaaaagaatcatgtagattatttttccatagtttcagtagttcagataatctaagggatcacgtgtgagttataggggttttatacctcatctttcatctaaggccaagtataatcctttccatgaaggattgtggtgaaatttaaactcttgacccaaacaatgaaggaggccgtaaaaatattcctactactataccacacaacacgtagtttatatactctattgagtggtactaataatgtctttcaaattaatttttgtataaaacaattaggaaaatttatgtttgaaaactgtttttttagagatatagccgataaaactctgtttgagcatttaagataattttttggtctaattttatgaaattcaaaaataaataagctaaaaagaaaatttaaacagtttattgcacatgtacaaaagataaaacactgctttttatattataaattatttcgaatttcacacaaaaaaaaaattaaaa

SEQ ID NO: 380886 - DNA, 1142 bp, Cannabis indica
ccatttaagtattctctccaaaaaaaaaattcttattatccaacaattcattatttgaaggagagaacctaagcctggtatggttgtattttttgtactcgttggtgcaaatacatgatctatgtactggttttaaatttccagaaggggtgaaaagggtgggaaattaccttggcaattttttttttgttttgaagccatatccaatgaatttatgggtttgtggcaagattatatgagggcgagaatcacttttgatctgaataaaccattgaaaagaaaaatgaatctttgatgtgctgaatctgaatggatttggattacataaaagtattaaaatgtgccaacattctgctttatgtggtttattgggacacttggaaggcttctgtgaccgattttccgatacaccataagcgaagatagttaagccatatagagcatggatgagagaaccattatgatgtcaaacaaagttgattggtgaaaagtggttacgtaatgggctagaaggattgagttcgagtagcatctcgggtggggaacaggtgacgggggtgcaaaaacaagggtggtcgacgggggttgctccgttgggacagtcgaaggtggttgagaatcttcgttccactcgtattttgacattgtagtaatctaagatatcttaatttttttttagaaattctaaaaatttaacacgtcgatcgccgaacataaggttcaaataatttattgcacgcacgactctttaattttatatacgtgtaaataaattatttgaacattgcttcctatattgtaacttatattgaatttctcaaaattttgcaagatgtcttaaataatcataaagtatacaattcgaaaaaaaaaaatagattaaaaaaaatttctagatgccaaaacagtaaagaatgcttcagcgcacctttttttttttctgggagtgcattatagaagcaccatataaccctataatatttatagatttattttttttcatcatataatattggaagctttcgtagttcactcttaaaataaatttagtggtatatactttttatatatataataaataataaaataataatagtcaagttcaaatttttaagtaagtttttatttttcttatttttttt

SEQ ID NO: 380887 - DNA, 5028 bp, Cannabis indica
ccccgcggtataaatttccatctctatatggagtatttaattttgatacctttattttacttatatattgaattgaagccataagtactcttgataaaattgctttattactttattttttgtattgtttctataattagaacatgaaacaagtaaagaaaaaaatgagtcttaattatgttgaaagaagtacttgtccaagtgatggaagagttgaaattaaaattggtaaaggtatattagatttgagataaattaatcatgatagagaattatcattagcccaaagctaaaataaaaccaaagtcttataaaaacttggataatcccgaccactaaactcttgcctcacaaagaggaatagtcagtttgataagattataagcaataaacgtatcacaaactaaataaatatcttgtaaaattaaattataagtcgctaaataaacttcttttttgttcacaaatttttgtaacaacttggcagtctctctccaccttgatattataaataattgtgatcccaccaatatagtcatagcttcagctacagattgagcaaggagaccgacgacgagaataacggcagacgccactcaccgtccagtatggccctacgaatcaccactccaaaccccatacacccatcagagggatgtaacccagcatcaacgttgagcttgtacctccagtcaatcggtaggtaccatggatgctcggggggttgctcctccggcttgacaattggcttccaacatggtcacaccgtccaatctcccttgggcttcttgatatttccgagcatacaaacaaaaaagtccaacccaacaccccttcgacatcgagtagtttatgttcatatatattcaatgattttaacggtactaatttcgccaaagaaaaactaggagtctctccatttctcctcttttgagaataaattcatgttcacaaagaaaaaggagaagattaatccgagccatttgtttagacgtaagagtctacgaatttcattatagatccaagacttgacaacctcttatagcgcaagaaataaggtgtagtagtgcaggattattatcccacattgttgtattattattattttggatttatgatttgttataaataaaatatgttttgttaaaacttttagaggttatgagtttatttttacccataactacaccatcaccttttgattttcatgaaactttcattgcataaagtacttcactgcatcctaacatgtatatgtatgtgaagttggtttgttgctaaggtgactgtttgcaaaaaattttgtttattaaattcatggcgtctagtagtcacagtacacgtacactagaggagagttatgcacaaatacatttggaggaggaggaagaagggatcctgattgcggatgaatcagaggggacgaactggtttttgatgatcgttggtgcttggtggagaagtttctcaaaggaagagcgattgatttcaatgtaatgaggcacttgttggcttctctgtggcagccaggtaagggagttttcattcaagagttagatacaaacttgtatttattccagttctatcatgaaatcgatatccagagtattatcgatggtagtccttggacctttaataaattttcattggtgtttcatcaattgaaaactagggagaatccaagattggttcggttgcataagcttgatatgtgggttcaaatacatgacttgagaatcgaatttatgatggatagagtggtgaaaagtactggaagttatgtagaatcgtatgtcaagtcgaacctgaaaaactttaatggtatttggcaggattatcttcaggtgcgtgctaccattgatgtggaaaaacctttgaaaaggagatctccgtgattataaccttgcttttcttggaaaacaagggtggcgccttttgacgaacgaagactccttggtcagtaaaatttataaaggtagatattatccctcgggtagctttcttaacgctactcttggtcaaaatccaagctttatttagcgtagtatctttgaggctcatttcattcgggctggggttaggagactgattggttgtggtcatgatgttagcattcttaatgacccgtggttgctagacttggagaacccatatgttacgtcggttaaccctggtttagtcaatcaaatggtttctagcctatttcttgtgggttcttcggcttgggacttggaattggtggaagatatgtttgaagttagaaatagaaatcttattgcttctattcaacttagtgctacaactgttagagatgaatggtattggagccgtgagccttctggtttttacactgtgaaaagcacttataaactcttgcaataaaactctgctgctggtgcgaatgttgaaaaccaggcggagtggaagctgttgtggcaggtggatgttcccccaaaagtccaccattttctttggcgagcgatattgggatacctcccaactaagaacaacttaatactaaacatgtgtacgtggatttgatgtgtccattctgcaatttagctagtgaatccattcatcatgttctattatagtgtggctttgctcaatcatgttggagagtttcgggtgtcaatatggttgctagtttgggagccaatttcagcagttgatttttcaaggttgccgagactcaaagtcagacgttggtgtgtgaagcggccatggttggttggaaaatttgggctgctaggaatgatgtgtttcgagataccttttacaaatgatattggcataccaagagttctctttagaacttgagaatattattccactagtttgcttaatggaatagacctgaattttctccagctgagatttaataaaaaatgctttcattctctccttttattcactttctttttctttgcttttagaagcaaaaagaaggtttaatattcaacaaccaggttacattttcaaactaacatattattttgtataaaaatacaattaaaactcaacaaactatattaaaattcaattattatttttacggaataacaccatattttacctaaaaaatacaattaaaactcgccaaaagtaaaagtatcagttacttctagaagcaagaaacaaaaaaaaatggttaaaattcaacaattttgttagttttaaaaaataaggttaatttgtgtaaaaatgtaattaattaattgctatatttataatgaaatttctaaatagggatggaaaaagtcagaaaacatatgtaagcattttccaaattatacaaatatattcataataaaattatttatgagccaattttttttgactaatcatcaatcattgtttacaaaaattaaataagtattacatagaagaatcattaaattaggcattatacctataattgagactcatacttggtcaaaaaaacaaatggtaactttgagtaaccatctttctcaaaaacttccccaaatttgcatactcttcaagtgttctaacatcagctttgcaccgaaggagttgaggaaaaaacaaccaaaaactggtcaacatcacaaacccaatagtcaacactccggacaccaagctgggcaaccgccacgtgtcacccaaacacttcttcaaaacaatctcaaccgtcaaacacaatccgtgcaagacgaagaataacgtcacctcccacgtgggaggcgtgcgaatcatgtaaaagtatatgagctcgtgaaccagaccggacactacaaaagttgccacgatagcagggagttgggcccacttgcgccctataaaagttgatgagaatttgagtgtgggttcaaatacactaggacgcagtatacgtgttaccatgaggttccaccttttaccccaaaagtcttgtaatgaggtcgtgagatatggctcgttgaattgtggctggagcccaactccagccacgactcgaaccataatggccacaaagaccaaaatggtttcaagtaaaagataaactaaaaaacaataaagaaccaaaactacattggggttaatttggtctttgtaatcacaaactcgaattaaaatggccaaaagaagagtctttattgtgaaactaattattggtattttattgttagacttttctttagatgggtttgtgttgttttcttggtatctcaatagggaaagaagctataacaataaaacgaccaaaagagattggtgatgggtttgaagtagctaaagggcctttgttaaaagctaagagtaagagtttgaaatttgctagccatgaaaggaagaagctagttgtaccaactaaattaactgaatttagtttgagagggagatagagaaagagacatattattgggagaaaaaagatgagtcttttaataccttttgagattaatttactcataacatagcaataagataaagaaaccaaagctaaaaaccatacctctatgaagttgttcatttcaccctccattttttctttccccttctttctttctaattttatttgatgttcaaacaaagattgatatcattaaaaagatcataataaagagtcaaaatcatatatatgaagcatttgatgaagaaagaagagattttaccttgatcaacctcttttgcaaagtggggaagaaccaaagcttttagggatcaagactttggaataattataattaatatgagatccagcactttagacagacttttgtatttaaacaaaatatatggtttgaataattatatgaagttaagtgctttggcatcttatgtttggatcatgataatatatattattaatttgcttcttatatatttttttattcctctcttctgaaatattaatattctattatgtgacagtggttgatcttgcatagtgctttggaaaattcaaattaattatagaagatgacaccaaagcaatcaaagggatttgtctacatgcataaaattaataagtttcaatatcttacaatttggccagattagcaccaaaatgcaatttttttt

SEQ ID NO: 380888 - DNA, 1688 bp, Cannabis indica
acaagtagtataatgtgtatgtataataaagtcaataaagacacgagaattttatagaggttcagctccgagcagttcggtaatagcctaatcctcttggtttgtattgacttaagaacaaggaaaataatccattttcttagagctcttacaatagtatctttgaatatgaattcttagatcagtttttcgaccctttgcctagtgagtatgaattactatttatatggctataagcttgagagggaagaatttcccttatgagttcaattgatataagtggaaatatttcatattaaatacagaatacactaatcaagggattcagacagcttatcatatctctgtgatctaatcccaaaattataagaatttttttggtgactcacgatacgagaattgaattcgctaagtgttggcgtgctgttcggactgctcactgccttgttaaaaaggctttgtccgagcgaatatatgtggtgccttgttcggcatatttcttgcgagcagatacacaaaattaatcgcacgtgtcaccatcgtgtgatgctacttcagagtgcaaaaattaggataacaaaattgatattcaataattgatcaaatctaatgaaaatttaatttttaacattcaatccaatcaattatattgaattaattgagtttaattaaattggattggaggttgctaggtctcttcatttacaaagtaaattaatatttagcaagactcttctgttctaattgatctctattttataatcttttgtaatgaaaataaagtctaacttttactttttttatctacaaaacgttaattttgttttaaaaaaaaaaattataataaacagtgcaactccacacagtcgacccacttgaggataagacataaaaataattaaataaaaaaatagcctattttcatttttctcattatcatattattttaactatttattaagtataaagtagtacaaataagccacccgaattacgtaaagccaagagctgccttcttggagtgtatgttcaaagattacgtcagccaaggggatttgtctatataagtgatctatgctcaaccagctaggcaatgcacaacctttccaatttctatggtctgatcctaattaaacacacactctctctctccctctctctaccaaattataattagaatatatctctcttctcgtctcccatacaataaatctctctagaaaaaaaataaaaaagaatatggctgaccggaaagctgtacagaatgccgaggttcccggtcgacaaccaaaaaccattgaggattttgatcctccgagaagacccaaaaagaatgtctttgccatggcttgtgctattttagcttccatgacctccatcttacttggctatggttagtttatacatatttacatatcctcatcttgtaataaactatataacacacctcagttttcccatctggacatattgtttaacaaaactacacttttcgttcaaaacaattatattggttaacttctctttataatattgttggaaagtctttgtttgttttccttaaatttcaagattgcagtatatttaaaaaagcatgcatgtggaaacgaagtgtataatgaaacaaaaaagctcaactttctatgagattatttagtatttagttttttatttaattttggcatgga

SEQ ID NO: 380889 - DNA, 2616 bp, Cannabis indica
aatttacatagatgataaagtaactaaatattgctatgaaaataaatgaaaaaaaatatttcagaatgtgatttcgaacgtgaagctcactacaagaaaaatttacttttagtgacaatcttttagtcacaacataatttttttgtgatttaattttaatcacaacaaaaaattacttgtaactatagcatggtatttaaatataagttgtcactagtttagttttagttacaatatatattatgactaaatatatatttagtcacaacaaattgtaatttttgtgactaataattttagccacgaattttttagtcataacataagaataataatttataattagtcacaattttttatacttatatatagtcacaatttttattgtgactaaaaataaaattttttataataaaaattgaataaaaaattgtaattagaacttctttaattctaaaggacttcatgcaatattactttttgttttttctagttctataaatacccagtagtactactactataattcattcaaagataacattgagaggttcatataaaattaagtctattggaatagtatacatatggggcagtgtggggtattttggggtactagtttggcttttctattatttgtactaatgttgtttagtgtgaaagaagggctagcttttgatgatgataataatcaatgggtgatctcttcttcttctgatactaatattaattacaattataaagatgccctagacaaggctatcttgttctttgaagggcagaggtccgggaagttgccaaccaatcaacgagttaattggaggggagattctgctctttcagatggaaaccctgaaaaagtacatataattttttatcgttaataattaaattgagaatagtgttaaatatacattcaaattatacatatttttttcacatataataatgtgtatttaattttaatcctatataattttaagtggtaaccatatcactttttattatatagttaaaattaaatacacattacattattgtgtataaaaaaaatatatcaaatttgagtgtctaaatatatacccttcctagttaggaagcttgtaacatttatggtttaatagaaacactagctaatgtttcatcaacttaatatttcaaccaagaatagttatattactacctttttttttcttctaacaatgttatattatcactttttatatagagacagcatatatatttcaaaaggaagaagattgatttatctaaaaaaatatatgttgatacattaagttacacattatcatatgatgttatatttggtgacacgtcccactggctataagcgggttaagcttgagcctagagccaacttagcctaggagttcaaaaaaaaatattccttttcaaaaatgtatatatatttttttattaatttaaaaaaatactatattcttttgaaatagactcaaaaatattttttttcttatagcccgctaaattccggggctgcccatttggtgattaagataatttaatttcttaatatgttatatatctagaagactaaaagggtggtgatgtttgaatttggataggttgatttggtgggaggatactatgatgcaggtgataatgtgaagtttggatggcccatggcgttttctgtaagcttattgagttgggctgcaattgagtatagggcccaaatatcttctgccaaccaactcaaccatcttcaagatgcaatccgctggggaactgacttcattctaaaggcccatacttcacccacaactctatatactcaggttaggttcattcaagggattttttcaaaaatactcaaaaatgataaaaaatttacaaaatgtaccagtctacagtttttcttatatatatatatatatatatatatattatggtattttaactttttttttttacaatatatagagggtttttttttcgttattttcaaaattatattatttaaacgtcactgctaaaaaaaatgatattttctgaaaaaacacaagtgaaaaatttgtaaaagcagaaatccataaaaatatatgtataaaaaaaaatctgtaaagaaaagtacaattttactttgtgtaatttttttttgtttaaatatgtttaatgtgaaatgttgaaagatatcagtgctacactgctcaaaatgttatatcactattaatataattaaatatattatttattattttcttttcagataaattataataaaatttgtagcattgattcaattactaaatttttattagagtaattacttggtatctatgagtgtataagtacacttcaaaacctaataacaatgctcaaaaatttcaataattgatgtatttgtataggtaggagatggaaatgctgatcatcaatgttgggagcgtcctgaagacatggacacctctagggcactctacaaaatcacttctacttccccggggactgaagtggcggccgaggcagcagccgcccttgctgccgcctcaattgtttttaaaaaggatgattccacttactcatcaaggctattaagccactcacaatcagtaagtgttaatctactacagattatga

SEQ ID NO: 380890 - DNA, 3735 bp, Cannabis indica
aaattaattcaattaactacaaatttatgtcttttttataaaagaaaaattagcctgagcttttcttgattttagaatgcatatgaatttcaaggttcatatttatatcatatatatatataaatgtgtactgttatgccaatcaatccttttgattattttgtttatcatgaagttcttcttaaaattagttttcaagagttaacaatgtagcatacgcttcacaatgtcttaatgtgtacatgacatgcttttataagtaatcctagattttttgtccttatccggaaaatgatgagtttgttatgttaataaatttattaatgttggtttatttaaattgacaattgaagcttaatcctgtgatggaatatttcagctatggacatagaaggtgatgaaaacaaaagcattataaatgtagaggcaattgataatggaagtgaaagtattattagtatattcgaaatttcttcagattcagttgccgagacccaatcacaaccattgcttgagatatccgatgacaatacaagcactagtcaccctgcagatcatactgataaattagattttacaatagatgttagtggaagtagtaataagaaattattagaggagcatgatgatgggagtgataagattgagtacttaacaccacacataatgtcttcatcaacaccatcattgtcattgtcctcttcctcttcctcgtcatcatcttcatcagacttgccaattgatctttcacaagtagacacaaatgaagaagaggctgcaggtattgaaatatcaataatagaagatgatgatgatgatgaagtgagcatttccagtgaaggtggtggttcttccaaatctgagagacaagggatgagccctctaattctggaattgatgacacctcaagctaattcatcttctgatgatgttatgattcacgaatcgaatgttcatggcatgtcatctccaaaaatacagacgatggaaaggtttggtggtggttatgatcctaagaggattccatcttctgtgtttgaaataagtaaaaccacaacgccaatggaatggagtgcggcatccaatgagtccttgtttagcattcacgtagggaattctagtttctcaagagataatttgtttgcttataacgatagtgttgcaaagtcaggggaacttaccaaatcaggtgatgaattagtaatgttcagtccttgtactgtttcggttccaactgtgggacttaatagaaaaagttttgaagtggagaatgagtttgcaggatcagctgttgttcagaatgatggtggcggtgggatgaaagagaaaaccaccaaggacacaataaagccgcctccctcgacgacaactgcagatgatactcctagcacgacaaataaggcaccaatggctcccttatcctccaattcctctagccattctcaccagtctgatgggagtgcagcaagtgtacgctctttcgcttttccagtgtatgtcttcttacattccatctttctttatgttcacattggttcccaacacccattagtaacatgtgagaccacatactttattaattgggcctatgataatactttatcaactagatatgcaataaaaaatcttgaactcctttttcaactactgtgttaccttgatattttcaaaatgtgttttagatataggattatgttgtcatgaaagaatggaatttgtccacataaatccatgaatgaatgtgtagacagatacattgtatatataattcatgctaagagaatgaaacatctctatgcatgtgttgtagagacaaatagacagatagataggttgataaaaggtaaagaggttccctaaaatccaaaactgtagagctataaggaatatacgatttgtgtgttgcaagaaagaaaaacaagaagtgtgcatggagatcgtgctacttttccaattgtagttgggcgttctgctactttagatggtcaaggtgccaatgttcatggcaaagctgctactgttcaaattgtagctgggcgttctgctatggttggaactgtagcaaaataagaatgtgttgtcattcttcttccatgtacgcttctttctctgccatgtaattcttttttcttcttctctttctaagatagaaaatcctcattccatgtccaattctttattgtctgagaagaacatcatttctttattacttgagactgtttgtgcagtgcttctttttaaatgtgctgtgaaaatgataaggatgacaacaatgagtttttacatggtaaattttgtgttcatgcagtttgccagggagcatgaaaagcgaatcggcaaggccagataatgagcagttgcatccagattcattgggtggtggccttaacacatcaaattcagctctcaaacgttggtgtccttgtttctcttggtgctcatgtaggccagcttggtgttgttcttggcctacttattgctgtagtacttgttgtggatcatagaagaagaagaaggatgaactttggaaaatcatcatcatttatgtccacaaccatagccattgcacacataattgaaaaaaaaaatgaggaagaaaggtttagattatactttttcatcaccacttgttacaatttcatttcacaagtgaaaattgtctccacaatgcaaatagacattattttaacccttatattttctagggagttcatggcaggaagaactaatttttttttcttagtgaaggataatcttgtaactttacttcttatttttagtaaaaaagagaaagaaaaaacttaatgggctgtacatatgcatttctttaggggcccttttaacaacgatacatgtaatataaatattaataaaaaaaatattatttaaaatttttactttaaactattgcaactattaaattgcatctccaaaatttttggctaattaaaagttctaactattcatgatgctcaaatatacgattttgttaagttttcttttttgaaattagaatatgtattggctcaaaaacaatttgtttacatcctaatagcacctaaaaaggatctaaaataatcatctatacatataaatctcaactcttgcttcctttctaatcatttacattattcacaaactaaaaaaccatgtctatcttcatcttatattctctttggccaaaaaaactcaatgctatgtgttacacctgatttgaactctttaacaattttgataggatcttgcttctcattcttccgtagacatttatttctcatcatccatagacatagattttgttaagttttattccatgcagctcttattgccatattactaccacaagtttaaagtataattttatttttttatcaactattaataaataaaataaattaatattaaatttcttattaattattgataagaaaatatattgcacttatgtgacagtgcaatatcaattacgtgagcactttgttaaacatatgagataaaacttaacaaaagttgaatatttcatcatcgttattgctcatgagaatacaagaaaactgactaaggcaagtgctttatatttttagagagagatgctctagccttataaatgtggaaaatgaattagtgaagcgctttttttatatggaatgaagtcctattaaataataaaatattaaaaaaatatataaaaaaaattacttttggattgattttgtctacttataatgatctaat

SEQ ID NO: 380891 - DNA, 3287 bp, Cannabis indica
aaaataaaaataaaaaatggaaatgaaattttatatatagaacataaaatatcacctgtaatgacaaatagcagcctaggatacaaatattgttttccactccacatttcattccaaacatcctcttcttcaacagatttatcctcttcacctaagatggcagaaacacgtctgtcgtacatcacagctgcttccaagagaattccaaaatcttcatcttgagtcctatgaaatgtcaagccctgaaattagtatattatatttcagcttcaatattaaatcaacaacttcgcttatacattgaaataggcaacttttgttaattacctgtaataagtaattgaacatgacatatatagtctatcttatgagtacatagtagagaatagcagaaactacttgaaaaatacccccactaaaaaaaatgaaaaataaaaaggagaaagaaagagagtgaaggaaaaaacaacaaagacagagagagaaaaaggaaagcagcttaccaactggtactgctaacaatgagtgccggcctgtttggttttgaaacaatatcagtgccgattagattgctaaataaattatcatctaattccctctgcaaaagtcctccagtccctataaaatgtgttgattcatgaaacctttgttttgaggaaaatgttgcctagaaaaatagtctatgaaatttaccaatggtggcacaatcacaaaagccatgaggctggctaagatctttatccaatctacaaaacagctataaatagtccacattatgattacagcaagaaagaactatttcaatgcaaagattagtttctctttacataaaaaaataaaattaaataaataaataaatcagcaagacagaacttcaaaagtagaaaggatgcatcaaaataccttgtgcttttcctcaagggtagcaggatggaaaaactcaggaggttgatcatataaaactgaggctctatataaatgacagaaaatgtgtcaatgagttgtttttttgtcattaaagtttctaaagctacactgcaattgtgaatattgagctgaccatcttacttaatagaccaattctgggccaactcatgttgcattgccctggtgacgcacaaagaaccatttgccatcttcccataatacctctcaaaccttaacagttaaagaaaatcaaatacaatgagaaaaaaatgcaatcataaattcataataacaatgtctaaaaggatgctgatataccaacgatataatgccacaaatcgactacttcttccaagggatagtgccaataatgtgtatccaaaattatgccaatcaataataaatacagaaccccttagccaactcgcccattttacagctatcaatgttggaacagaaggtggattctgcagggttaagatcaatgaaaatttgatattttattcacacagaaagaataattagtaaatactaatacaaagacaagaaaaatgagaacgaagactattggcaaaggtagaaatccgtttaatcgtacagttgggcacatatacataaatgtgtgcatataatatttatttattcagagaaacggatttaaaaagcttaacataaagatattcaatagaagatctactaaatgacatcaaaaaagagttagtctttttcttttcctttttttacaattagcagggcaactttaatccaccagcaatcaaagcagaacccgaaaatgcacatttaggtaaatatacaacacaggtgggttgaaacaccaaaatgagaaaaatctcaggaaaatcttcgggataagcaagcagagaaagaaaacaacaaaaagggggtggaaaggcagatcaaagtctttcctaaactcatttagattgctattgcaatgtagacagctacaaacatgatgaaaaatcttttaagtacagaaccttaattttttttcccaagtaaaagagaaatgaaagcaagcaggctcacctgtactaagaacacatcaggtgcagctatcttaaaacagagaaaccaaagaagcataaagaactgaatcagcggtttaatcaaaagcacaaaaggtttaaagatcttgggtagaccgcgtggaatagtaggccattgcttctgcaaatcaaattaaagacaagcatatctttcagatcctaagatatcactagtctactaagagaaagtaaataataatagaagttaccattttgtatatattaatagatttattctccaatagagcagaatggggttcggaacctgtccgccattaaagttcgcaaatgagtcaataggttaaagtttagaatttctcaactgttactcaagaacaaacatagcaatataatttatttactaaattattcaaaaataaataaatttaaaaaaaatatatatttgtaaccaacattttggagtttcacatatcataaaaggaagtaaatctaccaaaacaattgtaactatcaaatttaagtaaattcaggtaatgaacttcatgttcgcttggagccaactgcatttacactgaatggccctagaatgactaatagggtcaaaagttgtggtttttaatttgataatttcaccaattcacgttatcataaaaatgaaatctttccaaaataaaataatacctccataggcaacaatgtcaacctcaaaagatgcctggtaaaaccaattgaaagaacgcatatttagtataagaaaaaagaaggaagaaaaaacaaggagggatgtaatgaacctgacgagcaagggaaagggcgtgatactgcatacgaggactgcggccgatatctcccaaaacgacgacgcaagctcttcctctcttgccgttctctcctgaatcacccaaaaatacctaatttcaccgatctaattggccaaaattgaatacagtggaacaaatatagaaagactcaccggccatttccgaattatctcaacggggtacaatcggcggaagaagagagactggcttgacttgggtttcaattcaagttcaactatgtacatgcagatggcgacaagtgtcgcctataaaagaacaatggctagcagctcggctttgactgaggctcggctcagatggctccaggctggtgggctgggcttgtacagcaacgggctggactgaatgaaattagagctttccttttgtcatttaattatgaaataattacataagacaccattttttgtaaaatatttacatttttacgttcaaagaatgtttttttacatttttacggtttttcaaaaataacacgaaaacaaca

SEQ ID NO: 380892 - DNA, 2584 bp, Cannabis indica
accttcaacttagaaaactacttagaaataaacactttgctactaaatcattccctctgtgatttataaattatacttactcttatattttagttgacgataatacaagtcaaacacaatagtaaaatttgaaatcaacatgaaataaatagaacaattttattaaaaatacacgtattgtaaaataatttactgcgaaatatataagttgatctcccactacaattaaatgcctaagtaaatttgtagggtacgttaaatttctcatggtacttcttcattttctaccatatagtgccatggttgtagttggtagacatgttataaaatggttgtgaacataaacttgtcacaaaccccattttttcaaaccttgtacgtttttcaaaccattctataattaattttaaaaaataactatcaaacgataataatgagcaaacaaattgttataagttatgacatagtgatagtgagcaaaacgtatgatcacttaattaatatcattttaacaaacgactcgattattttactaccattatcttaacaatttaggtaatggagactgcagagaacttagactaataaaaagtttctttaacaaatacaatttctgcataattaagtgtgttgtcaaatataattaaccttagtaaaaaagtaaatgaacatggaacagccaacatactattttgtactcatccaatcatcaatggtcttttgcttttttgttttgacctcttggacttggttcttcttatcatcttcctcatccaatctttttcttaagctactcaattcttcttcactaaccaacccattcaactttttattcaatgcataagcttcacccatcctcctcttacattctttgctagcagaatcgtgtaataccactacaagagaaattaaaatcaaaaatcaaaaggcaagaaggagataaagttaaatcggtagagttttactcagcaaaatgaagaaaaagactgacctggttttggataatcttttccaataatgcactttgctttagtttgaatgcttaaaggagccgtccagggctcgtagatgtactcccttggcatgtctaagcagtgagtgaaaagattataggagttaattataagaagccaggagaaattggtataggagaatcaaggtttttgtttgtagtacctttcaatataggaagaaaatatctgatatagtttccatttggatcatacttctttccaaatgagataggggagtatatccggttgtactgatcacagaaaataaaagagagttaaagacatgtcaaacataaacattcatagtggaaaaatatgtcaaggctagaatgaagatgaagtgtaataaatgagtgttataacctgatagaaaaatgaggagcatgatagccatagccaatttccattattaatagcccaatctgaatcaatcagaagcctttcgaaaacatcgcgacctttctcccagtgaataaacttgcatatagcaatatgtcaaaataagatggataaatagatagatagataacaaaaataaaaaaaaggtcccatgaaattatttaaaataccagatccccgcgggtcagaaaacacgcaacacaatgtcgagctagatggtgcatccaaccccacttgtgaagctgcaaaatcaaaatgtacagattttaggtacactgtttaattattgtgcaagaatacccccaaaaattaattagcacagtttaactcaaagaatataacctgcaccataatcgcatcaatccaggggtacccagttctaccctccctccaagctgcaaatagttcatcattatcattccaaggtatctgcaacaataatagcattctgaccttatgccccactatgattaacttcttgtagcatctaattaagtgagctgttgaaagttggtatactgataagactaattaagataaaaaattgaaaatttgaaatttgaaattatggtgaatcccatcaacattttttacctgcttgcatattgtactattcttcatctgatcaaaatttggagtgccaaaggctacagtatagaagaaatcccgccatagtaactagaaaagaagacaatgtcattttcagattgctgcactcaaaacacgtctcaaggaaatgaatcattcaagaagattataacctgtccaacaagggagactgggggtgatgtgtgctttttcactatcttctgtacatctttaaggcattgataaaagtatcttgaagacagacatccaaactgccatatacattttttatcttcagaaaaaccaataggcaagcaaataatacaaggcataacactcaaaacatatataggctcttattgtttgttactcactttcaaataaggtgataaaacagtagttgctggcttcaaaaatgcagatgggtcacccttaggtttctcaaactttgccacccactcctgcagtgtatgactgtgaatgatttattttttttaagcaaagaaaggaatttttattcaaaaacaaccaccaaaccatacaagaacaagctgcaaaggagcagccaaagctcaaaaagagtt

SEQ ID NO: 380893 - DNA, 1937 bp, Cannabis indica
ggtggcacacaaaagtgtatcttcacgtaaattcaaattcgtatgagttacttacacttcagagatagaccagcactgagtgtcagcccaacgtggagcactgaaggtcgttggtcatgtgctctgatgactctagctctgaaggtcattggtcacatgtccttatgtgtcctcacgactctaactctgaaggtcgttagtcacgtgtcctcatgactctaactttaaatgttattgttcatgtgttcttatatcacaactctatgaccaatattcccaatgatttgttcgctatctagaagaagaatccacacacatctctttggaattttgtatttttgtgggataacaacatgttttagtaaatggatatatatatatatatggtgctgtaaattaatatagttatatagagcctttttcacaataagtttagaaaattatgaacaatttatgcaatattactaaaaataagaaatacgctgttttaaagatttgtgacaagttgttatatgatcgaatcttattttttttacattgtaaattatttaaaaatttcttaaaattattctggtaggaagtcctaataatagctataccatgtatattatcacatatatgtatataaatttctaatttattcacatacattcacttatttctaactttcataattaattttaactagatatacttaattaagtcatattatttcattttagtgtaagatgatcactattacaatataattatttcatgtcacctataagtgtcaatcaacatattgagtgacattttagacgttaaatatttgatcaatgatgcaactaattatcccgcatttttaattataagcatcaattttacaatgatgttaaatgtactaaccatgagcattaataattttatatttttagtaatattttattgtgagtaaaatataaattttttatatatgcttatagataacaaatataagtttatttactcaaaagaataattgtatagtttgaatgaacactttcatatgtacaaatcccaaaaacaaatatattcttctaattgatatgcatatatctaattctcactacactacatacatttgagtttctattcattattgaattctacatcacataaatgtgcttaaatatttacttatgatattcacttccccatttcttctcttcactacaaaagaagtaaagatatattttgttgtgtgtgtaaattaaatgccttaattgatatgtgtatgtctatatataaataaacatgtacatagaaatgagatataatagagatagggaaaaccccttgaaaaaggaaataagggtcaaaagggtaaagtagttaagagaaggaaaagtacaaaaaattaaaaaaataaataaaaaaaagtggtgtgaaaatggaatagaaatgtatcattataattagggttttgttgttttttttaattggatgagtaagaagaagaggttgcatgtgaaggaatgcatggaaaggtgggtcattttgtttggagaagcaaattaaaaatgaagaacaatccaaattaaatggatggtgaagaagctcctctactctatgtgtgatattatttattaatttattttgagttatttgcggtaaaatttttttatgttttagttttatttaatttttttagttgataaatttttttattgcttatttttctttataaatttaaagtaccagttagatattaatgttaaatactaatttaattattattatattgacttcaaaattttacttttacgtatacacaagtgtacatagttgttatttacttgatatttaacagtaataattaactgacgccttaaattatagagttaagtgtataaaaattaaaacataaaaaaatttcgatgccaattactctcaattatatatatatagttatattg

SEQ ID NO: 380894 - DNA, 6102 bp, Cannabis indica
tttatcattaggtttggatagtaagatggaattaaatgaatgagtttatcatttgccaacactaaattagaagaaaatagagtacatgcaaagtagcaattctttttctaaccaaaaatgaaaagaaagaaaaacatgaaaatggtgattggatagaataaaatatttcagaactttccaaagggattaagttattccaaactagggggattgtttaggttgttgggtgaattttttcagtatctttctaatttgataacaaaaaaatattataaaattatccacagtactatccactcaaatcccacttcccaaaagtgacctatatagatatagtgataacattatttcttgaacccagttacataatataatcatttcggagtctctgttaaatatgctaggatttatttataagtaaataatgaattcatcccagaatcctaatatatacttacatcgtcgacagttagaatccttcaagcatggaaggcctcttctaagaaagaacgaaaaaaaaaatctattaggaaaaggaatacagaccaagctttataaatatgtactgtaacgttagaatcctgcgactgaacttgaaaaatattataataaaagaaggcaatccacaaaagttgagaaaaagagcatctcacgagttgttccaagaggaagagcttcgaaacatattcaggtttagattcctaaattaaagggaaaaaaaattaatcaaaaccacatgcacatgcacatgcacatgcaaatgcaaactgtaccgaaaataattatcaaatagaattctgacttgctgtccaaacaagtatgttcatcaggtccttgccacttgaagttattgtatgaaagatcactgtacataattaaatgttattattagtcacataccataaccaaaatgtgtgcacaaaataaatatttagtgtaaaagaaagagcatctgattcagaatacagaacaggaaaatagctaaagttactccacactgaattttaaaagattataggtataccatcatattgatgaaagaagaaaactattccaacccataaatcattattaaccatcatccaccttctcccaaaaagggtccgaaatttctccttaaaaaacaaaatagaaaataatggaatagaaaatgaattgaggtcaaaagtctttttgttttaagaaaacctatttgactagaagcccttgataagcctccaattacttttgtttatgctaggaaaagaaccagggggactaagggtgaaattactactattatatgagtttgtttgtgtgtgagtgggtctcacgtgtgtggcatgtgactgtgatataaataatgtgggttttgtattgtggggggtattgaacaatttgagaaagctgctgtaaggaaagaccaggctaatattctggggctatcaatccaatttccagatttcttctacttcttctcttttctttgctgtttttcactaattgataggaattacctatcaattggtatcagagcataccggttctatggggccaaagaaagatgccatggctgaaattattgaagaaaaggttggggaggaagtcgctgacctccgacaagacgtgcagaaggtgaaccaagggctggagaagcttcacggggagattcaaaccaccatcgagagcatcgtagcgaagcagatggccactgtggtaagtcacatctctcagctcctctctccgacgggtcaagcttcaccagatgcagctgctagcgccgaccgacaacagcgagctgtagaaggtcacgggtcaaccatcggcgaacccagtggactgggtaatcaggcggagcagcaaccaccgaagttcccagccaaaatggcggtaccgccagtcattatacccacggggcctcactttcagattgggtctttccaatccgcccccacttccgtctccgactaccgcccccggaggatggagattcctctcttcaatggtgacaaccccgatgggtggatttatcgcgtcgagcgatatttcttgattactaaaatgtctgagtcacttatgttggatacggccattatcggattagacggggatgcactgtcatggttccaatgggagaaccaacgccggccgatcacctcctgggcaatgctcaagcatttgattctccttcgatttcgagcggcgccagtgggttcattatcggaggagctgctgtcactttctcaaacaactacggtaaaggagtatcgggttcaatgggaggtgctggcatcgcgggttccggatatacccgatcacattttggagggaagttttgttagaggacttaaggatgagattaaatctacccttcacattttgcagccccaacggtttaaccgaaaattatggacacggctcaacgcattgaggagggccatcacttaatggcagcagttccgacgagcagacccaacacttatacggccaaatccaacttcagaccgctatcacctactcgaactcattactctttcccagtttctcgaagcaataatactactccaccaactcgagcctacccatcaccgacggcatccttggctactacagcatcaaaagctggtagtagtcgttcaattgcggctacctcctacaagcggttgacagaagcaaaataccaagagaaacgatcgaagggtctctgtttcaaatgtgacaaaaagttccatccgggtcgtgaatgtgagcagaaattgttgcaaattctcctcactgccgatgaagaagactctgagtcgcccgacgatagcacacctacaacccctgattctgatgagatggtggccaccgaagaaactcttgccaccctctctctcaattccttagtggggatcaccacagccaacactgtgaagttggcgggtcacatcggaagtcaacctgtcacagttttgatcgatagcggtgccacccataacttcgtctctacggatgttgttactgcagtaggcttacccatttcggctacctcttgttatggaattctcctcggtactggtggcaaggtgcgaactgaagggatttgtgctaaggtcgaactagatttgggggccttgtgagtcatcaccgacttccttcctttagagttgggaggtgcagatgttatactggggattaaatggctggaaacattggagaatatgcaagttaattggaaatcgatggtgatgaagtttgaagtggcgggaacatgggtgactctacaaggcgatccaagtttatgtaaatcaccaatttctttgaaggctttgatgttaacaatggatcatggggctgaagcttattgggttcattttggcaatgtgactgctgaggaggcgaacactcagccatcgcccccagttgccattgttcagttgctagatcggtatgaggatgtcttcgaaatgccaccggggttaccaccaccccgctttcgtgatcacactattaccttgcaaccgaatacgggtccgattgcggtgcgtccgtatagatatgctcaaaataaaaaaggctgcaattgagacgatggttcaggagatgctccgcgtgggcattgctcaaccaagcacgagtccattttctagtccagtgttgttggctaagaagaaagatggcagctggaggttttgcgttgctttaaatcgagctacggttgcagataagtttctcataccggttattgatgaattacttgatgagctccacggagcccaggtgttctccaagcttgatttgaaatcgggctatcatcaaattcgaatggccccgggggatgtggcgaaaacggcttttcgtacgcatgaggggcactacgaattcctagtgatgcctttcggcttatgcaatgccccagccacctttcaagcgctcatgaatgaagtgtttcgagacgtccgagcgacttgcgtgcttgtattctttgatgacatccttgtgtacagcccctcattggcggatcatgtgacacatctcgaattggttcttgctcgacttcgacaacaccaactttacgcgaacaggaagaaatgtatcttcgcccaagcccaaatggagtacttaggccatgttatttcagcggaaggggtggctgccgacccagaaaaatcaaggccatgattaagtggcccactcctgtcaccatcaaggacttgcgaggatttttgggactcaccggggtattatcggaagttcgttcagggatacgggagcatcgctcgacccttgacggatcagctaaaaaaagatgcttttcgctggtctccgaaagctcaagatcttcgagcacttaaagcaagcaatgtgcacggtgccggttctagcgctgccagatttttcagcgcctttcattcttgaagctgatgccccggggttcgagattaggggttgtcttaatgcaacatggtcgccccatcgtctatttcagccgtacactctctcctcgagctcgttccaagtcagtttacgaaagagaattgatggccatagtccttgccatccaaaaatggcggccttatctcttagggcgacggtttgtggttcgtacagattagcggagtctaaagtatttgttggaacaacgtttggtctctttggaacatcaaaagtggcttactaagctcctgggatatgactttgacattcaatacaagccggggttggaaaacaaagctgcggatgctctttctcggatcaatacgggggtcactttgtctgccatctctattcctaatgtcattttcgtgcctcaactacagtcgcaactagcagctgatactgagttggctaaggtcatatcggagctttctcggggccaagattgtggggttactcgctccacaaaggttgccttaaatttcgggggcggttagtcttaccggccacttctccattcattcctacgctgctatatgagttccatagtagcaaggttggtggacactccggggttttcaagatttttcagcggttggcagcgaagttctattggcgtggtatgcgcaaagatgttcagaaatttgtagcggagtgtgctgtttgccaacaaaacaagtatttggctcaatccccggcggggttactccaacctctccccattccagaccaagtgtgggaggatatttccatggatttcagtgagggacttcccccttctcacggtttttgactccattttggtggtggtggaccgcctcactaaatatggtcacttcattccgctccgccaccctttttcagccatgactgtagcacaactgttcatcaaagaagtggtcaaactccatggtttccctcgttcgattgtgtccgaccgtgacaaagtatttttgagtctgttctggaaggaactgtttcgctcccaaggcaccactttgaagcatagcaccgcgtatcacccagaaacaaatggccaaaccgaagtggttaaccggtgtttagaaacttacctgcgttgcttcgtcagttttaagcctattcaatgggctcgttggttggcatgggcggaatactggtacaacacttgtcaccacacggctacaggcatgacaccgtttcgagctttgtatcatcgggatcctcctcctctcattcggtttgactcttctggtacccaagtttctgttgttgaacaagtgcttcgtgaacgttaagatatcttagccttgctgaaacagaaccttcttcgagaccaacaacgaatgaaacttcaagctgaccgtgttcgccgcgatgtgacctatgaggtgggagatcttgtctatgttaagcttcgtccctaccgccaacgcactgttgccaaacgtccgaatgagaagctttctccacgaattttttggtccatttcctgtggttgcgcgagttggtcctgctgcctatcgccttcagctgccacctgatgccaaaatccaccctgtgttccatgtctcgctgcttcgtgcagccctcggtcccaacacaggcttctcccctcctcctctctcactgctgatcttgagtggctcttggcgcccgaagagctgctggcattcggccaggcacccacaacactagtccgcaagctctcatcaagtggaaaca

SEQ ID NO: 380895 - DNA, 1019 bp, Cannabis indica
taaatacgcgtaaactttcattgtaattcctatttatttatatcattcaagattttctgaaaattccgtttcaaaaaaaaaaaagattttctgaaaatattaattagttagtggcttcaacgtcttataatctcttgtctttagaccttattcgtttcttatcagatattagatcatatgtacttttttcaaaggttattataaataaacaatagcaaaaattgtagaactcaacactcaaaccattacgcatgcactttaatgtacaatttgtaaatgtatcaagaccccacataaccaacaacatgtatgattaattcacatatagcacaaagatacagcatgtgacatagttataacaataataattcatccttcaagtatgcatagattaaaataattataaaaatttaagataaatttgatagatgctaaacaaaagaataattattataaggaaattcataattcaaaaacagatacgaaattatcacctcctcttatattcacatccatttacttgaattagtctgaagtggccaacaaagttgcattttatttatgatatataacacgtctctaacatgcatgtttaatttctattaaccaacctttgctgaaatgatacttttaagttgtgaatatatcttactatatactatgagcctattaaccttttcacataaaatttcgtctaactttttcactcaatttcattactatcctaatgttagatgtgatatttgctttaaattaaatcatggctaattagtaatttttttcactgaactttgacatgtactaaatcgttgctcctgaacttttttcgtcgttaaaatttaccccgaactattgacattgttaaatttaaggacttttgtctaatttcatttaattttactgtttcagtgattgtttatgtactaaatcatgctcaccagactttgatatctaccaaatcatgcccctcagactttgatatgtactaaatcatgccccttgaactttcatccatatta

SEQ ID NO: 380896 - DNA, 2126 bp, Cannabis indica
attcgttcatgtggggaggtgcagtacgatctccaactttgagtggcttataaagaaaatgcaagaatattgggccctactcctacaccatgccaacattcagtttctcaatacaaaaatagaaaatggtattttgcaatttgaagtttttgtctgtttcttcagatgatatatatagaatctaattgtctctattaacgcttgtgagtgaggaatggaataaaaggggaaaaaaaatctatcttcttcaatgcgcaaatggattaagatgaaatggtaatcggattgaatggatttgtttctcttatttttttttcttccttttctttttagtttcttcataagagataaatgttacattataattattattatttgcatacttattcattgattatcctgtgataaactaaaatgcttgtgctgtcactttcttgtggctcacattttgaatgaagatcagataagctaaaaattcctgctaagttttttctgattaaaaaaattttgcagtctcatcataacgttgttatttatattcttattcctgattcttagagagtgtaggctcttcaatctctatcatgattcatgcgtaatattagaatattcttcttctagctcctcattcatataattaagagaatatctcttcctttttacaatattcgggttgaaattaaagaactgaatattttataaaacaaacttctccaagttgatcactgatatattatatatatagaaactgtattaagccaaatagattttaaaagaatttgatgaatttttcatttgttagaaatttataaaacactagcatagtaaattgagataattaaatgaaagaaaatcaataatgaaatttatgagtacttaatgattgttatattgagataataataaaaattagtagtgcaatactaagcggatcatatgatcaacaattttatataataatttggtgagataattgctcccgtttggtcagtttctataatttttttttagcttttaattttcttttttaacataaaatatcaacttcattgaaatttagcattcatcatacaagaggatttgaagatcattaggaacaacattccgatgaatgttacaatcagaaaaaccgagaccgtctagcaacaaagtgagcgactcgattagctgatcgtctaacaaaacgaagactaacattgtataaaactaacagtaagattttacaatcattaataatcaaaccaaaaacaaaaatcatttgttgtttactaaagattagcttttagaattaaaaaaagtcattttagatgtatttggataaaaaataaaaaatatttcttataaaaaagtttaaaagtcattttggaagaaactaagatttgtagcttctctcaaaaaaattttgataaattatttttaaaatcaaaataatttacataatttttaatttaatatcaaaagattttctttttaatgatattcaaacacattaaaagtacttttaagatctttacataataattatctaaaggacaaaaataaattaaagcttatatacttattttatactattctaacttagctaaactatgtatttataaactaaggaaaaaacttaacaaaattataattgaatcttttcatcaagcttcatacaaatgtcattaattaactatagatgactaactgtacgagttaaaataataaagaactatttactaactcatattttaatgtctatatataaactcacatatcaattaaataatttaaactttaatataagtacaaaataaaattcttacaccgtctacttaattattaacaaaagcggtaagctgctcaaaaagctagagaaaaagaggctttctccactacttgtggccaagaacaaaaggttgttctaacaagaaagcccttgttagctcactcaactatttgaacttttaaatcttattctccatcaattctatcatattaaaattgatacaaaccaactatatattactttcagattatttttctaaagaaaagatgacatgaaagtgaataagtacaaaaactaaagtcaatgaggctggaagggaaggaaaaaagacttgtaagagagaatgggaaagtaaatt

SEQ ID NO: 380897 - DNA, 4417 bp, Cannabis indica
cgtatcatcaattgatttatttttcccttgtccataatcaacagattaggtcaggaattgagttgagcacttcagattatgacaaagagaagttgcaggagagattagccaagctctcgggtggtgttgctgtcctgaaggtaggccaacatacaattcttttattcgatgaatcttatttctttctagtatattcacgggattgttcgacatatagcccaatgatataacacaatgggaaattttactcgcagattggaggagctagtgaagctgaagtcggtgagaagaaggatagagtgactgatgctctaaatgccacaaaagcagcagtagaagaaggcattgttccaggtgacttatcatacccctttttcgcagtcattgagttggttataagattattattcttatcttatgaagtttcatttaaacaggtggaggtgttgctctcctctatgcatcgaaagagttggacaaacttccaactgccaacttcgatcagaaaattggtgttcagattattcagaatgctctaagagtaagtaaaactcttcggctttcatgatggtgtgctaccagtttcgattgtatttaatctgatcgtgttattttcagacacctgtgcacacaatcgcatccaatgctggagttgagggagctgttgttgtcggtaagcttttggagcaaaatgaccctgatcttggatatgatgcagccaaaggtcagtacattcatttttacccttttacccttgtatttttcttctacaataacaagttgacaaatggctaatgcttatcttattgatcaaacaggtgaatatgtagatatggttaaagctggaatcatagaccccctaaaagttattaggacagccttggttgatgccgcaaggtaaattattataagttgttgcatttcagtttcactcggctcttgggtttttgcccggatcaactcttattactcgtgtttggtttatttcgatgcagtgtgtcgtctttgatgacaacaacagaagctgttgtggtagaactacccaatgacaaggatgctcctgcaatgggtggcggtggcatgggtggaatgggcggcatgggcggtatggatttctgaggagtccagtccttaatcgcgtgatgctgttatttcaacaaacttaagactcttttgggaattttcatgaaatcttgagaagcaaagattagatttttttttcttgatattattatgtacccggacggtaccggtttgagaggcatccttgtaatcataaggcgagaaatgttcatgttctcttaggtagtttcttctgtaactcactaatttgaattggaggaagaatgggcgtgtgtgcttgttattatataacaccattgaaactattctttttcgaaataaacttttttgtattcttctctgcacaaatggcagggcaaagctcatcatcatcatctttatcttaagaattttaattctttaacatgtgatctaaatgaagttttgtcatgtgtatccttggttggtatttaacagtgaaaatatttgtttggggttgattttaacatttgtaaaagaatcggtagctttctcaattttcacaaatattccctaataaaatatttctgataaaatgtttgggatttttttttcttttttcaatgaaatttggtcttacaagagtcactcgtattctatgctacctttttgactaaacaagaaatatgttggctggaagttcccttctttctcgtatatcttattgtgattttgatcactttgtcaaccaaaaaaaaggcctaatgcaaagtactttgtggaatataatctataagagtcatattgtattagtacttgttttgacaaaatattatattgtatttattattactattataaattttattataatccaatacatataaaatgatccgtattaacttgtattataatctttacaaacttggatcagaccctgaactccgaccacgattgcatactagacctcggaatccccctggaccttagaccccaaacctcgaccccgaagctgaaccatgcattttggcctcagactcgagcctagacccaaagtcggacctcgaaccccaaagtcggaccttggaccccggcctagcttcaaacaccggaccttagacctcagaccctggacccaaaactcgaagctcaaatcgaaccccagaccctgacccgaaccctggacctgaaccttgaacccgatcccgaactcgaacccagacccaaacttggatcctaaactccaaaatcagactccaaaccccagactcgggctccaaacccaaatcctaggacacagacagaggtcggacttgggtcgagtttatggtaaagaaaatataatattacacaaactattaaaatacaaattaataccaaacatagtattgaattgaataatattaatccaacataatactatacaacataatataatacaataccgcataccaaacaagcctttaaggattcgcttagtacggtatattacatcgtattgtattattatataatattatatataaattatactttatccaatatttttatgtaaaaccatgtggtatgacttttatgaacatgtaaatatataatattttaagataaatcaaattttaacataattttatataaaaatataatatataactaaatttaatataatacaatataatatgatggcaattaatataataatatttcactgtgtgttgactgatgtactcatctgtctcttgtcaaaaagaaaaaagaaaaaaacagttccacttctatccatccatccaagaaacaagatcatcctctattaattactctaaaatttctcttacatctttgtagataacaaaatcaaatgcataaaaattattattacaactataatttcagaaatgtttacttcttgcaatgctaactagtgcagtatctgatctttgttttacaaattctatcagaccaaagggtacattcaatacaatttgctcacacaaagcatagagcatagtatttacataagattgcttaaactaagcaaagaacaaggcaaaggaaagcaaaaagagagcttatcttaatcatgacatgctgcaatttagcagcaagcatttatctgccttttcgacgctttttcaatgtagcgcagtccggacaaaaccattttcctttcggttgttctttcaaaccaacacagccgaaatggaaccattctatactgcactgtcaaattggaaaaatgtttcgtcagatagtgaattgcacatataaaaatataaaagagattctatggcaatagggaaggcattacatacacttggattatcacatgcaaccattgccccatggctaacttgtttacaggaacaatatgtcggttcgtttggatcaaccggcacctctagatccatcatagtaagatttgacggtgctgtagctggctcggttgatgctgatactgctgctgtcgctgccaggcgtgttctgcagagaagaaattctaatcaaactctaaaattttaaacatgaaaaataatagcagcctaaaatctgtgatcaagaattgaaaataaaaattgaaaagagatccgtgatcaagaaaagatcttatacttcttacggcctcctctaccgccttcaccaccctttccagattttccaccactatccaaactcgcagcaggggagccactagcaatggcactttctttttctgacataatcaatttcaataaataagtatacacaaataaatacgagaacttagcataaattaattctatcaattggatgtattgccaagcttaaagaatttcaagaaataatgtaaaataccacgtcggatttcttcaccgagttttttgaaaatttgatccagttgtcgtatgtgagtatcgacctgaagcacaattattcataggcaatcaaaaaaggttacttcaaattcaaattcaaaatcattaaacatgtggatcaactaaaagacttgattgattatctattttgggaaatgttaaaaactcattttagaaaacactcactccatgcttcataagagttgagtacaatattttgttgttttctctaatttctctgttttgtatacaaaacaactaaccagttgaattttgaaaaacaaatatttttggtttgcaaacaatatttccgaatcataaacttttaaactaatatttaaaacttattgtttttgaaatggaaccatatcagcatatagaaaccatccttaacatctttaagaatatatgtttttacacctgttttgtaatatagtttaaaagggtatttctttctgtatctattttgagacgaaagaggcttaaaagtaaatgaatcagtacatggaaattgcgtaccaattcat

SEQ ID NO: 380898 - DNA, 1707 bp, Cannabis indica
tttctctcttttttttttttatctttggtagtaggtgggttgtcgtttgctgtcggcatttatggagcttgttaatgcttcctcaactacttctcctcttagaggtaaatgcctttctgttaatgaggctttggttaagttggtccctagtgaatcttcccaaaaagtgttatccaccttttgtctgctaggaaaagtagtggcccccatggctatgtgtgaggccaatgttgctgagtttgtggccaaggcgtggaagttccctgtgactgtagtggcgttgactgagggccctaacttcaccaactgttttgagcttagttttgcccgtgaggaagatcgatggtgggctctggatcacggcccctggtgtatccgtggctattcattttttctgcaagtttggtccccaaccaatatgtcccctgttaaaaacgatttgatgcgtacatgggtgcaggttcacaatttgcctcatgagtatttttctaaggctaatggtcatctgttaggaggaaaagctggaagtgttgtttatgtacatttacaagaggataacccatcctcatggggtaaattcctcaaaatattgattgaagttgatattaaaaagcctctatgctcgggatgcttcttcgacttggacacgggcggtaggaagtggctccaattcaaatatgaacaaattggcatattctgctactattgtggttgtttgggacatcaaaggagggggtgcaagctctcttctccgatcatggtcaccagcgaaagtggtatcccgtttcctctgtatgggccgtggctctccacttcgtcatcgtacctggatgttttttcaagcgccaattcatttcaaccctgtcgcgatcatcccggttttgccctgtatgctccgttccgtcgtcctctcaaagctgctgggaacggccacggtgacggtggctatgggaagctagtttccaatgcttcccgaggatcgaggcgaggtcggatgttgacaagtcgtggtgcgccgatctctggtaagggccagcgtgctgcgtggatcaccaaaccaaagccagctggtgatggtacgccggttgccaattcgggtatacagaccggttttgaagatggagcaattggaaaggctcctgctggtttgcctggaatagttacgcctatgtctgtacctacaagtgactgtttgatgattactgtgcctaatttgaacaaggcttttgaagaaggaattaatatgggccgaactcttgatgtgtctttgcaaaaaggtgggccggtctctcctagtgggctaggtgcattggggcataatggtactgggccaattattttaaatgtaaagaccaactgttgttcaactcttgtgtcgacgtggagcgtggaatgagtggggttttaataggtgggccgagtgatgttaatggcccagttggggaaaaggttagtggcgttggtgatgggccgaattactctactgggccaattaatgttcatgagccaattatttctaatgggctggattttaatgaagcacctttaattgaatgtggtaaggatattaataccatgtctaatgaaaaggaagctgagaagaatattgaagaaaagaaggccttgtctcaattttttaaagctcaagaagagttacttcatgacttgaaacattttggtaagttggacttgtatgagatcaaaagt

SEQ ID NO: 380899 - DNA, 3110 bp, Cannabis indica
ttatttgaagtcaacagtagtacacttaaatttagagggtattagttaccactgatcttctttagcatttctctagatttagttttgaataacttttgcaaattgacctcccacactcaagacaggtgctcaactttttttcatggttgttcaaatagttcagccagttaattaaacttttagccaggggctattttgcaatacaaaaatgacttgttttgccaattatttctgtattttacataaaaccttatacaaatgtatggacagtcatgagaagtaggtggagttgaggaggaagatggagtacttgagatgtgtgatggtgagatattagatgagttaacaacaagcagaggagaaatcaaggtcagagctatgagtttcactgaagacagacgtggtcaggtgatatcattatcccacaatcgatcaatatataaattatacataatggcatgcataatttgataatctataggagcctctcaatatcttaatatatttcatgtgttcgttaaattttcttttatagattcatccaggggatactgtggaagggatcatgtcgaggaggaccacgaatgaaatagaggagttgaactaatataatataatataaataataataatgtctacacttctcaattatatatttatatatagtctcacttattgtggcatgtttacgaacttgatggttaggtttctaaagttgtttttgaatttctgaactgctgattgggtaaccagtgaatttcagtttagcggtttctaagaagctaaaagcagaagctcgaatccaaccaaacagagcctaagtaaatacatgtttaatgtacaaactatatatgtatttcgtctgcactttagtttgcttggtacttaatgtaatgttaaaacatatataataaatcgaatgaagtacagactaaactggttgtaacattacattaatgtgcatatacatgtataaatgcttctctgtacttcatttagcttgatgcttatcatttatgcttctctgttagcttgatgcttattatttatatgatatttttatgtgaacataaatggttcaatttcaaagaaaccacaaccatataattaatttacatatatttccaaattaatcatatggatccttgaaagagagggcttgtctattaatatattcttagttgtctattaattaatttacaattgtcttctcttatactcaatcaaactcttttcaccttttcttctccccttttcggtttctttggtccaaattgtcatgaactctagttaatctttcaagtaatccttgaaagattcacacttgagaagatgtggaatgttgggacagtgagcttgttttgtaaacacaatcattttccctcgaatctcgtgatcatgtaaccatctttactgtccaaaattgttgatgcagcattgagaagagagcgacaatcttttgctaactccataatgcttttaggatcttttgattttaagaaattctatattttagattttattttttgtcagaaaaataacgtaattaattaatgttccattctattttctggttttttatgccatgttgtctcaactgttgggttataacaattgtgttgttcaatagtgattgattcactacacatactcttcaaataaccaaactttctcttttttttgtgtaaacattagtaagaaaacttgagataataaattgatgcattaggctccccagagcttgcttcttcacttcaaattcagcttttgtctccaaaatttggaggatctaatttcacactttctttcaaaatatccaattttaacctcactagaattctagaagtgatacattgtaagaaattgaatctttttttcaagtcaattgcattcactacaacaattagagatagagtcctgagttggagtcatttccaatgtgtatgtagaatattacttatagaattaaatgaattgtctcttacaactcttaccattctctctattacaaaacttgcatgaaggatcatgtgttgtgtgtgtatacatacataatacatatatctttaagtacagaattaagtatatgttacatccaatccatattacaatacaattcttctgcattttctccaattagattgtgactgtgctatgctatatatattatgacttgaataattcataaacaaaaagaaacaattaatatatattttatgtattaaatctaaacatcatcattatattacattttcttaattaaagaaaattacaatgtcttaaaaaaattaataaatgcaatgtaacattagttcttcaagttcatcaaacatttcaccacttaaagaaagatgttcaaaattagaattcaggttgtgatggaagaaaaggaataagtggcagtgcttcatcattggtttggagctgttgcgatgggtagtctccatggtcctcgatctcattcaagaaaacacgtacaatatgaattgtttgatgacaatgaaattcttcttctccgaatctccatacttagttcatggtttattgcatcgctatcttttcttggtggtttaattaaggattgaaatataaaaagaaagaaaaggcacttaattctgttatatattgtttgggattttggtttaatattttcggtaaatgacaggttgtgaggttgttaatggcaatatgaaagtcattctgcttatgagcgcttctattaattttgaaatatttgatctaaatcaaatttggatcttctaacaagttatcgagattggcagttatgctcttgagctcattgctcattaattctgttgatgcattatttgttggttcttgctctactgcgatattcttctcattaatcataaatacttcagttggctcttgttctgctagcgtaatattttcgtgtactatttttttgtctttttgtgtttggttctttattctcattatttgtaaacgtcatcttttcttttgatttcattttataaattttgcataacatccatttacattgttgcaaaaaagataaattaaaattagggattattttataaatacacaaaaacaataaaaaaaaaaatacaaaaatacagtttcac

SEQ ID NO: 380900 - DNA, 5114 bp, Cannabis indica
tttttttttctttctctaaaagggcttatggtgaaaaaatcttctgggtcccttctctttaatgccatctggttgttaatttgcaaacccacttcctgtttattcatgggttttcttgaagatgaaagctgagttctttgggacaatgtgcaactggtatggtgctacaacttcattgtaatctctctatctatttcagattgttgcaagcttttgtctttatatactatcaagtatctttttactaagatagtaagttagtattgggtttctcattgttcttaaaaatgggatcttggtaaagaaagtttgcatctttaatgcttttagatctctggagttggttaagtttctgtgctgtttaatttatttcttacatttattgttctgtgtcagttcttcagtctgaagctgtacttcatcagcaaaatagttctttggggaggagagaagaacagttccttgaagctctgcaactcaaaggctgagtttccttcgtttagggaaagtggtggctttttgttaactcatagtggagttcattagttgtttatatgtgtttcagaaatcattgtgttgctttctaaggtttctatcacctttctattctgcacaaaatgtcatcattatgtctgttgtttcactgtatataagtgtaggagtgagttgtgttttgtattagctcctagatttggagcacgctttgctagattatgttttttgttaagtggtattggacttgagaattagaagcttgaaagtcccactttttcttctagctgagctatccttttctcttcttcctttttttcttcaattgggtgaatttgtttgtaggagtagaatgaagtttggtgggctttttgtattattcctactttttgtatctgccatgggacaacttccttcccaggacattttggctttacttgaattcagaaagggtatcaagcgtgatcccactggttatgtcctaaattcttggaatgatgagtctatagactttaatggctgtccttcttcttggaatggaattgtctgcaatggtgggaatgttgctggtgttgttcttgacaacttaagtctttctgttgaggcagatttgagtgtgtttgcaaatctcacaaagcttgtcaaactttccatggccaacaactcaatcagtggcaaaattccagacaatatagctgactttcgcagcctccaatatcttgatatctccaataatctattctcttctcccttaccagtggggattggtagattacagagcttacaaaacctttcattagctgggaacaacttttcgggttctatccctgaatcaatttcggggctttcctccctccagtccttggacatggctagaaactccttttcagggtcactaccaacatcactgacaaagttagacaagctggtgtttctaaatatgtctttgaacagctttgacaagaaagttccaaaagggcttgagctgatttcgggtcttgatgtaattgacttgcacgggaatatgctggagggtcatcttgatgttgagttttttctcttcacaactgccactcatgtagattttagcagcaatatgctaactagttcacagcaagagaagtttatatcaaggatttctgaaactatcaaattcctgaatcttagccataaccaacttactggatcactggtaagtggcggtgagctccaaatattcgaaaacttgaaggtgttggatttgagctacaatcagctttctggtgaactccctggatttagttttgtctatgatctccaagtcctcaagctcagtaacaacaggttttctggagagattcccaacaacctattaaaaggagattctctggtcttaactgaactagatttgagtggtaacaatctctcaggtaattcaactaccaactactataggtcctcttgttgtaacagttagtttgttgtgtgatctgtttatctgaccttcattacaataatttattgtttttttggtatgatctactaaacatcttacatttactcaattttcaggaccaattagcatgatttcgtccacgaatttgcgtgtcctcaacctttcctccaatgtgcttattggtgacttaccaatgctgactggaagctgttctgttcttgatctttcacacaaccagtttgaaggaaatctaaccaggatggcgaaatggggaaacattgaattccttgatttgagttggaatcgtttgacaggaatcattcctgaggtaaccccacaatttttgcgcttgaattatctcaacctctccgggaattcactcagtagctctcttccgcgtgtaataactcggtatccaaagcttagagttgttgatctcagttccaaccgatttgatggatcagttaatgacttgttaacaatgtcaaccttgcaagaagctcatcttgatcataatctattttcgggttctgttaaattgtcacctgtgtctcccagtaactctaatcttcagattcttgatctttctcataaccagtttagtggctattttcctgatcaattgggttcaactccaattcaagtactcaatattgcaggaaacaacttttctggttcactacctacttcgattactgacttgagctcactaagctcattagacatatcacagaatcattttacaggccctctgccaaataacttccctgattcccttcaaggctttaatgcttcctacaatgatcttactggtgttgtgccagagaacctaagaaggtttccaagatcatctttctttcctggaaacaatcgtttgagtcttccaagtggttctccggattcaagcaattcaccagctgaaaactccaagaaaaagtcactcaagacagtggtcaaagtaataataatagcatcttgtattgttgctttgctcattattcttctgcttgcaatcttctttcattacattcgtgttgcaagaagaataccccccgagcacaacatcaaaaaggatgccagtaggcatgctcaaccgaacccctctagaattcgtggaacagacactgttggtgctttgactgtttcagctgaggatcttgtagcatcgaaaaaaggatcatcgtctgaaattatcagctctgatgagaaggctgttgcttttgctggcttttcttctcctttgaaggacagtcatttgtcttggtcaccagagtctggagatttgcttgccacagaaagccttgcaaaattggatgtgaggtcgccagatagattggtgggcgagctttattttctcgatgatactgtcacattgtcgcctgaggaattgtctagggcccctgctgaagtgttggggagaagcagccacgggacgtcatacagggcaactttggacaatgggctgttcttgacagtgaaatggttgagagaaggtgtggcaaaacagaaaaaagagtttgccaaggaagctaaaaaatttgcaaatatcaggcatcctaatgtggttggtctaaaagggtactactgggggccaacacagcatgagaagcttattctttcagattacatctcacctggaagtcttgcaagctatctatatggtaactcatttatctttcaattgtttctacatataaaaccttttattttattgtccaaaatgaaactgtgaagagtacttgcaaaagagaaagatcccattttcaatatagtttgcctctatttaattgctatgtatggtgtgttaggtactatagaaaaccatgttatagattacctttcacataatatcttttgtgcttttgattgttaaagtgcttaactttatctgtttgcctttgatatcttaattgtcttgtctaatgaactttaagtacatttctttagatcgtccgggaaggaaaggtcccccattaacatgggcacaaaggctcaaaattgcagttgatgtttcccgcggtctaaactatcttcattttgaccgagctgttccacacggtaacctcaaggcaacaaacatactcctagatggtcctgatctcaatgctcgtgtagccgactactgcctccaccgtctgatgactcaagctggcactatggaacaaattcttgatgctggtgtcttaggctatcgtgcaccagagttagctactatgaagaagccattgccttccttcaagtctgatgtgtatgcctttggtgttataatgttggaactcttaactggaaggtctgctggtgatgtggtttcgggtgaggaaggaggaggtgttgatttgacagattgggtacgcgtgagagtatctgaaggccgtggttctgagtgttttgatgctgttttgacacccgaaatggggaatccattagtagagaagggaatgaaggaagtgcttggaataggattgagatgtataagatcagtttcagaaaggcctggcatcaaaactatatatgaagatctttcatcaatataaggttgttagtttgaatctaacttattgatttttcagggggacttaatatctcattggcttccctatttttgtgtcctttttggtgtaatgtaatgatgagttaagtttgttaatcttttgttgtaaaaatggatcatatttgaaaaggatgcaaatgtttatttcaactgttactgtcattatgattttttttttcacttccatgatgattaatgatagttgggcattggatattgtttgttacctctttgaaaatggctttgggaaaaaagatgttaaatatgagtttggtgtccattgcatctgcattgaagacttgtaatgattgatgggtttcttgagttgagttaatgaacttttgttgaccactcaattttaataaataagaacacatgcgtggatgggagaatttaatatttggtaagaacatgactattaagcaccagtggtactattggaataaaaagaaatggtacatctaattactattggaatggttagtaatttttttaataagagtaatggtacgcacatacatactttacacaaaaatttaacacgggataaataattttgggaaattctatgatataccttcttaaaagagatacttacatttttatttgttttaacatttaaaataattttttagt

SEQ ID NO: 380901 - DNA, 1637 bp, Cannabis indica
aaaaagttacctccaacttctcactttccgtctttataacatccagtgattgtcgcagtgcccttacttttccttcagccctggtaattaaggtctgcaagcaaacaaatgctaaactaagtgcagtgttgaattttgtgcttcaacataaccagttaaaattgtgacataacacttccactgtttcacaatcattagaaaagccagagagaaatggtaatgaagctctcaaattccgtacctcttcactgagaaacaagcgcagggccttgtggtacaaaacgcgccgtggttctggacaggaattaaattttgttagcaatacccataacaatagtgcctgcagtatcggccatttagcccacttccctccacatttcatcaagtagttaactttacaacatctgaatatcacaagttcacaacataaactatcacctagcttaatgaagatcatggtactatgacattgtgtaacacctaaaagaacacagttataacattgacaagtttactgtagaaattaaatcatacttttcagtacaagaacacccaaaccagtagcaactccgcctgtaagaagtggatttgaggctgaaacgataacaccctctgcaccaaaacagtagcataaataaacatttatatgtgttgtctcaaatttcaactcgagtacacaaacacgaataagctaatacaagcgaaaaaagtgacctttaatcttcccgaatataatattctcgtaagcaccacactcggatttaacatcttgtaaagagtcctacatccagagtttcaactcaagtaactacaaatgaatcgttaatcaaaacaaaacaggacccttggtttcagtttctcttacaaactcttaattagatattataatgcagaaactatttagtccgctttaattttttcgggaatcaatcaacctaatgccaatggtaacaaacaaattcgaaatgagaattgaggaaaaaattcgaatttaccagagtttgataaaaatgagcagaagaagtggatagaatctgggaaaggcgagacctggatgcttcaacggcggaatcgaaggtctcctctacggtcttctggtaaagccgaccttgctcaattgcatagtccacccatggcttagcggactgccctagaattcgggtattgtaggttgcgggctgctcagggagtgaaaccgttggctttgcctccgacatggcttctggaactgtagccattggaaaatcttgatttattccttctaacttcttcccccttcctcgctcgctgtcactggaagaatgaaaagctgaaatgaattcgtgttggaccccgtctgtgttgattgtcacttgggctggatcaaaatgtaaatggcagccttttgggccgcgagctaactggtagagctttcttcattcacggatagagggaaattttacaaaaatgtctcttcctttctaataatttttttaatcagttttcactactaatatttttttaaacgtttttctcttaatcaatattttgaactctaacgaaaaccggacccaaatctctccacggccctcgtgccaaacacgaccttttgaaccgaatccaaattcgatctcgaacctaaacccgacttaaataaa

SEQ ID NO: 380902 - DNA, 1688 bp, Cannabis indica
aaaaaaaaaaaaaaaaataggttctgattgaaaattgaaaagaaaataaactactgggattgaataagaaaagtttaccttctttttccaacagaaattgtaatcgatctaaaatttcaaaatgtcgatctccaaatctccgaataataaatctatctgatgaattaacttctttatcgatgaaatttcttcgattggatctgaaataaaatgagattatataataaattaccaacaaattttataaatactttcaaatcttcaaatcgtaaatggaaatgaaagagaacctcgctggaaatttttagatatggatagtgtacggttatgaaacggctactaattggtgggttgaagaactgacaaagttgtggtatcctcaacatgcaagacactaggcaaagatacacaccggactactttgtctttctaaatgtcttgctcctaaaaatgacatgaaaaatccaatttcaaaccattgtatacaagccaagaaacatgtatgaacttgtcattttatagggaatgaaaaattaatccaatgctttagaaagaaaaaaaatcaaaataaaaaacacatatataaggtaaaacagtatcacatgacaaacaagatgacatacataccatatgttgtaacgcattcaagaataattttatttattgaaaattaactaattatgtaacactactctaatgtaaaattaattaaaaatattaatattaggttatttgttttttcacattatatattatggtaactaagttggaatttgctatagtttctattagaagaatcattaatatttttttgttgacaggttcaacatatagttgcagagtattttttttgttttgttttgttttttttgtttttgtttttgtttttgtttttttttttttgagagaatatagctgtagagtattgatgactatgcttactaatttttttaagtgtctttttagagtatttggtgtacccaaaaatacaaaatgttatgaatgtattctattcaacattttttctattagtataatgccttgaaatgttaagaatgtaaacttttaccttaaatacgtacactttaaatttgtacactataaggtaaaaacaaataatacataatggtcaatttagtgaatggtatcatagaaaatataattctttcatacaaatactcatgaaaatattaattaccaacacaaagatgttagaaaaaaaagtacttgggtttgataactatccactatgttgatgcattttaaaaagaataattagcatttttactttttcaaatttttgatatttactttttttttttttttttttttttttttgaagaaagctctattatgtcttttaaaataggttaattagtaattttttcccctgaactttgacatgtattaaattgtgccccctgaatttttttggccgttaaaaattctcctcgaactattgagattgttaaattcaaggacttttgtctaatttcatttaattttactgcttcagtgattgtttatgtactaaaccatgctctagagactttgatatctaccaaatcatgtccctcaaactttgatatgtactaaatcatgccccttgaactttcatccatgttcgaattttttactaaaattagactaaagtccttaaatgtaacaatctgaatagttcgggggaa

SEQ ID NO: 380903 - DNA, 3147 bp, Cannabis indica
gtgtgtgtgtgtgtgtgtgtattcagttctccttctctaggcctctttgcttattcattttgttgtgctgaatagatatgaagaaaccaaaaaagatcccagttctacatattcatctcatccaactactggtaaaatagttaaatgttcctttgtttttgcttttttttttctctcttttgtgtatgtgttttatttacttgattaatatggatttttcttctcatggacatcagaagttggaggggatcaagtaaagcctcctaacgaatctatgatcaaagatgaaattaaagctgaaggtttgtttatgccctgtcattcaaataatctcttagacaatgcatgttgggcttgtgacactcaaatattctagttgtcatcaatttattttacatttctaacagaatctcaagtggataggagtattggggagaagaaacctcgcttatcaggggatgagggacctacattgacagagttgagtggctataatatcaagaggcatgagtttgaaattgaatatgataacgatgcagagcaattgcttgcagatatggaatttaaggatactgacactgaggcagagcgtgaattgaaactacgagtactgcgtatctactcaaaaaagtatatgttaatttctcaattatgtttgatttattcttttatgatgttaagagaaaatgtatgaaaatagaatataagaaattagagaagaataaagtagatgtcatcttctcctctgtcttttatgacaacttatagctatgtgtgtgatggtgcttatatattatgaattaattcttttttacatttttcaagtatacttcatctgtgttatataaagctattcatcgatattgaaaatccttgacaggcttgatgagaggaaacggaggaaggactttatactggaaagaaatttgcttcaccccaacccatttgagaagaatctttcacctgatgaaaaggaaatatatcagcggttcaaggtcttcatgcgattccactcaaaagaagagcacgaggaatttcttcgtattattattgaggagcatcgaattataaaaagaatacaagatctcaaggtgagttttgtatcttcagtacttggtcccttccaaaatagtagcattaatattttaattgtcatgaaaaaaaagactccagaaatacctgatgaattgagcattgctataaggcaccatggtgtccaaagtggtgtattgtcattggtgcaattaagtagtgggttatatggtagttcaaattagattattttaagtataaagatgtaggatctgatatttatttaacctataacagtatatggtgttgggcaaccctagagtgctttcagcatttctctgatgaattagggatggtgtactcaggtttctttatgtataaagtgctaaaactcggtaatcagtttatgtgcattaatctgtgaaccatgttaaaataaaatagtttaccttgttcatggttgggtgtgtgagtgtgtgtaggagggggaaagagttctcagccctgttgtatcaaaaagaaaatttaatttaccttgttctgatttataccttatgcaggaagctcgagctgttggttgccaaacagcagctgaggctaataaatttattcaacaaaagaggagtaacgaagaaagtgctcttaggattagagaaagttttcaagctggtccaagtggtaaagttttgcataagcctggtcatattaaagaagaattagatggtactcctctgggacttgttaggggatccattgatctacattctagtaccaaggatccgtctttagcaatgcaatcggttgcaaactcattggatcattgggacatcactgggttggcgggggctgatttactctctgaaactgtaagaacacggtgacaattttcattgcttaaaatggcttgtattttacacaaatttaatctagctgttatcatctctatgcaggagaaacagctttgcagtgaaatccgaatactaccttcacattatctcaacatgttacagatcatgtctgtggaagtgttgaatggaaaggtaacaaagaaagctgatgcctataacttgtttaaggttgatcccaacaaagttgatagggtatatgatatgcttgtgaagaaaggaatagctcaagcatgatcatatcttgtgttcaattttgttacagaacttgtatagttattgcttgttgtataaggtaacagccatgctgctcatgagtcatgactagagattatttggccaaacattataagataatgtataagatgaagcatttgaatagcgctgtgaacccggttggtgctctataaccaaccgttgtgctggataaagctgctcaaacttaaattgattagagaagaagggcatggtgcctcatattgccttttttgtattttggttatgggattgatggtctagtaccttatgaaacaaaatatccttcggtccctaaattgatccaaattacaagtgttcagtatattcgaaattgctcagcttattaaagacatgtaatctttgtatccaatccggtgacctaatctttatgtagtagtgtgaatttgattaattattagcatttcttttaattttactttagatgtcatactgctgaagcacatgcttaagtaaaagtttttatcatctttgtttttattctttgcatgtagatttgttaaataataataaaaaagaattacaatgtatattttcttgcaaacaggctagggaaacactttgaaatttgtttctggcaaagtaaattattcaaaactccctaaaagtgtacatatgattttttttttctccaaaatgttttataagcaaatattatattaacttgatgttgaaaataatatgaagataaagataattgatgaattttaaaaaatatttttcttttatattttatttacaattttacgacttaaaatttttaattacaaaaattttgtttgtaaaattttaaaattattagaacatattttgctcatcaaaaagtaaaaaaattgagaaatcaatttcactacaaatttaaataaactataaaacaaaaaaagaacaatcagaaaaataattctcatgataactataatacaactatatatat

SEQ ID NO: 380904 - DNA, 8510 bp, Cannabis indica
attagtattaatttttttttttcaaattatctaaatgttttttaaattatagtctaccataacataatttaaaaataactaattaattaatataaataaattttaaaagtaactcaaatgtatcttaaattatatgatataaaattaaattttttataaatcgataactaattagtttcttatcagcactattagtaataaaaaaagttacttaaaaatgcggaaaaaaaaaatgaaaaacatccaaaaaaaaaaatgtcatatgcattagatttgactagcgtggcatgtcagtatagtaagattattattgtaaattagataaaaaatgtatattattgtaaactttttttggaaaaaaaaaaaactagagaaaattacattgtatacccactttgatttatttattttaattttaaccttcattttcatattcattgagatatacccacttttatatatgatgttcccattatctcctttagattaatataaatcatatgctacacttaagtggaggagtgaaggtatattaggaaactcaaccacaaaagtaggtagattttaatgaaatataatatgagggtatttttgattaatagatacaaaaaagaggtattcctcgccttattctaaaaaactatgttattttgggccttactctaactgtcagccatgaaagcccaatactaatatactaggcaaaacggacccgattcggattcgattgcccgacaccttatcctctgaaacgaaaaaactgtactcaaatactccttcttctttttcttttcttcttcttcttcttcttcttgtccgtgttagagttggatagataaggtggatatgccagccatggcggtccacttccaggcaaacttaaatgcaactttcaagccctcaacatggcctccccaaacccactttcataatcttaagtccattcaaacctccgcctatcccaagcccagaaccttcttccccagcttaaaccttaacctcactcactcctccccaaagttccagctaagagcttccgctgttgctgctgatcctgccgtatctgaggaggcccctgttgatgaatccgccacaactgaaacttctcccgaggaagaggttcatcttttttgtctctatcatgtttctttgttcataatttccattacttcaaatttgggtcttgtggctctgagacatacaaaatacagaattggggggctgtatataaattttagtttagtgggtagttgaaaattttgctggtttattaatacttcacagcaataatgaacttaatttttatcattgaacatatttttatgtatataaatatttggtaactgcccacattatggtttccctttaatctgagagtttctccggttaaagagctcaaaaatttgtgctaaactattatttgtttgttttataatttagaagcttggagtggtagtgaaggcacttgagaagccaaggcttgtattgaagttcatttggatggagaaaaatataggaattgcgcttgatcaaacaatacccggccatggaaccatccctcttagtccttactacttttggcccagaaaagatgcttgggaagagctcaaggttctactagagagtaagccttggatatctcaaaaacagatgatcattcttctcaatcaggctactgatatcatcaacttgtggcagcagagtgggggcaatctgtcttagaattctaaatgtagaaatttttttgttatttttctgctcttgcttttatctataactaatcaaatctgttttgctttgtttggttctgaagatagtacttatttgatgatgtgggtgttcttgattatggaatttgtattcatgtatgtatcaaactttggtggttatcaacacgtctgaattcattttgctctgtaattgcttctattctttctaatgttctggttttgattaaagctagctagcattgctgtagaagtcacaacatggctgttttgactatgctattctcactttctcatgactcatttccgatctctaaatggggttctttaatcttacattattctgagaaacaagctaaatagtcttgtttcaattggtttcattttagattattcagatcttgcaagctgctgaagtttttaattcatatgcctcccaatttactctagaatggataagtagaatatattacaactgcaattacacatcaatacaagaggactatcccattaaaagcacaattataatttcctagttgtatttctacaaaactatatccaattcactcaaaagtatacttaattcaaaattttatatcctagaacaaactccatgctcactcatcgtgaactatttgtacaaaaaaaattaaataaatttatgtcatgcttacaccatcttcctatcttgatttttcggtgctgtacttgtaaatttccagcttattcattcttgtaaactcagacccaacgtcaatcactgtgtagatttgcatgaaaggtcatttgtagttgcattagatggtctgtgatgcctgttcagtggagatttgggtacgctgaaggtatccaaatcatgctggtcaaggcatgttcctctctctcttttctcagtatttgtatctgaagatgatacttttctttgtacttgtttcttttccttctccgctacatcttccagagtactatcgtcttcaccttctaactctggttctggttctggttttggttctggttctggttctgattctgattccgagctcacttcctcaacagtttcaatcttttcaaaactctgcctgttatccaaatctttagtctctcttgaggctgcagaagtgttggtcatatgagctttggttgtagaagatgtaccaaaatctgacacattccctccttcattatctgaaccatgatgatcctcagaacccttatctattgataaagacatggagagctcaacagcagctcttgcagcgttggctgcataagccgctgattgaaaagcctcttgggcagcatctgccacgtctctgtactttcttctagttttcatggattcagagaagtgctctgcttgcttggtctcttcactcaaaacagtgtcttgtagtctctgagtagtgtcatccaagtcatcagcagctctagtaagctcatttatctgcttccgctcccgctctcgctcctgctcctgctcctgctcttgcttcacattcagtttctcttgctgttaccaaagttgaaacagattcagaatctaatgacaattttcaacactggttcttctttattaagtggcaaaagttcaaaagcttattaccttatgatcattcacagaatcatcttcttctaaatcaagagttataccacattcagaagcaatctccttcaagacctttaatctggtttcgtaactcggcttcctggttgaaaacttttgtaccatctaaaccacccaaaaaaatgaatattgatcagaaagagagtaaattgcaaaaaagaagagtatcatcatgacatgaatggaatggaactgcataccttaggactcacttcacagttgttgcgtagttcaactgcacgagcagcaaagtccctaccatatttggaggttaaagcggcgcgaatcttatgaagctctgggaattcaccgcatcttgaagctgcatagatcaagcttgatactgcctctttaagctcttcagggcacggttcacctcttgaaaaatactcagaaatatcagttttttcagtaccaacataagaagaataaatcagatttgttttagtatatcagtttacctcttttttcctatgagcttgattctatcaaggagtagatggcagtataattctatcatggaaagcgcatccaacatgttcttctccattgttacacgctcaatctgttatgatacataagaaaattcatatcaagattaggatatgtaagtactactaaggatttatagagaaagaagaagaatgaaaactcacacgaagaagagctcgatcttggtgattaagctgaagtagctccttaacatcagaacaagcatgtgacaaccgagcttggtgctggtttgagagtatggaaatccttgaaatagctagttttgttatggttttgaattttgacaccttgaagtttctccctagaagtgcatccaattttcgacccatgttttcttaacaacctgagtttgttttacactgaaaaaaactttctttcttataaaggattaacaacttggtgtctggaatggttttgttgtgtttgtagttactagagatgtatacaaagcatatggctttatgtatatataatcataataatctctgattacttttttaactcaagtgatatttctgattctgctttctaccctttgaaagagccaaacaagcttatttgtttacctttctggaagaagcaagttgattattattgagtcttattacatcatcatcatatattacaacactaacaactatagtctcgaggcaaaaacaaaaaagagagatatgaattgagtttgacaaaggtcaatattcaagtacaatacgttacaaagattggtagaaagatcagtacggaaaataataccatacctttttcccccattaaaagaatgaaataataattaaggtgaaggtggtcccagaaaaaggaaataggaccaaaacttaataaaaatcaaaccaaaataatggtgtaatattgtaaagaaatatagggtactgaaacaaagacgtttggtaataataagtctttggacgtagttaagtcttgtttgaaaagataaacaaaagacgataaaattgaatgggttggagacttgtagcctccacacgcgtaaagcccttgtaaatgcctagttagtgtttgtaatatatttttctgagcccaccaaacaaacaaacgtaagtccaaattatattaaaatgaattaaattgtcaacctcgtgtacttttcttacctataatatacaaaatatttaacatggaacagtcttcaatttgattattttgtcggattatcattacttttcaactcctttattttatgtccacggtgggcatgtgtggagctagaccattgtttgtgtatgctgctcgttcatttcgatgatgagcagcatcatgggctatgaagctcacctcagtgagttggcattaaaaattgcagacttgtccaccaacaggggttgcttttggcaatggagagattttgtttgaactaataaaattttcatattcaagcttattctttttagaacacttttgatttcaatttttctcttagcttttattcatatataacatcaactttagatgtcatatgcacaatcttaacttctttttctttaccttcacacccaccaattacaattacaacaattcatattatcttgcataattacaaagttcactcataatgggattttcattatttccctttttgtttccaactaaaaaaaattccagttgtttactagccaaaaacaacatatacactcaagcaaaatcttttctaactcttaagtttccacttcttagagctgaaatactccgactagacctctctcaactttggtttaaccattctttcgaccgattactcggaagaaataatgagttgtaagatatcatatatatatatatatatatatagaaattttcttcaatatgtatactggtactttggtattcagtctctcttaacatggcctcttctatttgttttaatcttttcaccttctggacttgaaatagaaatgacttgatcagcatggtttttttctgtttctatctttttgtcatgggacttttttttcttttccaaaacctcattcccttgaacagaatgatatgcatttgaagactcatcaaaatgaactaagaatttcttttcagtggatttccttggacgatcaccaggaactttctctgaaggctgagacatttccacagcttctttagcagctacagctgcatgagacgccagcttataagcagcttgagctgcagacttgaaatctttgtatttcctcctttgaatcccttcttgatctgaaactctttcaccttgttttggttctttagtggacaaacattcttcgccgtatcgaactccatgcttgtcatgatcagccttgggatctctgtgtttcttcataagcataacatcttcaagtatgtttctcttttcatcttgtgttttctgactaatagcttgatcattctcatcttgaacttcatggatatcagaagccttcaaatctctgtatttctttttaggcttaacttcttcagggatgatttcactttggttttgttcattaccatctttagcagattcctgtgattcaagttccttctggtttctgtccagtctcatctcctagaataaaataacaaaaaggggtcagagattagaattcagatttgacaataacactataaaaattctaacattaacagatgctatacctgagtaataaccataagattttctccctcaatatgcagatcaattccatttgcaaaagcaatttcttttaacattgtcagtttggtctccaagtttggtctttgagttgaaagtttgcttacaatcttgaaaagaagaagaaaaaaaccacagatgattaattggtatggctgaaatcaaatccagaagagaaatcaaatcaagatctacctttggacaaactccacagtgattacacagttcaacagcattttgggaaaactccttaccaaatcttttggtgaacatcttactgatcttttccaactcttgaacctctccacattttgaggctgcatatatcaagctcgatatggcttcctttagatcatcaggaacctctctataatatatgaaaatcaataataacaaaactcaaaacgaaagtgtagatgattattatatagaagtgttttttttatttcaatactagaagagaaaggagagacaaacttgttattctctatcgacacaaccctttccaccagaagatggcagaagttttcaatcatggaatatgcatccaacatgtcctgctctgtgatcacaagctcaacctgtttaaataaaaatcataacttggatgagagaaagttaatgatgatgacaatgatggtgttgatgagaaattacccttagaagagcactttcttggtgaccaagtctaaggagagaaacaacatcagactgtgcttgcatgcacttgagacgatgttgcttttccaaaacagcaattctggacgaaacaagctccaccaagtttttgaatttagaagttttgaacttctttcccaacagagcatccattgtttttcccatgttgtgattttctatatacacttatttttttattccttttcttttgggattctaaatatctatacaatacaagcatgtatttatgtttttatatagagatatcaccgacagaagaaagctagttatataaaatcaaaggagaatagattataaacttgcaagttcaaaagaatgttaatgtatatattttaatccttgtaagcaaattataatggtgtattttcatagtctgaggctgggaatgacattggttctctagtttagtgggaaagtgactatttacttcatcttcatatagaatgaactttatatgcctcgaaattagtttttcacagcaaaaggtatgaaatgatgccaaagccttgtggctcagtaactaactagtaactaaccagtggtagagtttgctttagttttgagtaaactatctatctatgctagacatttccaaaatgaacagaatggtatatgttatttttagcaaaacaaattttaagaagaaagaagcaaaaagtagccgaaattaagatatttggactattatataacctttacttgcaactttgaactttgacaaaatatgcaattacttaatgtcattctgtttcttctaattattaaataccataaataattgtaaatgaaggtatcctcacctccttgtcacttacagatggaagagcttttcagtaacatcaatgtctttcttaatagtaatttatatggtgcatgggatgagagaaatttggtgtattggagaatattgtcccgcatggattaaatgtgaaagtatgagccatatataagaaacatgggctactctattcattgccaattggttttaagttagaatcccataattatcagagtcatattcttagcgggctttcgattattgagccatataaaagaagcccaattggttttggatttccgattcgatgcttcctaatttaatttatttcagtttcaaatatatatatatatttattgaaatcaagtttcaaataattataaacagaagcaattgttgaattaagagcacatgttttttagcaattttatcaaacagctcttattagaatgaagaaaaaaaacattcatttatcaagcttttttggattcattttgttgcttggtttgcaag

SEQ ID NO: 380905 - DNA, 1783 bp, Cannabis indica
gttgactgttatttttttttttttttgtgactatattgatgccaacttctgtttacttccgtgacaacttttgtttttgtgactatgaaagtaattaaagatatatttcttgcagagaagattagattactgatgtttgtggcaacgttatatctcataacaaagtgtcacacttttcattcatctcatcacttatagtattaacttttaaacttttaactcctagaatatttggggactttgcaggtaattggtagctaatatcacagtaatatcagtccattacaggatctccattttacctaacttcgggtatgagtcgatttaaatgtctgaatctctttcatccaaatttatttagtgtaatgtagtttctatttcaatgtgaaatactttgagagctccagattgttgaatgcttttatgcagctgttgtggtccatattggtccatgaatttggcattctatgctccataccacccacccaccatcttagtcagctgttagtgtgcaaatagagagggacaggaggatcaaaatgatgtggacagcaaccctccttgctattctctgggctgttggctagaaaggaacaacagtctttgaagataaagaagtggcagtagaagatatgtgggagaaggtcaaattttgcgtggcaatttgggggattatctttcctggatctcgccagagattgggaaaacttttcttgtattataaatttttagcttgtgtttaatgttttgctttatgttttgtatataattccatctggctacttctgaggtgagatcattttgtataggaataattgtgcttatttttattattttatttattcaattttttttttctttctggaggaaaggaaaaaaaaaattattcacaacaatcgctcaactacacactgtaaacagcagctaaacactataaatgttttaaaaaatgctaaaacatcgttttctcttcttctgttcaaatggctaaaatgacatacatttagaatcaaacaccagatgaaatagactgaagcaacaacaactgtagtaatcatgggaatcaggccctctcttggtttagcaaaccactccatccagtctgagaaattcagctgccaagcacaccgacccagccaactttggacagcaagcacaactcttttagagtaaacataggtgaaaaaaagatgatggtgactctctttgaaaataccacacacggcacagattggagtcaatgggaaagaatttcaaaagattatctcttgtgagcagtggatcgttgattgcttgccacacaattaacctctgctgaggcacattcaactgatgccaaacatgtctataataagacactttgttttgagggatgagagaaagaatttacttactttaaacttcccattatcctcaactctaatctaataaataaaagagtaatggataagttaaaagattgtaaacgaatatatttattatcattaattataataattttttatgtatataaaataaataaaaatgtagaattttgacaaaaaagaagaggttgatgaaatgaaatgtagagtgccaccacctaactatcctaatactttcctttatatagattactaggaaactatgccgcgcttcgcgcggtcttttactgtaattttaattttttcaagttgttaatatttttatcaaattatagatataatgtaaaattagaaaaattacaagctaaaatacttaagaaagagattatttgtaacaaagaatataaaaattaaaatta

SEQ ID NO: 380906 - DNA, 1672 bp, Cannabis indica
tgagttgctgcctttttgagtgagtgagaaggtagaattaggtatgcaaagtttggagtatggatgagaccctccggctttgattcgatatcctgagggttcttacttggttttggttgttgagcagtatttagaagatcgagatgggtttttggatgatctcaagatgcatttgttgtgtgcccaacataaaatgaaagttgttgctgattttccacgccaccaagtggaatttgcggttggtgaccgtgtgctccgcaagttacgcccctaccgtcaaaaatcgttggccatccgcaagaacgagaagttggcagcctgcttttatggtccctttacagttgtgcaacatgtaagggttgtagcgtatcatttggacctcccaccttccaccgtggtccctccagttttccatgtttcacaacttcgggccattgtgggatctgcccactcatctcctaccattcctcccacattgactgtgatttggagctgctggtggagcctgctaaatgctgaatgtttgtcaatgaccctcacctcaaggcgctctcattgaagtgtttgattcattgaagtgtaatgatgggcatcctagacccacggtaaggtttacctacactagaagggattgatacacaacttgtgcacaattatcttgaaagaaatgtagagcaagaccaaatacataatcccaagttattcgagaaatttagtaaactttctgaataatattttactctaaatatttcacacaaaattccttccctcctctcacaagactaactttcagtatttataggctagacttacaattaatcctaactagccaaccaaattagaagacaccaatttggaaacattgaacactgccactaaggacttgacaactcagcctctagaattctaattaggtatgctagtgagactaatttcaaggcgttacaggagttgacaaacttaatctagtgatgaggtggctttaaggagggcatttttgtaattataggttagggtgagctgctgccttttgtagtgagtgagaagcgtataattagttatgcaatgtttggagtaaactctctgcaacaatggaaagcttttgctctctaccattgtaacagacactgtctcattgtctcaggttttacaattcctatattcaataacaatatttcctaattctccattgttactgtttcattgttttattgttattttggctactgtttggctatttgctactggtttgagtgtgttgcagcaggtgcttatcacaatttcagcaggaatcatcaacacattcaattgtttttgtttggagcgatgacttggcgaccatttgtcatcagcccttctccttcttgtgttggatttggtttttagtcgatcttttgacctcacccattggtttggtgtaggtggtttatttggtgtgttcccttgtgtggcacttgtaaagtgcaccatggtttgattgaagttaggcgttctttggcaatattgagaggtcgtccgcaacatttcttctatgtctggggtgatttctgttgcttcatccgcattctttggtcaatgtactcttaattcagccctgatcgaaggtgttattccattcaagaatctactgtagcaatttgggaatgatacttctaatctgatattattgatg

SEQ ID NO: 380907 - DNA, 3722 bp, Cannabis indica
ctaagttcgagttgggagtcgagaccgtccagactctttgtaaatattataatacaagttaatacggatcatgttatgaataaaataatacgattcacattggtttaaaattatgatcgtaataattaatagaatacaatagaatacaatattttattcaaatatagtgttacttgttatttaatacaatatgattattatgcgggctaccgaacgaactctatgtaatttaggtggtgtttagtaacacttttttaatcagttttttgtttttaaaagtggaaaagttaaaatatttttcaaaagcatgttctataaaattgttttacttttcaattttataattagaaatcaaaatttaaaaaaaaaaaaaatcactttcaatattttttttaaacagttttttttcttaatcaatcttttggattacaaccagacttggacccaaatcccctcttcacggccttggcactgaacccagcttctgaccagaacccgaatccaaccttggatcttgacccgacttaaataaaatcaaaaaataaaaatgaaaatgaattttacagaacacacttttgttttctgtttttgaaattgaaaaacaaaagtggttacaaaacgcactttagttttttaaaaagaaattttttaaaaacaaagattttactttcattttatgattaaaaaattaaaaaaaaaaacaaaagtaattacaaaaggcaccttaaagtttcacccaagtcacaaatatattaggaaaaaaattatctagatttgacttatctagcttttctttctacccaactcacaaaagtcaacccattatctctctcttcaattacaaatgatactagcaagtctgtttgctttgtgaaaattacataaacaagtagtttatttaagggtgtcaacaccccaatttgcttttttgtagagtttgttattgaacttttttacttgataaaaatctctctcaaattctaagaactatgaaaaatttgttccttctcttgcattgttttatagtttgcttacatggtcacaacttataaacttagttacaatgcggtgatctaattaattgaaatcgagtttattcgtgttaaacttataaacagtaactttaagaatgtatatataaatgggcaatacaaattttttatttatttattcttaaaagattcattaaatcaatatttgtatattttttaatttgaactttcatgagtgtcctaattttctcgaagtgggtttctctttttcctcctgttgggtttctattttttggggtctttctctttgggaaagggattttggggtagtggatagccgactatagtcttgatttgtgcagtggtcatctatggtgtctggttcggctaggtagttgtggatccggtggcttctgatagtgtgggtgggggcctagtcttcaacttttgggtctggatcaagctgttttgcgaggggtctgggactagtccgatcactatgggagtctaggtctgaggcgaaatagtggtttgtggtgtttgacggttagggttttgatttggctggggtggaggttaatggtgttgggggtttgtgtccagaattaatgttggggaacaaagctcgtgggagacttcaggttgctgtttggcatgtgctaattttacttttttttgatgttttttatttttcttttgttttttttttatgtttgttgttatatttaatggcgttgcgacaccactctactattattatgggagggttaattttgtttatagtgaggaattttactcggactttttgttggatcgttggtatgctctcaaatgactcaaaacactttagtactgattgtatggttagatctctccagtattcagttctagggaattcccatattattattaacctcatgttatgtggatcaagtcttctttagaattatcatagacatggctagttttgctatttccttttattctctcttgaataattggtttgtcatttcctaatttttattagaagatctttggttgatagtcattgataggtttatttgtcatggattcatttgggttagaaatctagtattcttcacgttttttgccactttatcatcgctagcagcttattggacttttagttgaaggtgatgttaggcttttattcttataaaggggatcacgtgaaaaggatcccttccccactctttaggtagtttggacaatcctaaggatcacgtaccagttataaggctcttatgcttcatcgttccttaattgggtcatcaaggtatgtacttcgagtgttctcatcaaattaacgatggcatcaccataataaattagcttcctaatgagccaagcataaatcctcccacgaaggggtgtggtgggttatctttgagatttttgttagtgaatatgtatttattttttatatatatgattggctatgattttttttagacttctaatttcaatcacacacattatttatccaattggttatggttatatgattggctatgagttttaatatttaattttattgtaaacttatctaattatgattgatgtttttaagttattgtttttatataataatattattataatatattagtggaaattgcttaaaagattatatattaaatgaaaaagtaataaataataatataaatagagaaaaaagtatttttattattttagattagagaagatatccgaatttgagatttcttttttctggtaataaaaaagtacaatactccatattaaagaagatattttaaggctcacttcttagaaggtgaagattcgactcagtaatattaaaatccctgaacctaacaaatttctctatctactattggcgactctgtggatagtcatgatggcttttcgactcttgtggaggttggtagttcaccacctctacaagcgccatgattggtgtctcttggagctgtagagggttgtgacaaacctctatagttctagaattgaaagtccttatttagtcgtgctccctagacttcttcctttttattgagattaaaattgatgcttctaatttacaatgttttcttatgaagtttcacttctatttttctattaattttcctacgatgggaactgctggtggtatcctattagcctgaaaaattagtttttcctttgagatctcttgtcatctctaagaatcatatctccaagttagtttatttggacccgtactgtggctcctttcgtgtgtttatgggcctccttactcctatgtaaagagggattctagatgagtttaatgaatattgagaatagatttgggggttcatggctcatctttgctgacgttaacttttttcttttatgtttctaatcgggttgggtccaagcgcagggaccaattttttcttctatttctgatttgacgtccaagcagggccttgtggagatcccaattaaaagggtcaattttacttgggacaataggggttgtgatgctcatgcaaaatcagctttggacatggctcttgtcaatggtgattggttcagagttttccccaatgcccttcttaagtccttgcatacatgtaactcagctaatcatcctttgtgtcttcatacccggagccttgttgaaaaataaaagcgtctatttaattttgatgctacttgggctagagactcgaggagccatctcatagatatggaatctatagc

SEQ ID NO: 380908 - DNA, 4668 bp, Cannabis indica
gacaaactgaagaattccacattccaatctagtaaaagctataatggcacgggcactatatgtgttttttgttttttaatttcaaattcatatgtttctcattcattatagtttactacaaaaccaagtttagacaaaaaaaataaaaagctttgttttcgtctttattttttaattcaggtacatatccaagaaggtgaattactgcatgaattcaattcattacactgaaaatcttcgcgattcctatgtttctgtatgatccaaaatatatgtaaacaatttaagaccaaatgcatgtttttatgattagggagaatgcaatttcaaccaatgttggcaaactattggagaagcgggggaaggagtttttgggagtaaagtataaggatcccatttcaaacttctctgatttccaagaattttcagtcacaaaccctgaggtagaagataatataatatgttatattgttttgtcatgaaatttgtgtaatggatttgttgacagttttcattttcacttttggtgcttcatcttcattcattgttaggtttattggagaacagtactcgatgagatgaacatttctttttcaaagcctccagaatgtattttgcgtgagaatttttctagagacgggcaaatatcaaacccaggaggtgaatggcttcctggagcgttcattaatcctgcaaaaaattgcttagatttaaactgcaagagtttggatgatacaatgatattatggcgtgatgaaggaaaagatgatttgcctgtgaacaaaatgacacttaaagaattacgttcggaagtctggtgtgctactttctttctcataagctttatcttgtttgatagcatacacagatgtttatggattataaagttagttggcgtttatgttttctaagaattggaattctctagtagatgtattagttggtcattctttttttctacctttccctagatgaattattataattttataacccttgcatactgtttgccgatggctctagtttgtcatttgttacctcgaatttaagcacatatttttgtttagatgatcccaacttttaatgattgggaaaaggtttgatagataccaattataatttttctaatataactttattcttttctctcttaaagcagctttatttgctttctggatttttacaggatcagcatgttagtagacttcataggttacaaaatgaataatattctcataccaaaggactacatatacttagccagtgaattttttcccctaaacactggttttctaatgaatttttgacgaaagtaatgttatcaaaggtagcatggatatggtagaaagtagaaaacggaagggaaaattttagtttaggaaaggaatctgtcatctagtgagaactgggtgacaaagggatgaaaaaagtgaagaatgagatgaaaagtatcttacctttgtttctcctattctagtctagctcctttcatctctcatggtgaatttgtgaatcatatgaaggttataaaatttttagtaaggtgaatcgtttttcttcagagcataaaagataaaggctttgaagaaaaacattggtatgtgcacatgcactattgacataaaaataaaggctgtaagtgcttcaccatggattttcttcttgtgaagttagtaatgttagactattagtaagaaatttgagttgttttaaatatctattctcaaaagaaatttattactagatttccactttctgcatttataatgtgaaattgtttggtgatttactttaaggttagttgcttatgcgctcaaagaactggaattggagggagggtctgcaattgccattgatatgccaatgaatgtccattctgtggttatctatctagctattgttctggcaggctatgtggttgtatcaattgctgatagttttgctgctcccgaaatatcaacaagacttaaaatatcaaaagcaaaagccatatttacacaggttgttactttgcaagtcataaacattgtatcttgttgtcttgtattatttgttattataatttggacatcaaaaaatttccatgttggaaacttgatctggttggaatcattttgtcagtttcagctccttcctactttctttcgcaattagttaagctttggcttgtagttgaaaccgaaggataggttcaatgagaaaaccattgcttagaagttgaattatgatttatgaaaatgagtttaacgtttcagtgcgcttgtccttctatttgattttttatattttagttattttccttcagtagctgtcctttatatttagtcctttttattcctttgtgtccaggatctaattgtccgcggagaaaaaactatacccttgtataggtaaagttctgattatcgttggccacattataaattttttcctatacttttttgcttttctattcctttttccctttgaatatttatctcacaggataggttcaatcatgcagtagaattgtggaagctcagtctccattggcaattgttattcctagtaagggcttcagtgttagtgcacaattgcgtcatggtgatgtttcttggcatgactttctaaacagagcaaacaaatttaagtacgttcactgatatatctggctgatacataagtttaattttaattttgcatggcaatggcatattattctttcccctctatttcagaaagttgaatgatatttggaagctgaaaaaaaattattatttcatggtctgcctcaatttctcaagttttattccatttatttaatttaacttacctctaaacttaatagctttgagtgagagttcatgtgtttctcatccatgtgcaaactgttgaataatttaggggtggaagtaattattcatttgaatctacaagagtttgaaatatatatattttagatagtgtgagatattttcaacataaatgctgtggattgttattctacaataatgttatcaaattaagcggtggttatagtatgcacttatatataaatatttatatataatttaaagatgttgataacagttattttctgaatcttattaggacttgtatacctgaacagattgaatattcagcgtgtctattctgttgtcttttctgcctacttttgcaggcatactgtcctgtgtttaaataaaaggagcatttcatttctgatatcttcattcgtgaattctattgaaaccttgctactataaattttcttcatattttatacaagtttagatgcagcatgggcagctatgtcccgtctcagtcccaaacttcccccattcgtgttttatgttcatttttagttttagtattaaaatatgaaaactacttattgtatttgatttaatcattttcaacttggcaaatacctggctctcttagaaaatttaaattatcattaaatgtctaactagattttttattttaaactgttaaacgcacagaaattatgaatttgctgctgtggagcaaccaattgacgcatatactaatatcctcttctcatctggaactacaggtaaatttaaacttgaacctctaccaagtttccccgttcaccaccatagccaacataggttatatctttttctgcagaaaatataatgtcatattgttcatttacctggatattaccaattatttgataatgcattttctttagtagttttgcaatttaactataatggcagtgcggaaaagctaatcatcttcggcataaaaatgatgagagggagttttaattaaaaaactttattgtcaggaatctgttgtacatttattcacagtaattagtttacatcattttgatttggttaatcgattgtttaggggaaccaaaggcaattccatggactcaggccactccttttaaagcagctgctgatgcatggtgccacatggacattcagaaaggtgatgttgttgcttggcccactaatctaggttggatgatgggtccttggctggtgtatgcttcactgttaaatggagcttctattgccctgtataatggatctccgcttggatctggctttgccaagtttgtacaggtaaatgatttatttgtattaaggtagtcaattttctcaattgtttgttgtggttctttctactttctgctgaatatatcttgtatgcacatccaaaatgacaatgttattgtttaatgatgtatgaaacacatgctttataacataatacatatcaggtatattagatatgaaaaaaatgatttttagtgaaatcctttagattgttttgtaaaatagcctttactcagagacaaccaaattttctttgcaaggagcctacattttctttgcaaggagcctacatacatatgcactgacacataaacaatgtatctagaattttcacaaagtataatggttctcttcttttccactttcatcaagaaaagattcttaattctttacttttggcctagtcacatatacaaaactacttttgcaaggagatttttgctatgttaaattcatgactctaacactacaagtttaaaagatttgcaatagtttaagtatttttgtttttttagaaacaattacataagacaccattttttgtaaaataattacatttacgttcaaagaatatttttttaca

SEQ ID NO: 380909 - DNA, 1078 bp, Cannabis indica
tctgggcttagcctccttagatggtggttctcacatactattttagctttatttgaaaggaaatttgagctaagaaaagcattatttgcataatatttgtatagactgtgctttcatgtaacccattatggaagtatgagataggtggggatcctagtttcaaaataaataaataataaaaataaaaattatggatgtatcagactacttagactgtaattgttacattacctatattcatcttgaaatttgaagaagctttggtattttgcagttgcagtttttttcgtgcaatgtacacatatagttttggaaaagttcagcaattaattatgattctttctgctgacaattatttacctcatccttctgatatctaggtggattttgaggaggctatctttttatggcgtgtagataaaaaagattttcttctttggataattactagcactacaaccttgtttcttggtattgagattggtgtccttattggggtgagtactccaaacggttatattagaacatagagatacaaataattgcctacttgcctacgcaaacaagaaaagttattgaatcaaaatattgaaagttatgttggctaacatcatttctgatagaatacatttgccagaatataatatgtcttttaagttctgaatgtttggactaccacagaatgacaaaaagttaacatcttttatctctcagctactggctagataagtcaattagattagagaataaaaacaatctatgttatttaaaatgaaactttcttaaattacagcctaactgttgggtttaccattagtactgtcaaattgatctccatgaattaaagctttaacgttctaaaactcaccacttgatatggaagtgttaggccttagggtataaataaagagggtaattgggtaattgtaatgggagggattgatgctatatatatgagtgagtaaggagagtaatagggtagagaattattttgctaaagtgagcattagctcttgggagagagctgggtctctcgaatacccagcaacttgttttcttttcattccaatatcaatat

SEQ ID NO: 380910 - DNA, 3291 bp, Cannabis indica
taatacattatataataacaatattaggaataaaaataacaagaggttagaaatacaatagcaatacagattataaatagtatttataatttgtaaatatatatatatatatatatatataaatatatagattatcggtcctcatatatatatatatatatatactaattaagctgacatttttcattttattaatttgtcttcaaatgagtttatattccaaaactttgtaattggttaggaggtttttgggtatattatttatataatgagactagaaaaaatcacaaagagagaatgaatattatatacatagactagggacgacgactctttaatttttcatcttacttattttgtatataggatgagtagggtcttaatattcatccaacttattttataggattgtttaggtgataatgaatgttctactctatccatattcattactttttatcaaacatttattatgtttgctatactattaagtccccaaacaaataatagacaatattattatttacaattattaaatttaaagttgaaaaaagataaccaatcttcaaactttttggataagtttaataatttgtcctatttatatatatattatgaattagtgattattaaaacgatactttgtgtttgacattgagatatttgtaagataaaattaatagtacttgaggtataaatcttagattcatgatataatcattaattatgtttaattattattttttttaaaatatatacgttttattaatgtggattagaagattaattaaaaagagtaattttgaaaaatttgatgggtcaccgcctaaaaatagatgtaccgatacacccttttatgtttttaataactattagataattttaatgttaattttttcattgacaacatatattgttattacctgatgttttaaagttaattgtagatgacttaatactttaaacaaaataaataactcaataaaattaaataaatatatagtcaacatttaattaatgattaaaataacattaactaaatatcaaaatacgttcgcttatttatttggttctcaatacatactggccattagatgattcttattgagataacaaacttaaaagagtttgaagtaaaatgaagttatgaaatctttaggttacttactgttagtacggtccattagtattatgaatacatgtgacttaaatttcaattgctagctagtgtaataagaaactttagtggagatgctatacatattagagaatatatagaattggatcaaatgtaatttgttaatacttaattaaatatcgtttcatagtattaataaaacacatcatgatgatcatatacataatagtatgtcttaatcctgagattgttatgaactcctatatatatcatacaaccttttatttcacgcattaagttttgttgatatgatcagaccaagaacaattttttttagggatacagtgtactagaggagaaaagagtatcattaatgataaaaattgtcactgaaaggtctattttttgtcgctgatgctttgtggctaaaagccactattagtgacaatctgaaaataaacatgtcatcactgatacatttctttactttttttaatacagaattacacccctatcagtgatcacattgcccttactaaaatatttgcttttttttttaaaaaaaaaaatatatatatatatttattaattagatttcaatttttcatgataaaattttttatattagacactattagaacttatttactaaaatttttagaaaatcgatataaaatataataaagctaaagaaataaaatagatatagaaatttagacgaagactttaacgtcattcgagtattaacgaactctagtccacgagttaatattatctagttaacaaagcctttatgtattacacaagtgtttgtccactgtttatgaaccttattctttgccttagcttgtaagaaaagaattttgaacccttcccataaaggattcttgttatatttataggcaaaggtttctatataaatgtagcctactgatggggtaaataaaaataatataatgaccttgggctaactttgtgaggcccaacccgtgaggctatcattatctccttatgtacaatttacttgacgataggtggaaaacatgtgtcattttcacgtgtaataaatgtaatcaaataacttcttgataattaccatatttccatatatgaaatgcttgatttttagatttaactttagaaacaaaatcctgagatgatgagattctgtatcaaatgagcatcaaaatcaaccttgacatttggaggttgatttatcatctttccagaagcatcactggcaggtatctagatgctctcttgacttgataagatgtctttttggaacttggatggctcgatttattaaatttggtccattatctttatttgggttatacattgggcctttgttaattgagtttggatcatggaagttcacgtgttcttctcccaaaaacacagataacctttacccccaagcttttagaacttgagaattgtggaagcttgcagttctagatggtatgaggtcatgtgaatgtttaaaaaggtatggaccttttcaaattccaagccaatatgtagtggatgacaattttccgctttctgaatataacttacacgtggcactgtttttttagctcgtgaagagtatttaccttgaaaaaaatacatgaagtctgattttaagaaacaaagactgatcatgctagcgtgtgtaccaaggcaaatatcatcattcaaattacctcaattttgtaagagtcattaaactttaacccttccactttttgaaccgtcaaatgcagtttctattttcttgaatgtagtatgaaccatcgatttagaagcacgcggatcgccaattttactgtacaaataaagtgaaaaatatttgtttacaacttttgcccattttaactatttgagcttgaattttcttagagagaaggaatggaaattgtttctgattaatgtccaatcctttcgacgagttcttacatcttcttcttcgaatttgctcgtgattaaaacaaggagcaccacccacaattctcataatttattcctcaaagtcgtcggaaccactggatactcaagcggatattgaagcactcgaagatcaaattcacacccttcaatctagggtggtacgtctcgatcaaccttataatgaccacatacttaagatatggaattagtagacaatt

SEQ ID NO: 380911 - DNA, 3683 bp, Cannabis indica
taaattttttttctagatgttgaaacaaatcaagggtttatcagtacatattgtagaattttcttaaagtatttagcataacaaatatttttagtgagttttttattttgagggtatttaacaagagcatttagcaaatatattttttgaaaatggatagtttattaaccaagcttaatggtcttctttaataagatgaacaatagactgactaatacaatcactggttagtaacgaaaaatcattctgaagattaagttttgtgggccactttatttattttacaaggaataaaatgacaaaaacaaatttgataaagatacataaaatgttgccactctcctcactttaatgatgtacattttcctcgtaaggatggctcctgctgggatctactcctaataggaccgagatttttcgtctaaataagaaataagacgataacgggaattattttttgtccctgagaatctgtttagtattttattttatatttgtagtaatattttatattttataatttatgtttgtatttttttagtatcttaataatctttttatgaattttaaacagtgttttgaataataattaatttattgaataatagtataatacttaatgtgtaataattttatttttatgtagtttaataattttataaattttatttttttattaatgaattttttgccccacccctgagggaataagtggggataaagattaaaattcttaatagggatggagaagggaggaacactccccgccaattctccaccctgtgtgcatccctacttctcaacctatgacgttgacttccaacattagaaataatttgatataaataattccaatattagaataatttgatataaaatagttgtgcgcatacccaattcaattaccttattattttttgcggttagagtaatgatattaccttaatgggcatagggtactcatgagtagtgctgtaaatataggccaagatttttgatacaacacgagctcgagaggcacagacaagactatgcacgaaaaatatggaattttggcacgacacgacatgaataatatgagtttgagcacgatatgacacgaaaaatataggcttaaatacgacacgacaagtgcgaaaggtatgacacataagcacaaataatctattatgaaagggcgacatgttgaaatgttcaaattttaatatttccaacgaattttttatataattttgtatgaaaatttgttgaaaaaatatataaaaataattaaatatattaaaaatacataatgtttacatcaatatagccttgatgacgtggacatcaatgtttgacatgtggtaagaaagatgacatctcggagttgagtagtctcgactcatagcaagtcgacctgggagggttccctagccctacacccaagttgattcgggaactctggataaaagttcaaattttgataacttgtttctaactcactatcttttagtattctgtaccatgaacacatggatcaatcaaatacaggccttaagagttgaaattacacgaacctgcaccccgaaaggtaatttgggcacctagggtttcacctgacgcctaagttggcattcccaactaaggttttagtttccgagaccttcttagtgtaaatggatcaaactttgcattaggacatcaactagagataccacgaacatctttgaggcgtcaaaatcaaattttggagcaagtttatttttgagcacccggtgcccgggcaccctagcgcctcagttgacaatttgtatctgggctccttccaagtatcagatcaaagatttgacttttgaatcatctttgtcttcatcaaaaatgaggaaataggtactttcaaggaagaaacaacacttcttgggtgctaaaagcaaggcccagcgcacaggttgacatcttgtcaacctaggccaatttcgatagtgtttttcgagaactcttttgagcatctctgttttcaaaaaatattaagattcaactattttcggagaccaaacggaactttcaaagggccaaatttgagatctaacgcccaagttgacacctgcactgggcctagtgcccagttgacatattgtcaacctgggctgtttccaatcaagttcttgaaaaagtgttccagatattttttcgtcatcagaaataatgaagattcaagtaaactcgagcaaaaaaccataaatccgaggccttagttgcagaacacaatacccagattgacttggtgttgggcctaggacccaggttgacaatcaacctggtgcgctgctttcaatcactcaaatgtcaaatctgattcgaccattgaattcaaaattgtcaaaaatagggttggagagctcgtccttaagttcaagaaccttggaagtataaaaaccacaaccggggagctcggaaactggatacctaatgcccaggttgacatatggcctactgcactaggttctgcttatccaatttcgattttgtttcgactgtccacaataactaagatcgatgaagtcagagaagtcaaattcacaactttgtatttctcatttctaacatgagaagaacactcaaaatgaagatttcaagtctctcatttctgcagaacatcaacatctccgagaactggtgaccagcttcgccaaacacatgtaaacatactaagtgatgtcaaaatatcacttaggcatcataaagtacatccattggacgttatttcacttacccatcatttaggttgacgtcatatgtcatgtcaacttgggtgttgggtcatgtactaccttcagtaaaataaccataacttactcaatattgatccgattgatgcgattaaacttgcctttcaaatatattttaatgctctctcaactcatgtctcaaatttcaatcgcaattctaaagttgtcgactccaaatttcacccctaagggagttacgaaaataagctccaacttacccagaataggtcctgccgtcgtgacttgggctctaaaaattgacgatcaacctcaaaagttaatttctaccgttagatcatcatttgtggtaaaaaataattaacttgtattttttttcattattttattcatattttcaatggctccttcatttataaaaggagagctcccttactttatttttcatattcaaaaaactacctacaaggtcaaagcatctctccctagaaactagagcttaaacacttagcctttttctataattactatctcgtgagaactaaaactcgaagtagacgtagctccattaccatcgtgacatgatgagtgaaacactatatattgtgtgcatgtatctctttaatttttttttacttaaattcattattcatttcgccaatttagcgagctggtgttggctacttttcagcgtcaacacatagttttagtaattatctcattaattataaaaataaaatgtagaaaagtagagtataaatttgagttgtataagaaaacgggtcaacccaagtaaagcacgacacaaatctgagtacagcagtatgcaacttttttatagcacgacaagatacgactcgtatttttttatgacaggacatgacacactgttaggttatttttagcctatgttttggatctattttatgtgcgtttttcgctgtgttgggacggaat

SEQ ID NO: 380912 - DNA, 919 bp, Cannabis indica
tgctttctagccaacacaatcttctcttacggtaaaatacattttaagatgacttgaacctgtaccactcacgccacgcagtcaatctcttacactagcttcaagtggcagtgttaactagtcttttcatagtattacatgtatttattcggtaaaggaggaaattctgaaatttggattgcttgaattaggcagcaaaataagtgatgatagcagcattcaatttctagtttatgctatgctctaaattgattaatattacctttatgtcaccttttatttagcttgagggagaagaactacagagaaaggctaagcgtcgtatggaacgagagagaggccgccgggaagctactgctgatatgtctgaagacttatcagaaggagaaaagggtgatgcggtcagtgatgtgtcggttcatggtgaaagttccagggggagactgccaagaattaattccagtgatgctatggagatttggacaagtcagcaaaaggggaaaaaaacatatattgtattagtaaggtaagaactaagcttctctactccaggatcctaataaatagatatagtcccaatcttggaaagtatatgaggtgattgacaaactgatgatgcattttgcattttgatctaataacagtgctaaaatagtcgtatttgtgtatggctgagcattctaaccattctctaaactttttttaattaaaggcagaaaaacttcataagaaaattaaacgcttcttgatggtaactagtatgaatctatctccaaaatgtagaagtacctttgctgtatggggtgttttctaattgtcttctaacaagaactatccttgcagcattcatggtctaaataagggggagaaaaagtatggaagctttggtcgtgactcgtgatactggtggtcaggtaga

SEQ ID NO: 380913 - DNA, 631 bp, Cannabis indica
ttttgttgtttagggtttaattactgtcactgctacttaaaatggagtatttggtttgagagggctttccacttgattgtcagaatttttttgtgatgatgcaccatggttgattgaattgattctaagcacatggatttgttaggatgtaaacattgtaggtgttgtttgattgtatgtttttggcgcggtttgtgctgtgatcttaacattgcgctcaaactcgattgtgtgtttgctaatgcttcatgttgttttggcctcattgtttagtttttgatgttcttccgttgtctcgtcacaaatgtgtggttttttctctgattttttaaatttgatgtctattaggaagaagattattgggttggatgaacttgtgtctgatttttataaggagcaaagcaaaaatgtagagaaggaatctaaacgagcaatggcaccaaaaaagaaattttttcgtgaagaacaagatatgaaagaagcttctttgtctaaacttgttgatgagtgccacacacaggtagaatatttttcctattgtaatatcttaggtggtgtttggttggaagaaatgaaaacatagaaataggaatgggaatggagataggaataggattggaatgaaatcaaa

SEQ ID NO: 380914 - DNA, 3029 bp, Cannabis indica
gaatcattgccagcttatcaatattctcagccaaatgagtattacagaaatcctcaaaccagctaccaaaatcctcatccccatgattaaaatgcagacccatacctcgctgatgagatttagtctcttcaagcttcttcttagttgatgagatttagtttattttaaattttaaaaactttgtttttttggaaagaaaatccaaaatacaaacaaaggtagttgaacaaaagaagacaacccctaaacagccaagctacaagtcacatattacatttcaagtacttttgtccttatttttttagttgaggattccacattctaattctagccttaatggctagtttaatagataaactaaccatcttgactgaataacaaactaattcaaagatacattgattgcgattacaccacagatagtttatcaaggcagaaatcatagcattattaactgtggatattaaatcatattgattcttgttacaccggcaattccattcctccaaagtgacaggccacacaaacttgttgaaccactttttgatctcattaacaacttttttagtgaactcacagccaaagaagaggtgttgatgagtttcgggttcagcatcacacacgggaaaattgctcgaggggagcacataataaatttggacaagttatctcgagtcaagatttggttgttcagtgcttgccaatcaataaaacgatgtttgggaacacacattctatgccaaatattatttgcatactccactttatcagcagcaattagagaagtatagaaaattttggctctaaacttacccttctgaacagcaacataaacatcatctttgtcaattttttctctaagtttcaagagttttcggaagtaccaactggcgtccaattttaacagagcctgccagaaatcttttcccttgaaatagactgaatggatccacttaacccacaaaatgtcttgtttacttaaggtagaccaaataaacttggccatcaaagaagtattctattttctcccttcatagaacccaatcccgccataactcttagggagacaaactttttcccaattaacaaggtgaagtttgctacgattccccttcatacccctaaagaaagtccctacagtatttatcaatggttgcaacaactttttgcgggaggaaaaatatactcatccaaaaattgcggatgcccagtaaaaccgaatgaataagctgagctctaccagtaaaagagagatttttactcgcccagttatggagcctcctctagatcttatctaggatctcaccacagtcagctgctttccattttgttggtctcaagtgaaccctaaatatttcaagggaaacattccttcttctatattgatcaagtctaagagaaaattcttgtaatcctccttgataccaccaaaataagcctgagatttgtccttatttatagcaaggcctgttgctgcacagaatctgctaataggttgattaatgatctggacaaagttgaaattacctttgcaaaagataataaggtcatcagcgaagcaaagattaattagcttcacttctttacaaagaggatgaaagccaaagctttggcctctgaagcctggagtagcaatcgagttaggtattccataatcaaaacaaagagcaaaggagagatagggtcaccttggcaaagacctttctctcctttgaaagctccatggagcctgccattgatcgtgagcaagtaggaagtcccctttagacaaaccacaacctagctaatgaattgtgctagaagacaaagacccttgagtaaatttgaaacaaagcgctaatctaccgtgccataagctttacaaagatctattttgaggaagcatgtagcaaagatattatttctagtatacccattgagaatgtcttgaaaaaatctatctttgataaacgctccttggggagcacttctgacagacgagaacaaagcattttggaaatgtatttgtataaggtattacaacaagcaatgggcctataatcagctgttgttgtcgggttatctttcttaggtataagagagagaacagtttcattgaggtatttaggcagcttcccatcatgaaaaaacttgattgtgcttaatcataagatatatgattatctatgttgaattgttgcatgtctattcttcttgaagtatactttctctctcagatagtgatagtgcactttcacatgctttgtttttgcataagatattagattttttgttaagcaaattgctcattgattgtcatagtacaatgttaccgagtagttgagtggttgatatgtaaatctttttataattgtatcaaccacatgctttcttgtgtttccatagctgttgctctatactctacatctgtgaatgataatgacatataagtggttgtcatttgctataccaagaaacgaaaccagtttcaattttggacatatattcagtaattgatcgtcaagtatcatgattttcagaaaaatttgcatcacaataaccaataaacttgatcacttcattataattgtatagaattccataatctatattgtctttaaaatacatcattactcactgaattgcttccaaatgagatctttttttaatttttttcataaatctgttttaatactccaactgtgtaataatgatcgcttagctttattttgagatttagcaaatgattagggctttttgttagaagtaagcttttaaggtgtctattttatttagggtgtttatgtaatgaacttttattgtttaagtatttatatttcgaacttattaaatatatttttgttttgttggttaatgaagtaatgaatacttgtcatcttatatatgattccacaaataaaggtgagaatatatatttggcggatagcgcaaccacttatacaatacttagaagtgataaatatttttcaaatttatcaaaataaaggcaaatgttaatacaatatgaggcactacaagtttaattgaag

SEQ ID NO: 380915 - DNA, 6626 bp, Cannabis indica
ttgggaatagaagtgcactgaggtgagactgggatgtatctaaatgaagcaaagtgtatttaagaactactcaagaggacaaagatgttatatctaaatctttgtccaacccttatggcagttactaagatgatctccattaatgatggctcaatttcgtcaaatacaacagaatacaaaagccttataggttgttgcaatatctaacttacaccataccagattttagttatgccatcaataacttgagtcaatttttgagagctctaaccaatgtccatcttagtgctgcaaaacaggttctcatatacataaaagaaacaccataccatggcttgcatattccttacagtaatatacttaccttaacatgtttctctgatgcagattgggcatgttgtccaaatactcttaaattaattgtactctattgtgtttatcttagagaggccttagttttgtggtcatcaaagaagcaatgtgtggtgtctcgatcgagtattgagtctgagtatagagcacttactgatattgcagcagagatatcgtggattaaggctctattacaggaactcaattttttcttgagcactacaccaatcacatggtgtgatattatgggagctagtgccctagctgcaaacccagtttatcatgctagaacaaaacacattgaattggatgtgtattttattagagacaaagtattaacaaaagttttggatgtaaggtatatcccatcaatggaacaagtagctgtctgccttacaaaatttttgacacatgataaattccattttctaattgccaaacttggcgtggttaaaaccccacaaagaagggatgtcaaaataataaagttagtggaatgagggtgtgtatgtaatttggtggtggtcccaactcttccaaccttttgggacaacacatgatttgtgtaatcattatagaatcaattttgttaggatatttttaattacattgctgtgattgtaccgttagacctacacgtgtatattctagaatcctctatacactgcctatataatgtaatacaattacctcagcctattcaactgagcattattcattttatcatcttttcttcacaatttttaagtcataggcgcagcttggttgggattgtgttttactactataatttaattttagctattgcgattagttttgtctatatgatatggttttgagtgttttattcttgtctttgtgacatagttttatcttgtttcgctattagttcttctttattcttctatggggtgccatcaaatcactgttagtagttgggtataactagtcttctgctactgaagggattgttattagtgcaattatgtaccttacacaatagttgagtgctcaagcaacgaggttgaatgaacctgctgcaatagctcttacggttttattttctgagcgatggataaaatagaatttaagtgttcttaaagttaattatgatgttgtaatctttttcatctaattttattttaatttttttgacaaacaatctgggaattagacagttgattatttgactattttttctaattataatatgtatttccaacctattattttaactacttattaaacaaattatataatttattaaataaataaataataataataaaaataataaaatttctttcaaaattgcaacattcatttgatttatatagtttatattcgggtttagtaattgattcttcttctggaaacagggtaaaagagtgaaagagtgagttgcaatggcagaagtgagtaataagcaagtgttgttgaagaatcatgtgcttggttttgtcaaagaatcagacatggtcataacctcttccactatgaaacttaagcttccagatggttccaaaggagttttggtgaagaacttatacctgtcttgcgatccctatatgcgaccccgtatgaacagtcaaaatgtcgggtcttatgttgagcccttcaagcctggtttggtcagtcttacaaaccttaatcccatatccatccatcttatatttctagttaattctgagatatgtccttttttttaatgaattctcttatagtatcaatgaaagtaggtgctttgatgatcatttatgtttgctattccatgagtttttacaagtatttactaattcctaacactttagagtaagttttgaaaataatgatcattgtttaatttatccataatcctttctatacaagcaaatatcgttacattatttgtttatatttttctgttctataattttatgtttattatgcttatttcttattttctcccaagttgtgtggtgcactgactaacattgaataaaaaaattgtagcccatcacaggttatggagtttgtaaaattttagaatccggggatccaaacttcaaggaaggggacttggtttggggaatcacagggtgggaagagcatagcattataagtgcaactcacactctattcaaaattcataatgctgatgtgcctttatcttattatactggcttactcggtaagtttttttttgcttacaagttagaactattaggtgtttaggtgagaaaaataaaaatattaatatacatattttattgtccattagaatagaatttttttagtatgaaaaaaaaaatcattctattcgattgacattcgaatgtgataaataaattggcttaatttattaagctctgttattttacacacctctttctgtttgtaaaatttgttaaagtcgttaatgaaagttagccctcttgtaaccttttgttacatctactacaatatttttctataaataaagagattgtctcatgagttgattaagcttctagaaaacttctgagaccattcttgtttatgtcaaaatagccttttgcacaaatggcttttccttgattttctttactgcttcatggcatcattttcctcgattgaggtcagccatggaaccctcatgaatgcttcctcatcatcttcaatttcatattcttctccttccacttttattcttgtctcatcctcagccaattgttggattcccttaactctctccctacggtcaaagcttgatcgtcaaaatttgcattccaggaaattgcaagttctcccaatgactatcaaccatgcgtttgatgatgtttttggtcgagatgctcgtcactacgatggaaaaccatgtctatggactctagaagcacatagattagctcttgcaagtgggtgttaattttggctcaaaaagccaacttgtcttggagtttcaaagatatggttcaactttgaagagtgttgagacttgctatatgccacatttatcgagaagcatgctctcttaattattacatatagttaggagatgagctacctcatttattacatatggttagtagttgaggtgtttcttctatagatatggagctcttagaagagaatttgtatctcaatgaataaaaacattttaggtacaactttgtacaatcagttcattgggaaatctaagagagagagcatctatatatctaaactttgagaaatactttgctgagtttgagaaacactttaggaaacactttaagaaatctgtatatgtcctactcatattaataatatcagttacctcccatgtagtaggcgaattgtcgaaccacgtaattgtgtgtgttttattatttaccgcgttgatatatatttatcgttatctgttactatttattgcttccacacacgaaaaatttgtattagagcgaaatatggcaatattatatatcaaatggaagctctcgacaagacgaatccaatgccacaagaatcgcctcaatcggaggtctgacgcattacccgtagcctcagagtgttgctaccaaccactaagttaactcagtcaaattgtgttcttgggaccgagttagcccattttcatccattttcaaccaactcggacctattccttgctattttgactattttgaattcaattgtggcatccttttttcaaaatatggtactaaatttttggaaaaattgtcttaagtcataagctcaaaagttttgttatttgtttgcacttatggctgtcaactgggatcttgaaaaagatgcacaagttgatgtaaaaagttttggcaagtcaagatgttctatgaggagaaccatgttatcaaatgcaaagtttttttttggggaaatcatcagtgtttttcattactccaataaactttttacatcctattcagcaccttttataataactaggtctggttttttttttttctattgattacaactcgctaaacgaagttgtatcctctattgataccttcctaggccatatactttgtatcctagttttacatacatttttgatcatttgtacaatagtcttcggttcttcacttgaatgttgccaaagctttgtgttccgtgttctccaaatttgatatatcaatgctgcacaagcagtagttagaacctgtcttcgaaagccagagacagctctcttctctatgattcgcactagatcagtcattttggttgcttgagtctacaatgcctgccaacatttgacttgcttcaagcattcactagaaaaaggtcattgaaagaacaaatgctcacaagtttctgcttcccccgagcaaagtaaacaagaaggattaattgcaatttgaaatctgagcaagcgatctatgctcttcaacctattttggatggcaagccagaaaacaaagctatgtttgggagtgtttaaacggttccaaacttccttactccaattgaccctagttaccgtaggacacaacagcttgtagccttcagctactctgtattttatttgagtgaaggtaataggatcaagtaaattcaaaagcataccttttagagctactatcttcctccaataccagcttccattttgaggcaccacatagctccaccaatccttttccttgatatacacactatgtatccatttgacccacaaattgtcctctttggttgcaattgcccaaatatacttgaacattgccgctttgttccattcaacaacctttttaaacctgataccaccaactgttttggattgacatacattttcccaagctattttccctgctcctgtcatcatatgctgtcctttccataaaaaagctttgcaaacactttctatctctttaatgacctttgggagaagcatgacttggctccaataagtataaatttctaacaaaaccgagttcacaagaacagctttgcccgcaaatgaaatatgccgagtactccaagctctgattctatgagtcattttttcaaccaaaatggaacattcctttggtgatagtcttttagggctgataggaatccctaaataagtgaaaggaacgccacctctttggaatcctgaagcatcatgtattctttgaacctctgtgagacataccatgacaatagatagccaatttggaagggttaggttgcaaccccgatgtctgagaaaacaggttaaggccctgtagcaagtaatagatgctcttgtaatcaccattacaaaatagcaagacatcatccgcaaacatgagatgattcaaagccaaatccttgcacctattatgaaagctgaagtcggttttttgcccaatttttctcatggtccttgttaagtattccatacccagaacaaatagcaaaggggacattggatcgccttgtctcaatcctctttttgcctcaaagtatcaatgtagagatccattaaacatcaatgaatatctaggtgttcgaatgcataacatcacaagttgaatgaattgcttaggaaaatgcaatccatacaacatttcttcaatgaagctccattcaatcgtttcatatgctttttgcaaatcaagtttgattatgcaactagcctttgtcatcttccttcgataatgacgaaccagatcctggcaaatcattgtattatgtgcaatgaacctcccttggacaaaacctccctatttttgagctaccaagttaggtaagatgcatttgagtctcgagcatatcagtttggtggctgccttatagatcacattacagcaggcaattggcctgtaatctctcgctgtgttggcaattttgacttaggcacaagagttagaactgtgttgtttatttctctaagcagcttccctgttttaagtagacttataattgcttcagctactttagtgccaataatattccaaggagctcccaaagccatctggtcctagagctttggtaccaggaataacaaatattgcctctttaacttccacacgagtgtattctctcatgagaaagtcagcttggtgttgggataagaactccccttctgagtatgctctgctgaattgacttcctcccttgcatactgcttcctagtaacccaagataatattgaatgaaagcttcaatgatggctctcggctcttcaatccttactccttcagcattcacaatagtaattactttgttatgtcttcttggatgctagaatggaatagagcagaatttttatcacctgcctttccctagtttatttttgctttttgctgcaaaaaagacaagtaact

SEQ ID NO: 380916 - DNA, 3028 bp, Cannabis indica
gttgtagatttacatttaatgtattttccatttactctagtattactaggtgttcacattgtattatatatatcatttgtatacactaaaatagatcatcaataaataaataaaaaataaaacataaaaaattctctcatttgcttctaataataaccgcgaggtctaattgcttttattaatttaactatgaatattttttctcaaaaaaaaaatatataatttgttgtaaataaatatctttaaacatataatgtaataaaattttatactgtatagtgctggagattttcataaagttaattagaatgatttgtcatgtcactactcatactattgtcatttagtatttatgacttactttaatacattttttcatttacataattatttgttaaaaaaattagctacctaaaaaaatatattttaaatatattgatcattactttttatgctccaaatgtattggagcacaattacaaaatatatgccaaatgtagcatttactaattcttctgacaaatttaacacattttctacccatagacacaatttgctattgtgcattaaagcacaattgcaacatgttggccaaatatagcatttactaatttgttctgccaaatttatcacatttttcacccatgcattagagattgtcctactccttttctaataaaacccaagaacctgaaccccaatgacagagttagtggttagagggtgtaatcgtgattaaaccaacactagcaataatgcaactttaaaactagtattaccaccaaagctcgtcaaaatcatagtaatcaaaatctcccaaactcaaatacaaatataataactaggccacataatgaagttcaacaacccaagaaaaaaattctctaaagatgtgaatcaccaacctattcaccatgtctagcttcatctagtttttactggataattgattgaaacaaaatgcagtaaacaaaattacataaacaggttgggtcttgaagccttgtatgttgtcttcagcttcctggttgggggcctgaccttcttaaacaccaacgggaacttgattttcgagttatggaactgcttggtgatttccctcttgcaaagctttgcggggatggttgcagtcttgatgatctggatgcatggaaacctgacgcggtgacgtgatgccatctcggtgtacatttgttctactgcaccgttgagagttgtgtctctgtactccttgtacatgttgtgatatccagtacgactctgataacgcaaccaaattccgaagttcttgatggtggttggattcttctcatagatctgcacccaaaaacttgacatcaacacttatttcgaggtgtgtttcataataatatgtaagcaaaatatcattcgatctagaatgaaactacaaaaggaaaaccatcatcatcccttcattatttatgctataaatcattacatatgcttgattaacataatgttcttacttcttataaatatatatcatttcacatatctagttgatgtctacaatggaaacaacttggaaaatctttccatcaaaacaggcaaagtataaagattcattatgtatctaagcacagagtctacagactacaaacagttactctctacgtacatcctgctaacaatcatttggtttccaacaataacttacttgagtagtttttggcctatctgacctaaaattccaaatcatcgccagatacaaaaccttaagaaagaatttctaacttcaccgacatgactattacattccagtaacatgaatctgtgtgcgcctaaacagtgagtacaacacatttccatcgaaagcaagtcaattgaaataaaagaaagatcacaaccatatcgtagtaacatgtatgagttaatcttgttgttacatagaataaactcagtagtgagaagaaacatcaatttcgggcagagaattcacatacttcaacaatgttagatatcaaactaacccataaagcaaacttgacttaaaaagtggactcccagtgctgtcaatacctctatgtaaacaaagttttagtgagcgtgcctaaatcaaagctaatgaaaatctcaatacctcatttacatggtaaccaaagtaatgtttagataaattagatagatacctcattaatggccaaaatttgaccattgcttttcttgaccttcttcagtttcctcaagaagtaccttaaaaaagaagaaagagttgataaataaacttaaaactttcataaataaacatcttaacaaataacatttcagaatccaaaaaattatcaacaaaacaaaattacttgagttcattggttagcaaaattcttggtaacaaataaaacttgaatatatatgagtataaaagccctttcctactcaaacaaccagaattgaatgcatagtcaaaaacaaaaccaggaagagttgagtaaataccagaacttggacttggcacggacctcattggtggcccaaagcttcattctatagatcttggggtggtcatccgattcagtgggcagagctctaccgaccacctggtattggtgaaactgaccaagaaaaaacaatccaaatcatcaaaatcagcttctctaaaaccaattaacgcagaaataataataataaaataccaaaactcgaccaaatatgaaagaaatgaaaaggtaggaaaaaggaaaatgtattagagagtctcaccctgaaagtaaccattgttggagaaatcagagaaaaagaggcggcagcagtcctccgattctggttttgggagagaagatctctaacgagtatcgatggttaaaaccctactactctcctcatctaggtcaatatcgcttcacctgggctgggctaacgcccatcatttattttattttctggcccatcggcccaacattattcacttttttctttttgggattttggattatttctacatttttactgtctttatatttaattttacattttttacaaatttatatttttataaatactcttttaa

SEQ ID NO: 380917 - DNA, 1993 bp, Cannabis indica
tatatgattgattaagagaaacaaaaaattaacaaataataactgatgatgggcactagcaaattagtcatatttaaattaaagtcattgtcaatcgatttcacttaaagatccgttatcaaaaattctaattgctgttagagtttattttacaaaaaaaataaaaaaaaaaaaaaattactattgctgttgactgaagatgccatccaccaactatttttaattaaatgaattaatgtatgaattttacaataaagtactattaatgatacataaaggttctttatttggacattaaagtaattttgattactaaaatcccccccttaaaaaaaaaactctcaaccaaaatttaaaatatatgtatcttacaactgggacaataagaaaattagcactttaattatcacactaatatgtcaaataatatatatatatttttggaataaaactttgtcaaataattcataattacatattatacttaggaaaatggtctttaatttttagttatgattattataattagttcgtacaatactagctaattgatgacgaatgacatagtaagactaagagatagaagatgaattcaacagtagttttaacccattcaatagttataacaacaatatatcaaaaacatgtaataaccagctgaattgttcaattcaattgggtatactaagtttcttcaattacctcactaataagtattgaatttcaagtattgatcatctatacattagaggtaacaaaatccaaaatactatttcaaagaagtgaaaaaacagagcttttttcttttttgccaaattcagacaccattttggctcataataaacaatgcctagcttgttacaaattcaagtccaaatgatcaaacaagttaaaattacaatgcatatataattttttatataaataattataactctttatagacaaatataataataagtatgagattatgcaaaactatggggtctggaaaactaacctgctttaatgggaacagagctccagcaaccatgaccatgtttgagtacaaagtttcgaagcctaaggtcttcttcaggtgaccaaagacctttccgatgctttggctttggcttgtcttgtgatttgcaccccattatttttcccaactttggaaaataaaaagtctatttctttttcttaaaattgaaaattttgtagtgttaaaaatggaaatgaaatgaaaagatagagcaagaaagaaagagagaagctatggtttatggacagccgaccacaaatgggtctgcagggacttatttaagcaatgattactcaaggtcttctctttataaaaaagaagaaattattaaaataaaggaaataattatataataatgtgaagcctcttttgtcttcttcttcttctttctatctttatttaaaaccaaaaacaaaaaaatgtgagttattttcttcattggttattctttcgtgtttcatatgtcatacatatatcaatttaaaaaaaaccctaaacattttaaatttcaataataggtaggtttgcccttgtggttgcagaggtaataaatgtaatgtacattaattgactttgggatagcctagttactagttactagttagttaacaagtttctttttaactgtgtgaacaagttggttaatatatgatcacaaaatccagcaggattggtccacacatgaaagatgacggtattcagtattagcaccccaagaataaattccaaaaaaataaaaaagcacccaagaatgaaactaaaaggaagatcaaattaagttatttttaaaatttattgtaacacttatttttatttttaaatatatatattgtgttaatttccaccatttttttgttatcttttttttcccataattttctaaacaataatttacaatttttgtaacttttctttaaaaaaatttccaaaaaaaaaaaaattaatcaaaaaaaaaataaagttttctaaata

SEQ ID NO: 380918 - DNA, 10247 bp, Cannabis indica
acgagacttagaaaatgtataactaattacaatttagaggttattcttatttataactggcccaaattgggacttgattttttttataacaaattagaggttattcttgaatagagtattcttaaatagaggttctactgtacatttaaacaattctcaataaaatattatttatgattattttatattttaaatatattcatttttactattaattattttaattttaaagtgtcattagagttgctctttgaacgtttataattaggacttataataacatgacacgtgtactctataatagtaggcatattcactcaaaattcctcattcctcagcacgtgacaatattcaaacataataataataattaataacccaatttctttttttaaaaaaaaacatccctaatctctttttgttttttgttttttttttaaagtaaatttaaaaatcaaaccttttttgcttagctgaaataaaaatcaaatcttcaaaaatggaaatttatgttcgattaagacctcaacagagaaaccgactttgagctcactatttatacagaaagaagctaatctcttctctgtttaaacggatcaaattcaatttttcagaaaaaaatcacataaaattcattttttttttatatatataatataatatatatattgtcttcttcagttaaccctaaaatatacagacagagagagaatttgagctgtctgtttgtttcatttgggtttccaattattttattaaaccctaattcgttttggggggtggggttatttgtactgccctcgttcccaaaattggaaattgcagaaaccctaatttttggggattttgggtggggtggggtggaagtaactaaagtttggttcattggttttgattatcgatgagaattcgttggatcagcgaggaatcatcagcgatcaaaactggggaggtgtagatgcatgtcgccggagtaagtttggatctgaattggttccttaaagctatattgactgtgtttattatagctgtgggattgctttacttggtgaagaatacggcctcgaagtattttgaggtcggtgccaattttgaaggaggagattctactgatcggtcatcaatgcctggggttttattggaggatttggcttgtgccgtttgtggaaactctgcccctaagaaatgttctcgctgcaagtccgtacgatactggtaataaagttaattttgtctcccaacattgtaatgtttgattggtttcttgatgatttgattagtatttgggtaatttttcttttaattattactaaaagttttgaactttttatggtaaatttttgtgatttgatgtttcggttggggaaagatttggtttttaaagtataatgtgctggctggggagacaacctttgacttagtaatgattgcatgtttagtattatgttaatgattatattttgtttttgtgtgtttagttagttaattgttttatattaacttttttcagttcacaaaagtgtcaagaggtacattggaaaaatgggcataagaatcattgcaaaattgctcattcatctagtaatgtaaattcaactcaaattggattgagggattcccaatcgaaaacttatggtgttgggggtaaagctttttcaggaattgcacttgttcctaccagtggtagtggtagtggtaaacctaaacccattaaacaacctaaagaggtaaactattaagtttttgtgttaatggaattgaaatttatgtattctttacttgggtttcttttaatagagaagataatagtaactgcatttgtgtttttcagattctttttccttatgatgaatttgtggaactattcaattgggacagccgaggattccttccttgtggactcttgaattgtggaaataggtattttgttaattcttaccatactttgctttgctgttaagagaaagattattctccatcttcgcaatgcatgaatgcaaaccgcaaccaatctaatatcttttgtttttttttttgtctttctgcagttgctttgccaatgcggttctgcagtgtcttgcatccacccgtccacttgttgcctacttgttagagaaaggtcaccgaaaagaatgtaaagccataaaccagaatatataacttttctcactgttttatattgtaatagaattcttcttaaaccctttcaattgggttttcaggcattcgtagtgattggtgtttcttatgcgaattcgagacacttattgaaagagttagtcaaagtacacaacccttttctccaactaacattatctccaggttaccgaatattggcggtaatttgggctatggaagacaggaggatgctcacgagtttatgaggtttctgttgtttttagttatttaagcttatcaatttctattccactgtcttgaaataagcttctaaaggatgtacagttagtccaactttgtaacatttcactctttcgtcctgtttttcccttgtattgtaggtttgccattgacacaatgcaatcagtttgccttgatgaattcggcggtgaaaaagctgtcccccctagctcgcaagagacaactcttattcaacatatttttggtggccaccttcaatctcaggttatcttactgcacattgttttgcttcttgcgagttttatcaatttatgttctcatttattgctttatatagatttcattaggatgtagttttcccgatttggataaagcaggaaaaggaattaggagaaattgaacaaggattttgttttactgcttctcatagtttattttcttttaatattttctaggtgatatgtacaaaatgcgataatgtatcaaatcaatatgaaaatatgatggatcttactgttgaaatacacggggaggctgcatcactagaggaatgccttgaccaatttacggtcaaagagtggctccatggagataacatgtataagtgtgataggtatggctgcttctcttttcctattaatcgtataaaacctgtcatgctttgaatccagacttctgtaaacatacgagacatccttttaagggttttgtttcaatttatttaaaatatcgagtgacattttatttgaaagcttcgtttctgataatggagccttacttaatttgtcgtgggcattatgagagactatatttgctaccttggcttttttccaaattaaattttaatgagtaatgaccaagataaccatggacaaaaagttagaactggatacattgggatgttgtcaaaagttggattaaattggtttcagcggttttatttcaactggaaactgaatacagtagcaaacatatattaaaacttacatgtccaatgcatttatgtaaactctttttctcaggtgcaatgattatgtcaaggcttcaaaacgtctgacagttaaacgggctcctaatattttaaccatcgcattgaagagatttcaggtttaacattcactcttcttgttctgccagtagtttttataaaattgggcctattgggaaaatgaattatgtatgacataaaccaaatttcaaggaaagaatttatttacatcaatgacatgcatggtgacaaatttgggttgttcatgtttggtgatatctgaaattactatatgcccaaatatttctgcagagtgggagatttgggaagctcaacaagagagtaactttcccagagactttggatcttagcccttacatgagtgatgccgaggatggtatggatgtttacaagctttatgcggttgttgttcatgtggacatgctgaatgcctcatttttcggtcactatatctgctatacaaaggatcttagtgggaactggtacagacttgatgattgtaaggtgggtagtctctcttttatcatttgtatatttgcgtatatatctattcgaggtatttgattagctcatcactaaatacttctcaggttacaaaagttgagttggaagaggtactttctcagggagcatatatgcttttatacagcaggtgagtttccgagattccatgtttgtgatcccgttcatagttctttcatgtaaagttttgtttcgttctcaaatttgttcgtcttctatagtagccttaagagagaaccgttgtctgcttaattcgattttcgttcaaacttttcggtgttgaaaacacctttctacagaaacactgaaacaattgtgcttctctgtatttttgcagggttaaggcacggccatcttgtcttagagctccagaacctccaaaggtggtgcagcagcagcagcagccgatggtcaataatgaagtagagcttagcccgaaaaaacaaattgaaagcttttcccatggcgactctgcagacccagtttgctcctctgaatctgtttcggaggagcagcaaatggacgatgttacagtagagcttaaccctttggaacaaactgaatgctcttcccatggtgactctgtgccatctgaaaataattgctgtccagagatcgataacaaagaattacctatcgaaactgattctgagtctgctactgatgtggctattcccgaggaggcttcatgcagtgaaagagtgttgtgttgtggaggaataaagtctccagctttagaacaaggtcaagaggaccaaaaattcttgaataattaccgagccacctcatcgtgttgcaatggttccaataatccaggtactgtaaacgacgacctggaaatgatcgatgcccattcatataaggctgacgcggatatggatatggttggttgtgacttgagctccttccatgttgcaaagaacatcgaaatttacagtaatggctatgctgatcctaacaaaggtgttgatttcgggttaagtaatggccatgctgttgatccagataaagaaggtgcctgtgaagttgattcggggttgtgttcttcagccgaagtagcgggaactcgtaacacgaagaagcgtggatttcatgtaagtggaaatggaatcaagagtttagaaatcatgaatgacaattgattaaactaaggttgtctcacttatgattttgtttataatttttgtaacactcccatcagcatcgtacaaaacaaaaaaagaaaaacgttgtgttgggtaatttttgtctgggatttctatataattaccgaaatctcagattcaatggtagcattttaatttaattttggacacagtgaactttgtttagtatgtgtagttagacaaaatgcaattcaatggtatcataatggcttaggaattcttttgggaaattttcaataatatatttaaaatataaattatttacaaaaatactttaacaaatcttaattacaataatactttgtcacgtcattaaaaaatactttaattttaaaataatatgtcaaacgaatttaattctaaatctatttttttttatgatgttgataagaaactaaattgttacttttacataaaaaaaaaagttaaatttttaaattatataatttgatatacaatttggttacctttaaaattttatttgtaaattttattttgagttatattgtactatcttattatttaaaatacatttgggtaactttaaagtttattttcaaaactaatgagttttcgtataatttaataagctactatttttatttgccaattcttttatatactttttttgttactttaaaacttatgtgtttatttttagattatattaaattaatttgttattttaaatattttaacgttacttactttttattttacttttataaaaatatttatgttactttcaagtctatttaataaactaataagcatatgtatgaaatagttttatttagtatactttatagtaatatttaaattaattatgattttgataatataccaattggttacttttcataaaatgattcactttaaataaatatttctggtagataatctttaatttttagattaattattttaaactatatactcatttttagtttatattatcttcatttatgttatattatagtatcttattatttaaattacatttgagtaacctttaaatttattttcaaaactaatgagttgtcatgcggtcatttgacatgtaagaaaactatatatttttttatcgtcaccataataaaatgtaactatttagttgcttatgatacataaaatgaaacttagaagtaactatgaagttacttttctactacacacaacataaaataatttattcttttattaatatgcattatttattagaatgccaataaaaactgaaggacgagataaaaagcctgatctcgcgaggatatttcaaacagtatgtaagacatcaaggaaacgagtctaaccaacctaaccagcacaaccctaataacccaaataaccagagaatgcaacctccccctgttgagggcgaggatatattagtcatttcgggagggccacatctcgctgaaaacagtaataatgcccaaaaaaagatatgtcaatgaaataaaaaatagacaatcggcatttgctccagaaccactgaaaaaagcaaaatataatgaacgattgtcttctcggaggattatacaaatcatgtagagtactcgcatgttaatcccctcgtcgtaacagtccagctcgcctacaaaagggtgaagagagtgttggtagacaatatgagttcaatcaacatcctctacaaggttacactaaaaaagatgggattagaggatgtgcagttgaaacttcgtatggaaagcttatgttgatttacaggcgacaatgttgccagctcaagcatcattgaacttccattaactgtaggagaaccacccttatcgatgacactaatgtaggagttcttagttgttgatcttccatcaatatacaatgtattgatgggttgcccaacattaattggactgggggtagtaagctcgatcaagcacttgtcaataaagtttccaacacaggtaggcgtaggagtagtccaaggcgaccaattattgtcttgggagtagtccaaggcgaccaattattggcttgggagtgatatcgaatagaacttcagaatcaaagagccgatcctaactgaagaagacgagagggaagaggaagatctggatcctagaatccaagactaaaataaccatctcaaacctattgaagagttggaagaaattatttcagatccaaataatcccacaaaatgtatacacattgggaaaaatttggaagaaaaactaaatagcaattaattgagtttaagggcaaaccaggatcaatttgcatggagccactcatatatgatagggataaaccctaatgtaatctgtcatcatttaaacatcgatcccagctatccagcaaaaagacaaaaacgacagccattagattccaaaagacaaggggcacttaaggaagaagttgacaagttgttgactaatgagttcatacgcgaggtcttttatccctcgtggatctcaaacctagttcttgtcccgaatccaaacgacacttggaggacttgtatcgattttttagacttaaataaggcatgccccaaagattgttttccactacccaagatcgaccagttagtggatacaacagcaggacatgagctgatgacctttatggatgcatattctggatataaccagattaaaatgcatatctctaaccaagaacatacaagttttgtaacaaacatgggactctattgttataaaatcatgccatttagtttaaaaaatactggagcgacgtatcaacaattggtgaatggaatgtttgaaagccaaatcggacgaaatatgaaagtctacgtcgatgacatgctagtaaaatcacctattcgtgcttgtgttgggaattttaaagataagtgtttgattgaacttaccgctcctagtctaatcaaggcagggcgacccatcaatacattgtaaactgatggaaggtcaataaatttatagtcttctttttgttttagatttatattttgtgtgagtattattcgctttttaatttttctttagtataatatacattttgaagatattttttttatgtgttaattttataaataagaaattatatgataaatatgtatttttaaattatatattaaaataaatttaaaattatttgatactattttattattcaataaatattcatacatctaatttaaaaaatttataaccagccacaggcgaggcctattgactagtagtaagataagatataaattgttataatataaaattattatgcaataattttaaaattcacaaaattttgttaattaagaaaagtttcctaaaaatattataccggttaacacgtgtaagtataacaaagagaaaatataaaaggtaggtgttattaagtaaaaacaagtgtaaaaattccacaacatggtgaaatgatatgtattactgataagaattaatgaatgaagaaaaaatggtttaataaaatggccatacaattcttacaagaaaaaaatatttgaaataaatacaaaacctcatataaatatatattaactattatagtttggtttgccataaataaatttcaaaacagtaaacatcatacttttaaaattagggatagatcagaatatataataagaactactaattttaaaagccactaaatcttatttagcttccatcctatcccacattgaaatttttatttgtttagttatctccctctcatacatatacatattatgttcaatatttaaatataaaatagctcccatcaccacaccacaaaacattaaaaaattttatttatttacttgtctctctcccatacatatacatattatgttcaatatctaaatattaaaatcttatttacctcccatcaaaacccacattgaaaaattttatttgtttacttgtctccctctcatacatatacataattatgttcaatatctaaataaaattatgtatatgtatgagagggaaaaagtaaacaaatgaaaattttcaatgtgggatgggaggtaaataagatttagtggcttttaaaactttttttttttaaagaaacgtttattcataagacattagacctcacggtcattataataaatgttcttaggattagtagcaacaatagtaattatgggtaaaagcccaattgaccacgttatgggccataaagttacatgatctaaccgtaaaataaaataaatagaaaatgaaggaatgagtaattcttttacaaaataaagagtagtttagtggcttttaaaactagtagacttactattatatattctgattaattgtgatcgatccctatatctgaaagtatgaagtttactattttgaaatttatttatggcaagtacattgttgtgatatgtcgtgtttcgttcgaagtaccaaatatcaaatcacatacattttgattcaataaataatatagaaaaatattaatcacttacaatatggaccgatatggtagtaaacgtttttaagtgtctaatagctagcaatgcttgcttaatctatttttaatgtttatgttactaaaagtctaacacaattagttcatcgattgcgtcaattttgaaggaacacgtataactttttcttccctctatagaatgggtgaaaattataaaagagttcaaacttgttgtatcaaaatttaattgttattttttcctttaaaaatgtttttgttttcaaatagtttcctaagctcctcgacacttaaatataattaattcaacatttcattattaaacatagttaacactgttttcttattaaaaaaaaacataaaaacttagggttctttcataaatcttagtgataaaagcttgtgaatgttattagaaattttagagtcaacctgagtttttataggctcacttaagctatcattcaaataattgataaaaaaatatgaagggttagaaatgaatatctcactcaaattttttaaatacaggtctaataatcttttaaattgattgtgtacaaattattacaagacatcttaaatttctcattagacaaacccaattctattaaagactaagggctcgtttgatacgccgtataaaagtcgtattgtattaaataataaataacactatgtttgaattaaacaatgtattgtattaattattacgaccaaattttttaatacaatgtatgttgtattatttaatatat

SEQ ID NO: 380919 - DNA, 1412 bp, Cannabis indica
tctttgtatttttccaaatgaaaccattattggcctctacaggaatgaacagatcgctggctaaatcttatctgtcaagtactcaatttctacaaacataattaaaaaccccaaaaaaaattaaaattaaaacgagacacattcaaaattttaattatttaatagatttgttaattaattattattattttattaatattgttgctgacacaacttaaggttattgtcttttaaaattcaattcttcaaaaaaaaaaaaaaaaataaatcgtaaacttaacttagttgtattacatttttccagatgaataaaattcgtataatacttacatgaattatttatatagtgtctcacattgcttagtcagacttatattattttaagtggtatgcagaaaaaagttttttgttgtctcaagtcatgatatctcttatcttatgtaatcttttccaattatgtcatcatgcatgatgcatctgcatatgcaagctacatttaactaatcaaatgttcatataataattaatttggaagagcatgtcaaaattactctctatttccctcagtcggatcattaatattgtcttctcttttcatatgtaccctatatatatatgtatttagatatagtaacaccaggagcaacttcaattttttatcaactatatatgacatatatgtatgtatagctctgaccttttgcctcctcaatgtttcgtttacaaaataaaataatgtgtcgacgctaaaaaatttgagcagataacacatccaattaattatgttatgtatttgtaagaaaataaaataaattgaacacacctatgacatgcatcgtacaaattctaaagaataaaatcttttaattcctggagaaggttttgtcccgagccaatatgacttattcatcaacaattttctgccaagctatccagcatcaataatttaatgctccgttaatataaaaaaaaaattacaatattaataataattcaatgctccgaatttgaacatatataaaaattttaaaatcaaatctcagatatggtcaatatatagttggaatgaaaaacaaaaaatttatatatatgatttttttttaaggtagggaatttaaaaaatatcttatttatagggtatttaatagcttattttaattgggcaattgtattgtaatacaataaaatacaatatatttaaactaggattgattaattttttttatctaattcgaaaaataataaataattaacatttttgtttcctgaacttcagcattacctgattgattttgctctctaaaatatacatcttgttaaaaattcttcctaaaaaataacagttacatagttatacccctactgttaggttctgttttttttaccgtaaaaaatttgtatttttacccctt

SEQ ID NO: 380920 - DNA, 1777 bp, Cannabis indica
ataactaagattgaggagattgattgcattataaaggctatgtcatagcaaattacaataatgagggaatgagctagaggacacttgtcactcttagaaaagtccagaccaaaaaaaacagcaagactataaccgaaaagagaaagtgaaaataccacactgtaacacactgatagataactagttatgtcattagcacactaacaatatgattagacaacttaatgtttaatgtttcttaacaccctaatcatatagacacatgtatatattatatacgattttatatgtatacacgaacaaacaaacattgaactgatcccaccaccaagaagccgcactacaattcagctcaattttctgtccttttaaacgttatccctagcacctcaaaacgccattgtttttcctatgccgtgatattccgtatactttcttctttgccaataaaatcttgaacaaaatagtgcgtgggcctagttacttagctttcatcatccaatatagaaatcgatttcagttaaagagaataattaaaagatcgaacaaaagaatatcacatattcaagggacaaatctagaagctacttacacacatccattacagcatatacgtatgaaaataatgaatatatcaagtgagaagtgatgatgttgaagtaaagagtaatttcaggaagtagtgtacagtacttgtcatgtttttagattggattgtttctttttgcgagtgcgaggtactggaccatactttatatgctatacaaccacatatggtacattatggtcacaagaccacgaatatatagattcgagtatatatattagaggcagtattcacacttggtcgatagtatatatgaggcagttatccacttttagtgctgtacacttggctaaacttcgatctaacattatttcccgaactagtcttattacctatagacaacaatacactaaccaacaaaatgggatcagacaataactagctaaaacaacatatcatcactcgattatatttataggtccaaacacgacaaaaaattttccctttctacagtatgtatatatatatatatatataatatgtgccttggcaatatacatatttaatttcttattattatcttaatttgtcatgtaaatatttgtaatggattgagaatttattaacattttaatttgatgtagaagtttgatgagttgacttctgacttatgaatacaaggcaggcttacgtgttagcttggtgtgaataattctcgacatgataccaataattgtgaaaggattagttacaagtgtttcgacataatggtagtgatttggatttcatggactttacttttgtcatttgtgtgactcatgatcattaaccacttttcacaaaaaagtattcatcacaaacgtgtttttcaatttatctgaaacgacattcaataggtattacaaattagagagaggaagaagatgaaactttattgatattgaattcatgtgaatggacacttatatataactaagcctaatcacccattcaagtatacccataatagaaacaatcgactaactaattatacaaaactgaacttaaattaatagccccttttgacacccatcttatatataatcagggtcagccttgaaaatatatagaacgaattaaattttggaccctaaaaaaaaatataaaaaaaatagaagaaattacacttagtatgggattttaaaagtttttatgataaatatggcacatttaagtttggccaatttatat

SEQ ID NO: 380921 - DNA, 2736 bp, Cannabis indica
tgagaaaaattaattagaatacattcattaaagccaaaaaaaattgccttgaaaacatattaccttgtcttgtgttgagaagttcatcttctctttgtgaacttctggcttaatactataacctccccttaaatccatcaacttcttaccacctgttgttacacagaatcgtcttagttgatccgggaatatccataaatcagagcccttaaaagaatcacccatgatatcttcatactcagctactgatgtcaaatcatgagtagagctttgtgaatgttctaaagaaacatcagcttcactgttctcaccaactgaagcaccactagaattttgcttgtcaccatcattttgacttttgggcctaactgaattcgatgttcttatcaaatctacatgaggtacctcttcctttaagtctactttatgtactagttttaatataccattaggaccgactttcgtacctttcactgtactcaacttctccaacttctctgaagtaccctgaacagttttcatgttcaccgctgtctttctttccttgagctccaatccaatcttattctcttgtagtttttcctgttgtgatttgatttgaggcttcatatcctaatgtagtttaacaattgtgaatcatcataaggtgttaatcagctcagctcaacttagcacacaatagattatatacctgatctacattagtttcaaaggcacttatcattttcttgacactaggaatcctctccaaagatcctcgtctcccacgagaagaattcgattctgaacttttcatagctcttgtaggagtcttggaagaaaatgattgagcctcaactttctcatttgactccctatgatggattcttcttagatgaacatcaactctttgggttgaatcaatggctgatgaagtctctttgtttttatctgcatcattctaaaacagtttcataaccattaaaaagaatccaagagtgtaatgtgtaatgcaaaaactaactttttgttccgaattcatgttattctgattcttttactacattgaacaatatcgaacctgatgagatcatatgccaaacaggtgaagcaacttgactacagtcattagtagcaactgcaacactactactagttctgcaatcgagaggttctccacgtttctttttcaatgcagattctctctacaataaaaatgaaaacatatgctaattactgagactgagactgcacatttacacaatatcttcattttaatactaagaaatgaaaaatggaacagacttatttgagaaataccatcattcggattctgttccgctcgtcttcattgagtacaaactgcagcctcatgtgaacatgcccacctccttttagagggaaaaaatcatcccaaagacctttttcaactatggacttggtttcaacacctgcttaaggcataaatagattacaatattagttcaaaaactttgataaatatgtttgtatggagcacattttgataaacctgcttgtgatatctcattgccctcagcattctgaagaacaacagtcaaattgtcacggagagttgtcaatgggctgtagaaatgaacagaagctgtgtatcattaccaaagcttaaaactttaaataaagaagaatcaagtgtagccttttggattgaatttgagcacttattattacaaggaaaattctcctttgtcccaagtttggtattctctcttccccattgaaactgcatttacaatgacagcttagtttaaattaacaaatttaaagaaaagaaaattggtttaaagaagagacaattcccttactttttattgatattgatgaagaaggtgatgaaactggaaggtccacaaattccaaaactttgatgaatttacatcacatgaaaggagtcagtatagctgtaatttgccatgttagaactacaaaattcaagtcatggaagtaaattagtacctgaaactaagataattcctggcatagcaaagacaattggtgctccaagagatgttaaaaagagaaaacaagagcagggttatgtactaagtagtgtaaaaaagaattgcttctctgatttcagcttgaaattttggcttatgggtgtgttgtctcttcttttgcaaaataatggatcaccaaagaaagaggtgcaaaaaataggatattggttgaaaagtgtggatgtggtttgggaagagagatggtggggtccataaaatttccaaaaatatattttacacctcacaaaagctaagaagacaattctcaaattttgtcttactggtctgaaatttcttcatatttgacatgtttgtaacttaaaactcttccaccaactttgaattaaaaaattaagttaagtcagtttcactaaaaatggagagagaccacattatgaacaatttgatgtactaagataccgagatttctcacttggaccggaaaatgttaaaaaaaaatttgtcatatagtaaaccaacttaaccaaccttcttgattcttagtcaacatatatgataattgtatttgaccataggagtacccttttggccaaactagattttttttttcatggttaatttatcttttaataccatgtcattcatgattttctcattatgaaggtcgtggtcactgcaaccaagccaacttaattgagccatgtcttgcctattttggcatgttcataaccagcgttttcaagaagaatcagaactc

SEQ ID NO: 380922 - DNA, 1741 bp, Cannabis indica
taaagtactaccgtacgtaacgtttttcgttttttttttttttttttcacttttttccttcttgtcatactctttcgcgaaattgcaccaatttagtttgtgcgtttgtacatatatagatatatatatatatatatatatttatagatatacagagagagtttcgctttttcttgaagctggttctgaaaatgttgggtcagaggagagtgatgacgtggaggcgggtgggtaagtctctgcacgctttggtagcccatggtttactcttcaccttctccattttgctcgtcctcaagctccaccgggccgttcggtatccatggtggttcgtatttgcatatctctttattgttactgtcaccttttttcctgggcacttgtttttcttttctttttttttttaatgggaaattaaagggttgattttttatactataattagaaaatagaagcattaagatttataggctgtaaagaaaggtacccaatttgtcaatttgaaggctggattgatctgaattgccgtgttttttaagagagtaaacttatgggctctgcttgattgtgtcctaaagttactattgttagcatcgttcttgcatacattgattgagcttgttaagggtaactgtgctttaattacgattcacaactggctcaaaatactaaaactatacaaataaataaataacgtacgccttaattctttcatagtcagcctaatgatttcccttatatggaaaaaaaaaaggaaacttttttgtatatatatagaaaaaaaataaacttattaaatctaacgactcataacgattttttttgcatggtaattcaaaactaaaatatgaatttatctatcatgacagaatcactccaataaaatctttgttttgtgtttatattttttgcgagctatatgtttcaacttatgagtaagccagcatgtgatatatagatttttcctattttagtataatttgaggtttgaagatttctctgcttgtgtggtgtgtcttttatgctggaccatgctatgtacaagtgctgttttttttatttagttggaatgtaattttttcagtggttactctgcagggtagtattttcccctttgtggcttttccatgtagttgttgcacgagctaggttctccttaccggctccatctctgcctcgtgatcgcaatgtatgatagtgatctccaacttagttggatatagtacccttttttgatatatgagaatatatattccaaagaaaaacttcttattgtagtgacacactaacacattatacacccaactaatacagtttgctgtcatgttcagtgggcaccttttcatgctgtcttggcaactccactgcttgtggcttttgaacttcttctatgtatctatcttcaaaacgattctggtatgttgaaagtatttctactaagagtaattattaaatacttctggaatcattttacccctttgtatactacatgtgtgtgtgtgtgttttcttcataaagtcacatcgtttcgctgtcaagcagtggtctacttcagttcgtgacttgcctttctaagagtgttacttgaaagctgtattatttcttcaaattctcattctttaaacaataagttgatgatcatgatatagtgttcatgtgaatgtgatttaaaatgctttggccttattgctgcttttttcttggtgaaatataatttgccgcagttgtcacattgaagatt

SEQ ID NO: 380923 - DNA, 3242 bp, Cannabis indica
ctagtgttaggaatttacgtaagaaataaaactaaaaaaaaaaaaattgaatttaaaaatgtaaaaaatgaaaaaagtccctaaaattataacttcacccattaaatgtttattttataacaaccacccccacattatttgctgaaagggtattatttaatacaccccaaaattcaccttaaaaaattctcacagaacggaagaattcacacgactttacaagagttgatcaactcatgaggatttaagcaagagattctatgaaagaccaataaaaaatgaagaatgattgaagatgtacttttctttgtgagtagtctaagtattgagaattaagtttggaattataattcttagcaatagattaaaattttgaaaccaaaatggttatattttatcgtgcgatgtgaaaatgacaaatgttagtactactatatacataacataaaagttgtaatgcttgttctcttccttgttcttatggtgtacgactaatacattatgaagttataacacaaaatgagtatttttttgcttgaattttgtattttttttttctttttaatgaatggtggtaatgggaatggagacatggatttcactaaaatgtttgctggtagtagtggtgttacttttgtatttgatgattgcttaatgaaattttaaaattttgttcgactgataaatgattttacaatttcaaagattttaacgaagtttcttattttctgaaagatttcaacaaacaatcgtgtgttgtacttattaatatataaataaaataaaataaaatattttaaaaatacctattttagtcatttaacaaaaggttatatatgtaattatattttttttgggtgtagttataattgtatgggtgtaaatataactcccctttcataacatatcataaagtgaaacaaaagaaaaggagaatcaaaaccataatttaccactgaaatacaaagatatcattttttttaaaatatctctctctggaactttctagcgggttatatcctgttttcgtttctctcctggtacccatccagtttgtgttcaccttggtggtgttaatcaattttgttttgccataattagttttgatttatcttttgatcttctttctctctctgcattcattgcgattgaactctgagtaaagaatttttgtctctttacttacctctagctctcatttaatgcactctcactttaactcttactcttctcttcgtccttctcatttatttcatttgattctctgatacataacctttcatcaggtgttttctttgtttttttttttgcctttcttactcgataacccatcaccataaatggaagccttcattttggctctaggatttgcctaggactcatacagaggcgggtggagagtcctatcgctgacttctccaataagctttgaatatccaggtacaattctagtctcatctatttaagggtgtgggttctttggagatcattactttattgcttcctcctctttcttttctttaaaaaatactggtttccatctctgtccttcctattttggaaatagaagatctttctgagaatatgttgcatgttattaaccttattgaaaaaaaaagccatcatccatgaacttatcaaagatgtacgaggtgacaattagcctatgaaagctttctgtctagtcttatgtgtccttaccccaagaaccatcaagcttcaatggtttgaggaggctatggaaaatgcttcgattactcgtgcccctattatcttttttgaatatgggaatggtatgtttatggtttaatttggttgtgagggggacatgcatagatttatcgaagggcagccatggtattttgaccattgtctggtcactagtgcaaaccctgctgggcttgacacccttctccccaaccaacttaggtattctcttttctggatccaagctcattctatcccttttgggatgaagtcttataagttagcaaaaatgataggggatgaggtaggagattttcttgaagtggataaaactactattttccaagtccctggcttatttcttcgggtgagagtcttagttgatgttctaaacctatcactagggggatcttagttgattttagaaacatccacaaggaaaaatggttgaacttcaaatacaaattttttcctaacatttgtttccactgtgggatgtttgatcataccttgacaaagtgtatttcttatctgaaaaagtgtgatgagtttgcttatccaccccgtctccattataaaattcccttgaaagcccttgccaaattgaagttcaagcataatctctttgatctttccaactctattccattggaggaaatggctttgccagcagtgaacgttgatcaaagtttggctattgtggttagcgaattccttactactgaagatttgggagatggctcttcttcatctggtcctgttgcaagggtggatgaagggaactcccaaagtgttatgaataggcttgatatctctaataatgataaccacactgttgatatgctcccgattacacaaagtcgttgttttaccataaacttgagtagtgatgtccctgttagcatccactgtgatattcttgagatggttcctcctacagttgcggtcactatccatgttcatcatcatgttgttactgagcctacttaagatatggataagactactgaaaagtccaaaggtaaagttattgttgtggtgaaacaatctgctttcattcctcactctgtgatggtgggagagtctttcagaaacattctcaagcgagctaaaggtgaccttgtcattaatgaagttccatctgttgcagtctcttctttggttcaggcatgtgttgttgagcaatctcgcccagaaaaatgagtcttatctgttggaatgctcgtgggttggggagtcctagagcattctgtaatttgtccctagttgtacaaaaaaataatcctaagtttctttttgttatgaggtcaaaacttatggctggtagttgtgatattttgaaggctaaatagtttttttttattatgcttttgaggtccttaggaaaggtcttagaagtagtttattgttattttggaagcaggaggtgaatgttagtattttgaattactcctctaatcatatagactgtattgccaactttgatgataatataacttgtaacaccctaactagcataggcgtattacgtgatt

SEQ ID NO: 380924 - DNA, 2765 bp, Cannabis indica
aaaaatggaaaaaatggaaaaattcaaggtcttaaatggcgaaggagaaagaaagcgggaatgtgtgccatttattcattgcttttggattttttgagctaagaacacaacagaaaatagggttgagctagctgaagctccattcaatccagatctacttcttcagttttggtttcaggtaaaacaatcactaatgtcctttagcttttttacatttgttgattctgattttgtaatttggtgcatttttaatgaattggatctggttacatatggaaaagatctgtatatttgtataatgattttgattttgtgatatttggaatggatttgagcagagaaaagagagaatgagtcctccgattgaaacacctcacaaaccagctgtttcgtctcataatggacatccacctttgaatgagaggattctttcatctatgagtaggaggtccattgctgctcatccatggcatgatcttgagattggtatggtttttgttcttctgtgattttttacccaatatcaatattcatattcattataatctaaccctctttttttgttattttcatgaaatgcaggacctggtgctccaactgtcttcaactgtgtaagcatacaattttcgtagttatgtttttgtgttttgtttgtttgaactttgaacattgttcttatgaagaaggaaaaaaaatgcaaaattttgtttcaggttattgaaattggaaagggaagtaaggtgaaatatgaacttgacaaaaagactggtttgattaaggtatttctttctttcttttatgtcaaagtcaaattttgaatgataatcatttatgtcaaacatggattcattgtttggtttgtgtgtttgtttgtaggttgatcggattctttactcatcggttgtgtaccctcataactatggtttcatccctcgtactctttgtgaggacaatgaccccattgatgtcctcatcattatgcaggtagataccccacctctctttcattctcattttcatgttcttatgaaattggggtttgaatttgatgtgttttgactcacaggagccagtacttccgggatgctttcttcgggctaaagctattggactgatgcctatgattgatcaggtgaattttggacatgtatcaattgttcttgttgcttttttgtcttcaaccaattattaatcttgtgttttgttgtatggtatgaaatcagggtgagaaagatgataagatcattgctgtttgtgctgatgatcctgagtacagacacttcaatgatatcaaggagctacccccacatcgtttggctgagatccgccgattctttgaagactgtaagctaactaatttttgttttagagttcaaagggtgataaaaagtttgttcctttgggatttgtttatgacatcaaaatattaacctttgtcaaaaactaaacagacaagaaaaatgagaacaaggaagttgcagtgaatgattttcttccagcttcagcagcctatgaagcaatccaacattcaatgtaagtgtcctatgattatgattacgataacaatcatgatgattatgttgttcttcttagattataatgtgggatgattttgtgtagggatctgtatgctgactacatagttgagagtctgaggcggtagccggagcaagacaaatcgggggacagaaagagagaaacaaaggtgtccctttacattttacttcattgtaactaaaacaccatgaaaggagaaaatcactatcttacctttggtggttatatactactacaaacaactcaaaactactactagaaccaatcaatccttattcctatatataagtactgcatcatagcaatgaatgtgttcatttgctcttattattatatttttttaatattcttttcaaatttatttttgttctggtttgtttactatggttttttttttttgacaaagaggaagtgcttggaatgttgtcttttccctgtgacacttccacacatgatgttcttttgtcaaatttattctctttatgagatgtttgaaattaatgacacaatatatataaatataattttgctctcaactttcttgtgtctatataattgttcatactagatctaacatttattatatattaaaaaagaaaaaaaggagacaaacaaagtaaaggagttagtggttgagatcttaagtaatagcataatagttctctttattctttgtgttttgtacttttgttgtttttgtaagcaaagcatattcgaagttgagttgaagagatgtcaaactcaccatccacaaaagttggaaggagtatgtgtgtgccattttgaatgaggagaattttaagtaaaaatatatattagtaataatatgatgatgtatgtattggaagcaattgaagaaactaaaccaaataaagccaaatatagaagttgaagttggatataaagaatataagtataaatttataactattcaaagcctttgtttgtgagattaccctctatttagccttattttgtgaatgaacacataatatatgattctcaatttctctccatagaaaagaaaaagttttttttttttggaaaattacattaaagagacattatagattcaccaattatctttatatttagggaaaatttatagtatagggttttttattttgaacaatttaatattgtaacaaatttataattcaaattgtttgaataattgggtacaacaaattattttaaattttataaaa

SEQ ID NO: 380925 - DNA, 4068 bp, Cannabis indica
aggcccatgaatcggatgtggtggcggaggccactcttctaaaaaatttaggagaattgtggaaaagaaaggaatcaatgtggaaacagaggtctcgagaggtttggttgtcgcagggcgatcgaaattcctctttctttcatgcttctactatggttcggaggaagaggaaccacatatggaatttaaaagattcaaatggcagtttggtatcgaatgagagggagattggttttatactcaatgactatttcaagagccttttctcttccaggggctctgtttcttacgatggaatggaaattctgcttcatgattcggtctttcattctgagaacatgaatctaattgcagtcccggagatggaggagatccaagctcatgtcttccaaatgcatcccctcaaagccccgggaccggacggactctcaggatgtttcttccgtagatgttggagtgttgtgggggctgatgtcaccaaatgcatccagcagtttttcacttcgggggtgcttgaatcgggtctcaatcatacgcacatctgcctcattccaaaaggaatcaatcctgacagcgtggatcgattcagaccgatagcattatgcaacttcacttacaagataatctctagaatcattgctcaaaggatgcggactattcttgatcgtattatcgctcccactcagtcggcctttctccctggaagatggattgcggagtcctcgatccttactcaacagatcatgagtgttatcaagaagaaatctgggacaggcggcttaatggcaatcaaaatggatttgaacaaagcgtatgaccggctcgaatggaattttctcaaagaagttctggtgagattcggatttcactcacactttgtcaaaatcatcatgagttgcgttaccacggtttcttactccattcttcttaacggaagacctctcaagaaattcttccccagaagaggaattcgccaaggagatcccctctctccttatctcttcattttgtgcaacaaagtcttctcgcggctgttaactaatgaacaaaacaaggggctgttacatggtattcgggtagcccgcaatggtcctgtgatttctcaccttatgttcgcggatgataccatcatcttcttaagagccaacctcaatgaactggatactcttaatagatgtataatacagtacgaggattggtctgggcaattatgcagcaagcaaaaatcgggtgtttgtttttccagaaattgttctcggagtctaagagagtcaattgaaaatggcctcaatattgggagtgttcgaagtgatgagaagcacctaggcaaccccttccttttcagtcgaagtaaaagaaaggacttcaactttcttaagaccaggctttatgaaaggttggaagggtggagacttaaaaccctttcaaagtctgggcgtgctgtttatgtgaactcggtggctttggccttaccatcgtactctatgtccacttttcaaatccctacctcttcttgtagagatcttgatgctattgtgagaagattctggtggaacggatcccccgagagcaagaggttttgggctgctatttcctggaattctttgtgtcaaccgaagtagcgtgggggcctgggatttcgtagatttgaagacattaatcatgcccttctttccaaacttgcttggcagttagcaagcaatttggacaaaccgtggtgtcactcgtttaaagtgaaatattttcccagggagtctttttggagtatacaggagaaaagtagtgatagctatgtgtggaaaggtattcttggtgccaggaacattattgcaaaaggggcatgttctataattgcgacgggagagagtattgacatttggtggcagccatggatcccttggcttgaatatgaccaatttcgagaaattatggagggaatcaggtgtaaggccccgagtctcaaatgtgttgctgatctgttgtactgccaaaccaagagttggaacattggttatctgcatttcttatttggggaggaactggggaatcgaattgctgagattcaaattgtaaagaataatgctgatgacatgctcatctggaaagactcttcggttgggaaattcagtgtcaaaggtgcgtattgggctgaccaaaaggatcgatttggcgaatgtttgccgctttggaaatggatttgggagaagaatatccatccgaggctgggaatgatgatttggcgggcttgcatgaaaattctccccacgggggataagtttggctcttctagtaactgttttgtgtgcctcacgaaccatgaaactccccttcatctttttgctcggtgcaaccttgcttctgctctgtggttctcaggccccattcctatgagaatcgatcgtattcccggtgatgatctttgtgctctgttatgcaacctggtgtcatctctggatcccatgatgagagcgagaatgcttgtctatgcttgggtgattatggaatgtatctggaaacataggaaccaaattgtccactctaatggtgtccatcaatgtgttgactccattcgtctgaatgtttgtagaagatttgctgaatttgacccggcggttgatcaggtggagcagcctcccctgttgcgtcttcttgttgaatcgtctcgtgtcgctacggacaagtgcattcttgtggatggatcttacttgaaaggaaaatacggatgtgcgatgatctccatatcaaagaactcccaggattggtggataagtgcctctgctgggtcttgtcaatcggccttggaagctgagatgtttgcggttatgttgggcctgcaatgggcgatcaaaaaccagtgggatgacttctcaatcttgactgattctcgcgttttggtggaggctttggccgcgaaacaaccccctcactggaaggctgctgccttattctctaacattttgcatttgctttcttttttttctacttgtcatgtactgtttgctaaaagaactgctttaagttttgttgactctatggctaagtccatgcgactttgtgaaggttgctggcaggatgtaaaaggggagggattaccccctgtgaatcccgatcttttctgggttgtttaatagaacggaggttcttttaaaaaaaaaaccttataattagggttgttcattgcatcacatctaatatttttaaggctatttagatcaaatccaattatatattggatgttgaattttagcatccgatctgatctaattcatttcaatcacccaatcgatccaacattcattgaatgttgaattaaatcggtttcatttcatctattagatatatttcatgtatatttattggattaattcaagtttatctaatattttacacctaatatttatggatcgaattagattcatccaataatttagatctagtatttattggattgaattggataaatctaatccaaaaataaaaagtaaaattttaatgttaattttcatatatatacatatatttttttttacgtataataacataaaattaaattactcatttaaactaaataaaaatattaattagttcgattagatgtttgatgtattgaattttggatatctcatcgaaaacttgacgcaatccaatttgatattaaaaaagataacatctaatccgatcagatcataattaaacatccaatatttggtggtcgattataattagattggtcgattgtcattgaattagattgatacacacccataacataactttttgaatctaacaaggattcccttatataatgaaatcatcattatattataattccattacatcactttttaaagcaaaccaaatattgtaatgataattatgattttattatgattaccattataataaactaaacatgatttgtgtattaaaattataatataatgaagattacattatataagtaaatctccattatattaaaaaaaaaaacttatgtaataaagataacattacgaaaaattaaggtgccgttttgtaacacttttgttttttaattttttaatcaca

SEQ ID NO: 380926 - DNA, 2040 bp, Cannabis indica
gaagaagacaataagaagaggatcaagacgaagtgacgagaggggatcactttcaaaattgtcagatctttttgcgcaagtctggattgagatgaagtgaacatgcaagaatctaagttttgggggtttagggatttcaaaaaaaaatttgcgttggtagagggccttcacaattatatgtcgtgtctgttataaatgctcgtgaacattgtattcaatttttttaaaccgacacaatatgtaatgaacaaaaaaaagtaattttcactttattcgtcaattttcttttttatgtcattttagtaaatgacacgaatcaatattttgaatgctgtttaggaaccgatagctcaatagattgggacactattcatgtcggtcgatgcaatgaataattgcgttgatcgacttgaatagcattttttgtagtagtatgtatttactatcatacccttgtatatgattagaacatatgttataataaatggtataacagtaattccccatggatatgcttaaagtaaaaaaaaaaacacttcccgtatttaatgacaaaaatagtgtggccggttgttgctgaatgacattatgccattttctttctttacagcattaacttcctcccatgctcatcccctccaaacatcagccctcctagaatagtattcaacaatataaactaaatatgtgttcaatgaaatagccacaaattttaccaacaatattgatttttttgacattaactctacttacaataatggcacttcattttaaattggtatttcttgtagaatttgtcaaacttgtttcattgtatgtaacccaacacaaagacaaaggatcattaaagaattaactcaataagggtacactatgacaaagagtcaaaccctatagtgtttatagactttaattatttcaatctccaatggccaacaaacaaagctcccaactcttttgatgggctctcatatctctgggggaccatataggacccgaaaacttctttttaatacatatacaaacacataatgtatttttccgtttgccaattttaaattataatttcattgagttcaaatagacacccatatacaatgcatattccccccaaaaaataccattaaaccccacttcaatttcttccccttttctttatcatatttttttaataaaataaaaataattaaaaaaccccaataaagtattaactaatttgttgttgttcttaaatcatgcacaaatggattggcttaataaatggatttgatacccaaaattaagtataaaaaaccatagattaaggccaagatcctttgcaaggaataataaagaaaggataatagtttaaaagaaaaaggtatggaaaaaagtcatgaacatggactacagaagacaaagcaggctctgttataaaaaataaattatatatttataattaaaaactcaacaaaaccattagtaattaatagattaagtgaacaatgcaatctttttttataacctatttattcttatctattattagcaaacatatgtatgatgacgtaccgaccaccagctctagataaattataatcaaagactttgtataatgcatgaaccgtgtgcaaattgttaattagctttatacatatatacatacaatatatagttttatatgtacatataacaagcttttcaaagttatcaaaaaagaaagaaaaaagaaaaagtgcaaagccgtgtcgaccattaagtgtttgaataaataactacattaaaattgtttgttactaattgtagatattgagatttggtaattactaatcatggaaaataaaattggcctactaaactgattacaattattaaacaaaaaatctgtataatcatccataattttttttattttgtaagagtataataatccatcattgatgtattttaaaaaggaatgtatcataaaatatatcttcataatacgcttatatacacggtgtttataaaataggaattttttaatattatacttaaaattgattttaattataaaaatat

SEQ ID NO: 380927 - DNA, 3470 bp, Cannabis indica
attttttatagaacaaatggaaatgcaatataaaagtatgacaaaacattagtaagtatattaatttgtatacgaaccatacaaaacaatccgaccttagctcagttggcagagcggaggactgtagttggtaattatcaaatagatatccttaggtcactggttcgaatccggtaggtcggaaattttttgtatttattttttctagataatattatatttattaagctaatttcttaccaaatgtgagttggttcctcggttcaaagaatttctatttaagtaaaagtaatattcccttttttctaattagcttttgcgtacaaggctttacattatgattaaattttcttcacttaataacactctaattctatgtttttttaaggcaaatgtacgcaagcacaaacattttggactctggtaaagttcaaatattacagaggataataaaaatcatagttttgtgtatacgtaaatatatcccatgtatgattaatataactcgaaaaattagtaaatatcccaaactactataatgatcattcattgatatctaataattaaatcgtactattatataacttgatcaatgtacatgcaaagtctaatgattaattatagcaagaatcatatataatatatgaatatacaatctatctatttttaatttaaatgaaatgcatttctactataaggaaactgaaatgtaaaagtatttttctaaatataccttatttatatatttgtctatttcttcagagagtaaatagaaatgcaatataaaagtatagaataagattactatatcaatttacatacgagaaaattagcaaataccgaccttagctcagttggcagagcggaggactgtagttggtatattccaatagatatccttaggtcactggttcgaatccggtaggtcggattatttttattttttttttatttttgatgccattttttccagattatattattgtatcaactaagttatttcttacaacatgtgatgaaaaatacgactttattggccaatggctattaataatttaatattatgaaacaattgcttccatgaaattattatgttgatacttttagggggtggtttttctttttctttgtatatgttggtttttattgtggttataatggacatttactatttgtcaaaatgtttagaataatttttaatatataaaataaatttaaaataattaaattgtacacatacaacttattatttaaatgtttcgggttaataatagggaaaagaattacgatttctcgatcttaaatttatagctatcgaagctactgtaattcgatgatctgtgacatagttgaatgttttagtcttgtctgtatgatcaaattttgtttcgttgttggttcttctttgttttttaaaggctcgtcattaaattattgttagtggttaagaaaaataaattatttgcgactgaatgggttgttaatagtgcaattatgtattttgcataatagttgagtgttcaacctacgagactgaatgaagctccaacagtttctactgttgtgtcttctgagctatggatgaaacagaatatgtgttcttaaaattaattgtgacgctctaatttttttcatctaattttattttaatttttttgtcaaacaatctgagaattagaccgtcgattaaattctaatcttaatagtatctccaacaaagagatatcctaattaaattgcatcctatcattttaactaattgacattaataaaattcaataatttattcaaaatatttaaattttatttttcacatcataagataagttaaatcatagatatgctcagtatagacaaaaatcctccaatgaccgattgggataatttgcaatcgatcaaactagtgagtaacgaacacaattcaaaaaaatattattagtaattaattttagtttaatcaatattaattaaaaatagagactagagatttcgattaccatttgctcacctaaacttctttttcctccaaattatagaatttacaaaaccaattgcttcaaaaacttggtaccatatttgaaaaggagtctaaaccaacaaccaatttgtatctttattataaaattcagtgagtaaaaaagagtagtgcaaaatgtagtaaggtgtaatagattggtgattaattttaaaggtttggagggagttactagttactaatatttcccattcattaggttaggtggtgggaaagggaatgttaataagaaaagactccgaattggaattcgccacgtgtaaggagtccttcctatgcatatgctaaagttaagtaaacatcaatctcccttataaagatgatcactaggaagatacaatgtgttcaagtattctaaaactctccctctctatctctctctttctctctcccacaaagagcctatttgcctctttttcatgagaaaaagaagatttttttgtgtatttttttgaattcccacccccatccctcataccctctctttggtttttttggtttttttttctctaatcaaatcaccaaagtgactgtacatttgagccgggaaataaaccgcctacttggggcttcgctgttgatgcccttacgatactttcccctgtaccttgcacagtccattcatttctgcaacaaagaaagaacaaaccgaaagaatcaatcactgatgcagatattagagagaagagagattgagaaatgtcaaaccgaaaatcagaacagaaacattaaaaaacttaactttacatgagtttttctattggattctctcattctaaacattttcaactaaggttttctagttctttcattcatgtcgtctctagacagcattcgtaataagcaaaggaaaaaaaaaacactttcaaaactactacaagcatagggaaacaaatagagctaaaactcaatacaaattctacattatttgaggactagaaacctataacaagtctgtgtactttaatgcatgttgaagcaaactgatcatttgagatacctatccttcttggtcaaaatatgtaactatttgggctatgttttaaaggagagtttagaaggtttgatggagagaagagtcgagtaaggaactgtaggcgagctaaaatccttttgtttggcgaaagggattatcagcggtagagaaaaaggtaagaggatagtaaatccactacaatctattctaacattttaaatctttctatatgtactctccttcctagttcgtctaaaattatataaataccctattagaaaataattccaagaataatatagcaaatatggagagtaatcaatccttgaaactctccataccctgtattaaaaaaataaaaaaatgattacaatactccttttcatccttctcactccactctaccaaaaacagtgttaaggagagagagagagagagagagagagagagagagagaga

SEQ ID NO: 380928 - DNA, 680 bp, Cannabis indica
gttgcagtgtaaagtgaagccagagaggccactctacaatgggggtattcttaataaagagaagcctagggctgttggggaatatggaagtgatgatggtttctattcacctgcgttcatacttcgcaacctaactcaatccaccatttactgcttctccagttgagtcttccattccatctcttatttatttccacacatttctttcagttctcaaaacccaaaataataataataaatcgtaaaaaagaattccgttgccgggacttgaacccgggtctctcgggtgagagccgagtatcctgaccaactagactacaacggattagtgatgtatgcttgttaaaataatattattctcaaacttttgttaattaattatttttaaattttatacttattttattatgggctattaaattagagggattatttgttaattctatactaaaaaagtatataaaactagaggaattatttgttaaattttctaaatatgggtatattagttgaaagttaaaaattaaaaatcaaaagggcaaatgttcttaagccaatagctcacttactattttcgaaagaaaaggggagctgagctcacttattgcacaacgcacgaggaaagttatacataatgaaaagactaattagcaattttttctcctgaactttgacatata

SEQ ID NO: 380929 - DNA, 5872 bp, Cannabis indica
aaaatcaaaaaattcgtaaaaaaatatttacaattctgtaaaaccgtatttttgtaatttttttattgtttttgtgtatttgtgaaattattccatagattaatggtaccaaaatagtattataagaaaagccacaattaatgggcccaaaatggtattataggattttagaaaaggcctcaaggatatgggcccaattaatatttttggtgaatttcccaagaatttaagattagacaggccttgttatttatttattattattattctttaataaaatgttattatattaaacaaagactcataatataataagcataagagaatgaagaatttcttccaactatgaacacttatcatctaccgagagcatacttaattaataaatgagtagtattatttactgatttataaacacgagagatctgcactttaagaaaattagataattaaagaaaaatgtttaataacaaacaataaaaattataaacaaatacttcggtagactactattctttaaccactaagaatcaatctcaatataatgaactgatagttaaaagtttttaagccattgtagactatgtataagagtcattgcttctatcatttttttcattcaaaaacatagcagtgataattataaaccatctattttttaatgaaaataaaccatctatttagtaccaactcattaatttcttcttcttttattttaaagtcataaacaacagaaaaacaaaacacttgtatggtttactattataattagcaaaccatagaaaaagtggtgcatgcatagcaaccacataaaaatgttacaaataaatataagggtaactattattttagattttgtgttttgcaaaagttattaattacaccctttattttgttaaatgataaaatgaattctgtattttttaaaattatacaaataggatcctgaacagatttttttgtactaaaataaaacttaataataatttaatttagagattttatgacaaaaatggttacatttttttttgtatttgttcggttagaaattgtcttaaagttagttatattaaaaaataaaattgttgaaaattgagctcagagtcatacttttactattttggaaaatatatggtatgttttgtcatttatccaatatataactaattctaattaatgtatgaaaatattatatacccagtgaccttcacatggctctttattgttaaaatagtacatctcaatttaaataaatatgattcattgaaaagaaatattatgtgattgtatttaattttgaaaattttaagaaataggctaaaaattttaaaacaatgacaaaatacattaatatagaaaaaaaattatttttatgctttgaattcttttattaacaaaaatacatttttagtaaaaatagtaaactatatttttagttgttttatagttgtattacaggtttttttataatttatttatagttatcgtgagtttgatttctcgttgtcttcttactttttgctgaaaaaagtatagttttgtatttttaaagctttacaagcgtatttttgaaaataaaaagtttaggtcataaaattgtaaataaaacattaaaaagatagtttgaaattttttgtggtgtggtaattgtggtttgtatttaataattgcggttcaaactgcaccgtactatatattacatagttaccaatttttataatatgatgtttattcttttttcataaaagaataaataaatatatgtgtttattaattattttttagagataattcaagataatgactttataattagtgtatatattatgatgttaaaatttaataatatttttttgtattgttaaaatttaggataaataccattttggaccctgtgtttacaaaagttatcaattggaccatctgttttgttaaatgacaaagtggacttgtatttttcaaaatggtataaatagcaccatgagctaaatttttgacaactttttttaatatgaccaacttgaaaatacgaacagatacataaaatgtaaatagttttgtcataacacttttagatcatattattattaaattttattttgacaaaaaatcaattcaggatcctatttttaccattttaaaaaaaaaaagggccaatttgtcatttaacaaaatagagggtccaatcggtaacttttgcaaaatacagagtttaaaatggtacttaccctaaaatttattagattgatttttagatttttattataatgatgatagtgtaaactgttcaaagtgcactgtatttttcacggtatattttttgcagttttaaaatcttgcagtacagctgcagtttgaaaaattataaaatcactgcagtttggtttgaaaacagttacaaactgcaccactcgtaccgctaaaaaaaatattaataaaatgttaaaaatgcttaacacgtgagcaaagagtgggggttacatgtgatttgttgaaccaaacaaaagtaagactcttgagatatttacctcttttagtttttgttttgaattttacaaatacttttctttatttttcatactatatatagtcttttcttaaatagagaccctataatattcctcattcacagaaaacaagaagaaaatatctatttgtcttcgattccaaatatttagctggatttttattttattttatttttggccattttaagtcctaatttttgtgattacatatatgtatttttaattacataattatgtcatatataacaaaaaggtcaaaatgcatactttttcataaagatatagtgtggtcctatttttctattttttttctttgcttaatatcaaagaattcagatttttgcttaatatgtatgtaaatcaattttatttttatttgtacaacctaatttaaataataattgatatttgtcaagatgtttaatttgacttttattaaactaataaataatctcattgtgaactgtttttaactacagcatagacatatatttttttagcaaatttttacattttacatttacactaatttttcaaaaaattaatatcaacttctattacacgcgaaacaccgagctagggttactcggagacccgaagcgctaggaaaaattaatgtctctttaggtgttaatcatacttaaattaattctcaaccctctttaatttctcattgtcgcctataaatagagcatgaggattcgctcgtacgcaaagttggcttattttttttttgaagaaaaacgttcatatattagataaaacgataactagacctcgcggtcattacaaacaaggtgtttagggatcgagagaataggaataaattcaaatctctggtgggtaaacgcccacttagccacattatggacagcaaaattacaattcctactaatattagagaaaatacaagtaaggaaaaaggaagaggatctaatacaagatgagacatagttctcaagctcccacctggactcagtccggttaagagcgttgataactaccctcgaatcactttcaacaataataaacttaaagccataagtcttcgcaaagtccagcgcagtgcaacaagccgccgcttcaccacataacgcgtcagcaaaatctaatttagaagtatgaacccaaatcaccttaccaagatgatcctttgcaacaacagcagtgcacatagtgtccaaccccaccttaacatcacagttcagttttatccagtctattacacaaaattggcttaagtattaagtagtttccgctattacacaaaatgtgattttttttttattatatatacataaattaaaaatttataactcaaagtttaaaaacaatcttaaaaatataaataagctggtaatagaatcttgtcttaatgtacaagaattttttttttctaaatgcatggccgaattttaatttgaagaatatataattagagccgaagctttgcccgagttgtaatcctaagatcacttgacgtccaatgcaagtttaatacattaatttgtggattaaatttcattaacctctgaactatataaaaattttaagtatcattcctctaacaaatatttaataaatcttttttttattggtcataataaaaaacaacatatatatattatctataaaaagtattacttaatataactgagatcaatttaatgataaattttaataattctttaacaaattataacacatcaatatctaatatttttatagaatagtatatacttctctttgagattcaaacaaccatgcatattataaataatgacctatatataactatttaaaaataaaaatcatgtatacccgtgccctaattgctaaaacttataaataatataatttttacatatttttatgtgaaaattataatttataaaactcaaactttaattcaaatagaaacaaaatttcatcatcatatttttcgtacagtttcagactctaataaattatactacaaattaatttacagttttcttctccaatatattaagttaactaataatatttacttaattatatattagacaaatatttcaataatatatatattattttcagggtcggattttttctttctttttttgtaatgcatttatgcatgcccattcagatattggaaacgttaattaagaaattaattatatgattttattgatcatgaccctatagagctataataaggctaaataattcgtatagaattaaacatatatattgaacagtatttattaatacatatatatatgaattatatattaatatatatagtttgcatatatatatataactaaacacatttatgtgtagattggtattattttcaaagttttttggcccttaaaatagtaattagattagataagacaggaatttggtgttttcgtttataaatgtgcttaattatgttatatatatttatatagagatataggcttttggatggttcaatagacaaaattgaactgtaattacacaaaaacgttcagccgtcttataattaattataatttgcttccattaatttatacattaattacgtacgttacctctcttaattctccatttatataaatatataaaaatataatataacgtgtaattcattccatcttataattaaccaaaaataaaccctgttcaattacatcaggttcaatataattatgacagcgtgctatatatatatttcaactcttagatttttttttacaaatatattgaactctatatatagtgtaattatactgctaagattattaattttaatttcatgcaatttaaacattaattatacaaaatacatattgatgcactgtattatcttttcaatatgtaacccaataattatatatataatagaatatattgtacatatgtttaacattttgttaaatttttaaaaaaatttacgtatacatccaaaaattacacttactagttactaaactcatgtgacatatgtatatatatgacatattttttagtcaatcatattatgatctagtgaagataattaagatctataacttaaaaaagtattgtatcgatcgatgtaacattttggtacatattttgtgtgtggatgtggagataaatattattactctatttaattattatataattattcgtaatacatactatcatattatatttatatatatatatacatatattttaatactcttttcatgtcattttagattttgtcaagttgggtggtgcatgtttaatattggatggttcaacttcaaaaatttagtatttgtttttttttttattatcttttatatattaaaaagtgtctatctaacgacatttct

SEQ ID NO: 380930 - DNA, 5824 bp, Cannabis indica
gatttgataatgatttttaacacatgacaatcaaagccacaatattacaggtcttttatttacatacttggatatggttctaatgaattccaagttcttatatggcaaagatggtgtctcttgttttctccttttataaaacttgaattcttcatgaatttgtgtgggatcttaacacaaggcataaatgagtaatacattgttttctacatgatgctcgagcttccgagaggctcctcccacgaatacaatattttgataagctcaccatgagccatccgattaacaagaaattatagcgcacatgactacttgcttctaactaagtagctcaatggtgatagccggccaaaatcgtacttgagaaatagtgttcgaggttgagatttgatgtacctaagaaaaaaataaaaattattggccacttaatgaaagaaaaatgtgatattttttttgatttttgatttttgaattttttttttaaaatatggatttttaaaaggaataaaataaaatttggaccctgcgctaggtgggcttaggcgtagacctagcccaagattttctagtgctagtgggagatgttccgtacctcttttgtcacttgctatgcagcgcaaaactactttttactcaaaatataggcctccctttcaggagtaaatactaagatatcaccaagaatagataacgactcagataactttataagatcaaaaaaaaaaaaaacaataattacatcttgtcagcttgtgatacgaccatattgagatacttatgagtctcgaatcgattgagactaacaagaaaataatggatcacgatccaagataagataaatatccgagatgtgtgtgcatccgagataaaagaataatctcaggagagagaaataatgaagaggaaagtacatacaattttcgatataaacaacacttcgttaagggccgtatggcacaatttttaaagaagttaaaaattagttttaaaaaaattgtaataaaaagatatttagtaagctaaaaaaaaattattgaaaaatttatgaaataattacagctaaaaattaaaattggcacaatctaatttttagcaaaaacttttttaattaaaatacttaataataaattattttatgctaaaaatgtttttaattatttatgatatattataaaaaataaaaatattttttgaaggaaaaatatttaaaataaataatatttaaatttcttatttttattttgttttaaaaaaatattttatatttatatttatatttttattactaacaaattacatataaactacaatttttttttttaaaaaaaatgctaaaaatataatttaaaaatataatatattatttatatcaaatgcatataaatttcatattatgggagaaaataattaaaaatatataaaaaaaataaaatttttatttcacattgtacaatttgttaggatcagaactttcgagacaccttcgttttctctaagagcatgcttacctcgtcaatatcctcttcatcttcctctaatagcagtggtcatcatgaccatctccaacctttatgtttcccaacacaccttctcgacccttcgcaatgtcatggtggcgccgcatttatggcgatggacacccaacgacctcccttcaaatcgttgaggtcagatcctattcgaaatcaaagaaatttaaggcaagcgtggatcaacattaatgaaagttttgtaggtttgatcttctctccaagtaaatctcatgataatctccctgtgtatttaattttttgggtcttttcaaatcctaagcttgttcttagattaattactgtgtctaccaacctggtctgtgagttgatttggataatcccccacctgaaaaggcaattaaatgctatatgatcgattttctcagccactcgatcgagtatacctagttcttttatcttagtctatttaagggctaaatcccaggttgtgtttttttaccttatttgctcaaactttcctttcttttctgatattgttttgccaatcatgaaagacttagcccgttctttttctaacgccttgaagctaactgacacaaagaatactgtgcattctcttgttgactctactgatatccatgaaggacttccactagccctgcccttattccacctaatggccagtctttacaccataaaaggctttaaacacaatgcattgaataaattcttagaaaagtattagaagggaaggttccctatttgtgtcaaagaaagatcaccaaactccagcctgtacctcattgccttccactttgaaggtgataggtgaagagctatcataaaccaaccctagatttttgacaaattcccagtcctattagaaataccagactctgactccactcttgttcctaaagttatttgtaagatcccattatgggtctagatacataacatccctttctctcgaagatccatatctttggcaagactcgttggccaaattgttagagtcttgttagagatacatcaaccatcccccctcaaaacttggggttcttacttacagatttgtgttatgttcgatgtcaccaagcctctcgcgaggtgtgttcctattctctttcctggaatgatctctgcaacatggatggagttgaagtatgaagatttcccagaccattgctactactgtgcatgtcttagccacacttacacagggtgtaccgattatatgagagatattgatgagtccccacacccgcactgctcccatatgagaatgtgcttagaccaatcctcaggcctaaccaaagaccatttggattacccccttactacaatcagccaaggctccgagaaattccctaaccaaaccaattcatgcaaatgccaaaccaacacgttacagacattaccgcccacaatgcgtcccaagggccacataaccagcaggatttctctctagcttcagggtagggatcatacagactcagctggcatgttcatctcaagccaagagacccctaaaaccaatatcaaccctaaaatttaccccaacaacctccaaccaacacccccaccaaactaacaaaaccaaacacaccttgaccccttttttactaccttggtgtcagttgcttctggaggttctattaaatgctttgcatccttgaggcatacctcttcccctagctcaagaagctccacttccctaactgctagtcccatcaatgtgcccctattggtttttaattctaacccagcttcttattccattcctaactttgttattgtaggagcccccaatccccttactttttctgttgaaagatttgaaggcccacaaacaagactgtgacaaggaagaaccagcagaccagtggtgttggacaactagctacaatgggaaatgatcagagagagttgatgaaaaggacaagaagccaaccacaacacaaagtagtggatgtggcttctagtgaagaggcaggtcttattgatgaataggcctgcctacagacatgattgtccttagttggaatactcgaggtcttggaagtgatcgagcattcttaaacctctccctgctggttaagatgtacaagccttctttgctctttgtcatggagtcttgattaagtaaggggtttgttgatagacttaggaatagactaggttttgctaatggttttgatgtccctcgtgttggcttagaaggcggccttttatttttttcgactatggatgttgatgtattcatttttattactctattaattatgtttattgctatgtctctggtgtcaatttttctgatttttattttactggttttgatggagcccatactccttcgaattgtgctagcacttggaaaattcttcataaaatttctcattcacgtgcccttcttccttggattattatgggcaactttaataattttttaacttgggaagataaaagtagtagtaacaacatgataggaccttctgatcactttagagatttcatggctaaattttatgtctaggttattaattttaagggtcctcgcatgacttggaataacaacaatgccaaagatggtgatcccaagtctgtgaaattgaataaattagatatatgggtacaagtgcatggtctatcctctggttttatgacagagcgcgttgttaaggaagcatctaagatcatttgtatgtttgtggaggtggatccaaaaaaccgtaatgggctttggcgtgattatttacgagtacatgtgactgtgaatattgatgttccactgaagagacgaatgaggatgaagaaaatgggtggggattggttctaggctaactttaaatatgagtttgcccctactttttgctatatttgtggtatcattggccatacagaaaacttttaccataagttatttgataccccagaggaggatattattaagccttacggtgagtggatgcatgctcaacctcaacgaaagaatttttttgcttagttcacaatacgtgcggacatgcttagaatctgatggtcgttttttcggtaacagaccaatgactgaagatggtggttctggttgccggccgatgaagcgtgatggtgacgatgattgtggaaaatagaagttaatatgtatagaagattctaggtttaatgtgcattcaaatttgcctagtggtcttcctggcgactcgggtggaatttaaaatgataaaattatggatctttaattagaaagtctactattatggagaatcatgtagatggagataatatgattatgatacaacatagtgataagcatgtgcctcatgggatttttgcagattctaaaaggcgtaggcccaatgaagtagagaatgtggatggtgggccttttgacatggaagctgaagttgtaatgatgaccactggtaatgggctcgaaaaaaatgggctcgaggtaggtcctaattttcaggatcaccggacattatgagtatcgtgagttagaattttcgtgggcttgagaacccatgagctgtccaaatccttaaggattttgtaatccaaaagaaatccattattttcttatgtgaaactcttagtcgtaaggatgtggttgaaagactgtgtgtcgctttgggatttgatggtctttttacggtggatgcttatggtcgtagtgggaggtgtttccttattatggtagaatggaggtaatgttaatttactttggtatgctaatagctatgtggatgtggaggttgtttctttggagcagggtatttggtggctcaaaggcctatatggtcaaccaaatcataatgctcgttcttctacttaggatcagcttcagtttcttttgtaagcttctagccttccatggtgtgtaatgggttatttgaacaatgttttgtctcatgatgataagaaaggaggactttcctatcctaattggttgattgaaggatttcaaaatacaatttttgattgtggtttaattgattaagagttaattggaaatcaatttacttgggaaaaaagtcaaggaatgaattcttggttggatgttcatctcgatagagctcttatttctagctattggctccaattatttacagcaactaagttgtataacatggagctgaatgttggaattattttatcaggatcttagatctactcacaagtatgttgattaacaacctaaatatgaacttctaaaacgaaattaattaaacacatataaagtatgagaaaccttacattgagtgcagcggaataatatgtctcctcccactcagatctctaacccttgattcctttctgtcgca

SEQ ID NO: 380931 - DNA, 4335 bp, Cannabis indica
aatgaatttgtaaaatagttgaataatttaatttgaatgacaaagttataatgctataactaatttttttaggggaaaactaataataaattaaaataacaatagtaagaaacaaggcaaaaatagaaacattgaatatgaaatttagggtatttttacaatgcatttaattttttttttatagtcgtctacgttatagttatttaagacatattgtaaaaaatttaacacgctaaaaatatagttcaaatagtctgttgcacacaaggttcttttattttatttttatatatatgtaaaataaattgtttaaaccttatttttgacgtgttaaatttttatgagtttttcaaaattttgcagaatatttaaataactacaatacaaacaactataaaaaaattaaacaaattttttcttttctaaatactgaaatggatagagttgtatcggtagaccccttttagggaatgcattgtataattttaaaaatttaaaaatagagtataaaagagtgtgaatagagtctcttgagcactcctcttcttctttttcttcttcttcttttgactaattatgatttttgtcacttaaattttaatatatactaaattatgctcttaaagttttctagtcgttaaaaattactgctgaactattaagattgttggattttaaggacttttatttaattttatttaattttactaattcagtgattgtttatgtactaaatcatgcttctaaattttgagatctatcaaattatgtcacttgaactttgccatatatcaaatcatgttttctaaatttttaataaccttaaaagttcaaaaaaaaaacatgatgagacacttgttgaagttggagagtgaaaaatcttaattagtttttttttttaatttattttctaatttttgtttgtttggttcattggagaaagaaaaaggatattccaagtcagcaatcttaaaccaccaagtaagggttacatatggaaggacgaaacacgtcatgagagttttcatcggataaaaagaggaccccattcccacacatccacactaactaaacgacaaaataagtttagctaagtcaacggttcagataggcaatgctgataggtttaccatacgctaaaccatacactcgcatgcacaggattccacgtctcagaagaatcagatatctacttgcagatgtacgctaaagatttgtttcagaaagactttctttagaggaagaagaaaatgaagatgaaagagacaagagtgagtgattattaagagaaccaaactcaaaactcaagagattacaaaaaagaaaagaaaagttgtcagtgtaacacgccaaagtaaaaaaagagtgtagagatagagtgtgtttgggtgtataattaattactatgaagacgacttctgattatttatcagtatatagatttaaaagttttggcagaaaaaggtaattatgtattgaccgttacatcccacgcgtccaatccctatttcttttgttctcagctttggtcagactaaaatttactccccttctttaattactgtcctatctttggaactagcccatatcgtatattcatattacatgtacttctttttccttctttaattctttttataattaatatcattgcattttagtcttttgggtttgtttgatttttctcttaataatataataatctctctttctccggtaaaaacaacatgtcgccggtggatacaaacaagggctggaatggtgtgcaggatatgaactatcctacgccacttgcttcccatgatgatgttgctaaagaccctattgtgttttgggatactctaaggcgttttcattttctgatgaataccaagtttatgtgagcaaaacctttcatcttttcttcttcttttttagtttacctttacttttgggattttcccactattatagtaataatagtatgtagcttagatagtgttgtacaaagattctttatatttttttaatgttgggtttttttttttcaattatttgaagggttcctgtgattggagggaaagagctggatttgcatatattatatgttgaggttacaagaagaggtggttttgagaaggttgtcttgtgcccccaacttttcactattactattaataataataataataattaagtctctgtcctaaacatgtgtgtatatgtatatgtatatgtactgtaggttgttgcagagaagaaatggagggaagttggtactatttttatgttttctccaacaacaacaagtgcttcttttgtgttaagaaaacactacataagtcttctttatcactatgaacaagttcacttctttcgcatgcaaggtcctctgtgcagcccttctggtaaaattttcactgtattgtttttgttcttaacttctcttattttcatttttattttttaaaaaaaccaactttcattttctacttgttattgttctttggtttgcagttacatttccagtttgcagtcgctcgttcaaaccagaattggctatagttgaatattctcccaaatccattaacgattttcctatgaaccaggatatagaaggtaacaaagcacttcattcttatatgatacattatttttcaattttttcaagcagattttatagtcttagcttgtgtttgtgtatactcttttttaacttttagaattagaaaaaatccttctggaggtgttagaataaagaaaagtccttttttagtttaaattttcttttggaagttggtaaaatttgtaatttctttcaaaataacttttaaaaaattatttttaaaattaaataatttacattattcttaatttactttaatgatattcaaaaattttgaaaaatatttttcaataatttcttttatataatatttattgaaacaataaaactaaatcaaaatttatacttatcttgtgtttctacattactttttttttttacttttagtcgtaacaaaatctgtaacaaaatctgtgactaaaaatgaaaaaatgactaattataaatcattatttctatcttgtgactcaaaggtctgtagctagatgtattagtcacaaaaattataatttgttattattaaacgtgtttttaataataatatttattgtgattaaaattaaattagtgacatcttgttagtaattttttgttgtgactaaaaatcacatttaatcaaaaaaaaatttatgttgtgattaaaagattgtcattaaaagtaagcttttgggttttttgttttttcaggtataggaactattgatggaaaattcgactgtggctacttggtgagtgtgaagttggggtctgaggttttaactggagtattgtatcatccagaagaagaagggtgtggtactagtggtagccctgttgttgctgagcctaacaataatgccatagtaccttacaccggcaaacctcgccattctcgtcgtcgtaaaaggaagagtaaaagaagaggagaccccaattatccaaaacccaataggagtggatacaacttcttctttgctgaaaagcattacaagctcaaatccctcttcccgaacagagagcgcgagtttactaagatgatcggcgagtcttggaccaatctctccccagaagagaggacggtacggtactataaattacatgtttcgaaaaaccttatttgttatcattatttagtgttgtttgtttgatgatgtgtgtaggtttatcagaatattggtttgaaagacaaagagagatacaggagggagttgaaagaatataaagagagcattaaactgaggcagcagacagtggaaactagttaatggaaactatgttagctcatgtatggagtgtaggtcttgaactgtataaaagagaaaattcatataaagaattatggacaagactactctgttttgagatgtacactttatgtagaggttgtaactttggtgaaattaaagctcaattccaaagagcacttaccaaatcctttttgggctttcatgagatagtggttgtgtttagttggaggagatgaacatggtatgatttacataaaaagattagggaaattttcaaaaatgcacgaaattaagaaatacttaacaaaaatacagttacacggtaaaaacaacttatatacggaaactataatttaatttacacatgatatggtgtcaccttcttcgacaccttgaccattagcgtcccaggaaaaaaaaacagagcaaccattgatgctcgataaagttttctgaaacaaaaatttaacaaatttcaatgaaaaatcaacaaaaaacttacct

SEQ ID NO: 380932 - DNA, 6413 bp, Cannabis indica
ctaactattgagattgttagatttaaatatttttgctcaattatattaaaaaaagtctaacctgtatgaaaattagtagcacaattcaatacatattaaagttcaggggtataattttgtaaatattaaagttcgggaggcacgatttgtatatggtcaatcgctatattagcaaaattaaatgaacttagacaaagtctttaaattcaacaatcccaatagttcaagaaaaatttttaacgacctgacattcaagagcataatttgatacatgtaaaaattttgaaataaaaaattaaccaaaatatatattttatatatatatatatatataatcgatttagttttggtttcattaattcattggattgtctttggtggacccagattgcaaattgagtcaaacaagtcaggttgattttcaatccaagaagaaatctcaggccaaaaagattacaggttttcaggtaattacaataatgttataattttaatttatttcttcttttttttcaaacttttatcttacacccaaaagtggtataaatgaaccagttttctcccacaaatccatctgaattgcttgttacctctgctgattctcgggtaagaatagtggatggtgcaaacccagttcacaagttcaaaggtacctccattactcttactcagttatctctggccgaatgaaagagtaaaaggatattataattctaactcatttcttttgatattgaacattttatataacaacaaacaggatttcgcaatacaagtagtcaaataacagcagcattcactgagaatgggaaatatatcatatctgcaagtgaagactctcaagtatatgtatggaagcgtgaagaggctaggcaaccagtctcaggaagaagacccgtcattaacacaagatcatatgagcatttccaatgtagagacgtttcagtagcaatcccatggccaggtaccatcaaaggcgatcccccttctgtcccattacatcattcaaaacgccactccaaacgctattcagcctcaccttcagctcctgagtcacccactcgagatgaagtctcctctgctgcagcagcagcagcaccaacaggtaatagcaaacgacatttaccaccattgcccaagaaaggtactactggtgcctcttcgtcgttggagaacaatcagccagaagaggagcttggtcaagtttctcaaatggaatgtggctatgttggagagtccttcaattccgaagcagagacaataaggtatggtgattcaccatctatatcggcatcaggtgcaacaccatcttcctcatggtcttcgtcttggccttggtttgacattggtggtaaccatggaagtcaaagtatccaagcaactgcgtgggggatggttattgtgacagcagggctaggtggtgaaatcaaagcttatcagaattttgggttgcctcggaaagttggtcgacaaaccagtctttttggaagccaagcatagtgattagtgtgtgcaacaagttctaggaccatacacaatacagcaacatacacaacacaatactctcgtgttttttcacagaaacaattgtagagctagatattcaattaaaattatataaatgtaaatcatcattcagttcagtctattttttatcaatgaaaacagagacaaacatttgtcctctgaccacagctcaagaaactcacaagtaaaaaccaaataccccttcttctgacctgaacttggctaagttatgcaaagaatttcttcataatagttcgagggttgcaaaaacttatatttgctaccatacttctgttctgcgaggaaactgttcttcctaaactgaaaggagcgtgatatataatagacataattaagattgttcgtctcttccttccatggccaaaggagagacaatattttttttacagtgctcatagacttgttctctcaaaagataataaatagccttaatgattgttacatatagggatcacataaggatctggaaaaggagaactctagaagcattgctgctgcttcaatctaaaataaaataaaataaaaacaaagcatgaaacaagatgcaacaatcctcgtatatgcttagcaaatcgagatcacgctaaacttgtattcaaagacttgtactcacttcccccaacaagatccaagcaattcccttggaagaaagtctgggagagttcatccgctggattgtcagcattactcttaaaaaaacaaacatcacaagcttcattttagggcttgtcaacatcctcactcgattcagcagccacttttcctgaattgcgtccacccatcctcccaaatgagcccatagctgataagctcttgaagctgctgctaccttcactaaaattagactttcttgatctcctcggctttgaaggactactttctacttctctctcattattggtgttgatgtttgcaacaactagttggctaatactgcttcggcagaagggacacaatggggctgcagcacatgttgccattaaatggggtttcttatggcagcacagggctagtaagcagtgagcacacatttgatgaccacatggtctgatctcaatggtgcacagctggtcaaaacatatgcagcaaagctcaacctcgctagcctgtttcaaatattttccgaagttaatacaaaggaaaaattattttttttttaaataaaaggaatatatataatattttttggactttccacttaggacaagcatctcaagagaaaattttatccctctgttttactaattaaatgaggaaaatataaaaaacagcaattagcttcataaacggataaaccccaaatgcataagagaaaatccttaaaaaaatactggtataatatttgctggattatgtctagcttgaatttggtaactgtttgtataagggtacagattttctgctatggatgtcaacagggggcctaaaggaagaattcaaacgtattcaaatgcctttaataaaatactaactgtcaaaaaaacaaaaaagaaagggaatttagtacattcacacactcctaaacaatattcaaaaaagacttgcactaaatttgattccaagtaatcagtgttagatgatttcaaataaaagcagaaagagaacaaattacctcagagacattatcatcaatctcaatatcaggattcaaaggagatgattctgagactgcctctttcaatatagctttctctctctccaaattagcttccattaaggccctctctaacaatgccttcgcatctggattaagctcactgatgaacttcaaaggagatggccatacaagaggctctgctgctgaggggttcagcaaagctgcacaagcccgattcttgttcttcaaagcaactgtaaatggtattctcctgcgatagttgaatagaacattactatacaagtcatcctgcataaactagtccactctccattgttcctaatctgagtacttagttttattataaatttattttgattttacttatatttagtttttggtggggttgttacgaaattgctttcaatggcaattttttctgcttgaattaacaatggacaaaaacaaagcttcattttttatattttttatatcaatgttaagtctctatttaagaacaaaattcttttactttaaaataactaactttatcacaatgttgagataggcaactgtattttcatcttaaggatcccctccaatttagagcataatgtgcaatcatttatgtatttggaattttggttcaaagagggtacccagatgagtctagttgaagcctatttgctccccatgcaagcaactcacgaacacactccaaagaacctccacgagcagccaagtgaagaggcgtacttcctggatagctgcaaatggaacttccatcaatctaaatggatcatggaagatcatcacttgataagataaaacatccgtatccaccaacatagagtattacctatatccaccggtagatgcacatacaagagctccatgatctaaaaggacatgaacacactcagatcttctttgacgtgctgctaaatgcagtggggtagccccacctgcatctcttatattaacaaatcttgcaaatcccctgccattaccatacagaaaaagtcaaatgttaatcatctaaccaggaaaaataaaagaaaaatgggagaaaacatgtgtgcgagaaagagtattcaccaagaatttgcaacagggtctgagcgagcagcggagagaatggctttcaagcaatctgaatgaccatagtaagaagcataatgcagacaggttcttccatttacggaatcaaacatcaatatctaatacattatacacgcaatccatgatgatcagtactcgatcaatggctcttttagcgaaataatcgtttaaatggtaaatacataacgtatttgaacttacattagctcctgcttctataagtctctgtacacaagcgatctttccatgcatagtagccagcattaatggagtctaaatcaagcatagaacaactcattaatgacaaaagttgcaaatcaatgcaaacaaaacaaaaaagtatgtttcttgatttcaaaaagatacactaacatacttgtctctgacgattcagaatgtctgggttaccacaccgatccaagatcatggaaagaacctactttgtcaacgaaaccaaaaaaacccatgtcattattttcccaagaaacaaacaaagcaaaaatctgtgatcaaggccaatcaagagaagaaaagaaatgaaaccaaaaactcatcactcacctcgaatcgaccattggcggccgccacatgcagtggagacagcttgcctcgacctttggtctgcgccaatgaggatcgatcagcctccgccagggcttcgacgagctcaagttcaccatctctgatagctccaaaaagagcattttcacggcgctccctgcagctcaagccctgacccatttctctgtgtagtccgaacgtgaagtcagcagtacatgggagcgtttccccacacgccgctgtctacgctggtgtggtggagtcaggacctttggttgagcttgaggttgagagcaaaaggtaatctaagtaatgggcagagagaaggggttcgttggagcttggacttgcccgccgagatttcgggcagctgaccgtacctgcaatctattttatttatttatatattattattttttaaaatgagcaatctattttatttataaatttcaaattttagtttgattgaagagttaaatataaggctatttattcaatgtcaaatattaacactatatctttatatattaaaagtgtctaacggcaattcttggtttaacgattcttggtttaattaaacccataaaattaaataatatttacgattaacttacatatctctctaacaaactacaattttacaagaatgtccaagctaaaggtcagaatgcagttcacttagcattgttaaaattcatgatttctggtaggctgacagtggtagcttcttaagaatacttgtacacattaattttgattttgctctgtttttaactccatatctaagatttcttcttggtagtgagaatgttccttcaagtgttagttattcttaattttataatatttgaactggaacaaatgcaacatatattataaccttattattattgtttccaatatgtttttactaacatttgtagtttaatttaaactccattatactggacataaaagttaaatttaaatttattatttaaatctctctaaattaaatattatttatttttgattcatttatttccttccgaactcataatgtaatacttaatataaaacatagcatacgtacgatgcacgtaacaatatactagttaataataaaaaaggcatccaatctcattcatccatattacctttatattattttatgttattattattattttactttgttattattttattatttgagtctctttctttgtcaaaaaaatggagttcatttcacacatgactcatttcttttattttattgcagtttttaaaaatttctttttcttaaagcaaattttcaacacatttttctcataatgttggcagtcaactttttgtgtttttctttttgttatgttttccctttctagccgccacataattttcatgaatcatggacttaatatcttttcttaaaggatcattgaaataatttgaatagtagttttttttttaagaagtaaatttgaattcctatacttccattacctaaaattttttctcctaaatgtgaagttattaaaattggtaatataggaccattttaccaattttcctaaactactcctctcatttgtaatcagcctct

SEQ ID NO: 380933 - DNA, 3150 bp, Cannabis indica
atataaatattgatgagacacctcatttttggattaatttaaccaaatgggcattcgtaagcgttcacgaaaggatataatataatatatactgaatgtttagtttaattttatcatggcctaatgggtggttttctaatgggtcatgctcttatatgaaattttaaataaattaaattaatagctgtgttttaataaggggatatataataaatgaatgggttgctttcacatggggaaggaaggattctctttttgtaaaagagaggaagtggtcagagaatcccagttaagttttgttgttttgtgaaagagagtgagtttaatgaagaaagagagatttgagcccaaaaacaatagtagtattcctattaacagaagtatataatattataaaataagtagtttcttcgtttgtcatgcaagaacgtggggcaagtgttttgtctcttaatacccccaatcaaagtgaagattcaggaatcagtttgtgtactaaactaataacaaaactttatattaatatatacatatatacaatatgctatggaccacactttaatcttagatatttggtatttgaaaaaagagagagaaaaaaaaaggagagagaggttcttttatcctatagaagcgggggcatttaaatttaattttgggggtgatggtcaggtttctttggacatatagaaagttattattataacatgatcaacttgaaagaaaaacattaatttgggagttctcattaatgtcatatatattttaggttttagtagtagcccttgatgatacatgcatcattttcaattccactcatacctcatgtgtagaatttttcagttaattataatggttttgaattataattggttagattatatgagagagagagagaggagagagagaaagtcgagacacaatgatatacgaggactaaaacagtgtgtaagaaaggaaatatgggtgaaaagaacacaagaaaatagtaaatggatatggttaagctatctacaattaatggtcttttgaaaaattccacagccaaaataataaaaataaaatacccttaacaaggtggccttagaatgttgtggagaggagagagagaggtgattaggcctatgacatacatatacatatatataaatatttatagggtaaatactattgtgtgagacgctctgttttgcagaaattatttattgaatcttctctattgttaaatgataaaatgaatcattttttaaaatattacaaatatatacgactatgaactgattttttgttaaaatcaaatttaataaaaatctaatttaaatgtgttatgacataactgtttaaattttttatatttgttcgtcgaaagttaatcctagagtcttatttttattattttaaaaaatataagatctattttattacttaacaaaatataggtccaatctataactttaacaaaatacacatccaaaatacaattatacatgtatgggtcatatatatatatagattctcaaaacatctaatcaatcatgcatatgtgaatgagaggccgaggccggttgtgtgattccctcaatgatcatcgtttggctccattgaaaacttccaccaactatactaattaatctaaaacgcccacttcctattatccacaacatcccacacaaaatattgcttatttcttttattttattatgttgcattatatatacataaattattaaatcaaattccatgatggggttaacggcatagaaaattactatattcctagtaaacatataataatatcaatgaacatgacttgcctcaaatttggccacctatttttttagtaggtaacaaacatgattttgaatagatggccctattattatttttttctctatctattcttttaataaatttagtgcgagtatgcatgatatgatagcattacagtcgaccacaccaagaagtaaaaacattatatgttaacacaaatttttattaataataatatattttgctcatagtattttgtcacattatcatttatatttttcataaaattcttcattagtaacaataataacatttcaaacattttctcttattgaaaaacaaagtaacatgatttcatatgtagtactatatatcttgctttcctcccatatttttttaggttagctttgttgcccttatacattctaagaaaatgaatagatgacaacgtttcgaaacttatatatatgcaaagaaaacgtttcaaccaccactcgtttattagctgtctaatcaaaacatatatgattatgattaattaaagtgcacatacaatgttgaagttgaacacttgagcaccattcttcttaaacgtaccccagcaataatatataatatataaaataaaaaatatatatatacgtttttaacttttgagtgggaacaacataaaaggcacgtttttatctttgttaataaaaccttaatattatgtaattaaaaatttaatcctatttcattaggattgtccttcataatcccgacataatacacataagacccctagtttctatatcgtaatcacctttttggaaaagcttaattatatttacatatatatatatatagatgatgataataataacttcattaatttctctcgtaattatatttgtctctttagctagggctctagctccctacttaaacatttgtttcttaattaagattttgtcacctccgagcgagacggttttaatattgtacgtctaaatcaaatgtacttaagaacagaaatctatatatttataatattaatatttttatacatcgtgaagagtgttatgcactttttgtggatttagaatggctagctcctcctgaaaatggttgctacactcaactcaatatcgtccgtgtttatattttcctcacttgctcccaagggggaaaagattaagaaaaataatatatatatataccaaaatcaattgatagtgtggtcaacccttgttgacttttaagcttaatggaactagctacgagacggtctctaacttattttgttatataaatatatatatatatatatatgggtgactattcaatggttacatttttattgtaaccatatagttacatttttctttaacctgtaat

SEQ ID NO: 380934 - DNA, 2554 bp, Cannabis indica
acttgctctgaatatcaagtgcatacacatccaaatagttagttccaatagttttcttccattaccacaaactggtagtagtgtcgtgataatatgatattaccttcatcgattttgaactcgtatggcttctcatcatcatggccctttcgagtaaacacagttccatcatgtaatttcccaataagtttcactggcaaaagacaaaagtgagtgagttcggtattaacaccataggtttataaacccgaaaagcatcaacctttttgtcatttcatcttaccttgaacaacagtcccatcattagggcactcatatccctcgccctccttcaaagtctttttcaagactctgctgtttttgcagatatcagtaacagtcttccaagagaccaactcaagagttatgagaagagtggcattaggaggtacagctccttccccattaacagcaggttcgcccacctcaccaaatccatctgtagattcaaataacattaatacaggggaagcccacatataaaaagactaactttagcaaatctcaagtgtcaaaaaaaatcatttatattcaatacatgtatgcaatggataggaatcttactcacattttggtttcactgtcaacatgaccttttctcccttcttcattgttttcacagctttggccaaggcagggcagaagtagcctgtaagattaaaaaaagataagataccatgttaaaaatctttggtagcatacaattatatcagataatatttggagattcagaaattaaagctttattgattagtttttcggtacatctcttcctcatattcttacacggattagcttagtatgcttttaggatcaaaatgtaaaatgagacttaccatccccaacagtaaactccactccatcggattttgaaattaaagtcccatcttcaagtcgaacttcgtaattaactgcatcaaaacatagtcatttgagtaaccccatatgatccaattgaatacataatagaagacaattgttagataacattaccaaatacttcatccaagtcatttggattttcccatttctctccttcaactaatactttcttgaaaatcccaccatctttgcatatatccttgacactggtccaagaaagcaactccacatcaaattgaagagtagcattaggtggaatggtgggaggggaaccagactctccataagccagctcaggaggtatggtgaatacagcattttcacccttcttcatggtttcaattccttcatcccatcccttgatcacttgtcctgaacataattttagtacaaaaatatatgatgagccaacaaagaaactagaattacttcactcaataatccttatgcaatcatctaaagacaatgcaagtgtcatgactagtctttcaatcaactacaatgacactctttaactatagatttccctagatagaaatgggctgttttatcctaaagacgacatggtgttagaatgccttgctcaatctgggcaatgccacgaaacgtcttaaagaaagcatagtccgtgattgaagttcattcggtcatggcactatctaactgtcaaaacatgtggtgctaatctttaatttagtactcagaaattaatgacattgtttacctaatgtgaaaagaaaaacacaatgaacaaccatagattgcttcattatacattgtttcattttggatataaaatttacagcatcagaaccactcaacacacattaccaaacaatggaaaacacagatataaaattatcagagaaaagcaatgaaaacaaagaagttaattaacaattgctaattaccttggccaagcttaaacttgaatggagtccctctatcacgactggaatcgaacttggtcccatcaagcaaagtcccagtgtaatgaactaacatacaacatcagataccaatcaacatcacacaaaatttaaactcacatacaaacaaaccaacatatatatatatatacatataaattattcaaaaatctccataaacagagagaatataccttcaacttcatcgccagagctaggagtttcccaaccatgaccttccttaacaagcttcttcttcaaacctttactcccaatctctttctcttcaccaaccttgagaattgggctgattgcgtcgtcttcctcattgacatccatttccatatcctcattcacatttccagcagctgagaaatcaaagtcatctgccatgttcgcttacaaaactgatgaaatcaatcaaaatgagaatcgaaagaaagatgaaatggtttgtagaaagagagagatcaaatgggttgtattgtatttgtatgacaagttaggaaagattgaagctttagtgtatttatagcgagaaagagagtctggagagttcgaaaatggaagatggttccagaaatctctaccattttcgtagctttggatttttgacacattctctctctctctcttctctctctccttatatattttttatttatttaattaaggtaaagttctataacatttttattttaatt

SEQ ID NO: 380935 - DNA, 3406 bp, Cannabis indica
atatgcatataactaattacaagaagacaaaaaatcatcgacgaggttattcatgcttctattatatagatagatataactcagtgcctctaagaatttgatttgagttctttgctttgtggaataatcacatttgatgatttatgttgcaggagctgttaacaacacatggttctcaactatcatggaacagaacaaaatgctaggtgaagaattgatcttatcatcattacttaggtcttcttatatatttttataagtctgtgtggtcatgtcaaataatcaaagggtgcattatgcttatcatcattacttaggtctacttagttgttgatcgtctaccctagtccaagcatcttatgatgcttccttttatgccatttacgcctctacttttttcttgcctctactatacattatcaacactcccatggttggtgcctttattttttattttttttttctaatctaaaagtgttattgtgtaatatatgttataaatgtgtctatttgttttgaatgtattcaagtttcatttttctgttaatttgtactttttgagcctttatgtagatttttaggtagtaaaagtgatgattttggattctagtatgcaaatcccgtagcatgtttgcttattctctgatataataatcaaaggatgcattatactctagctataatgatggtcaatgaatgttgtgtaagaaattggagataaaaagaattgatttcaattgaattacttggtttgttgaccgagtgtcatggatgttgatatgatagttcaaccagtttataaactagtgatggtgtgttattgatgcttggtcgtccatctaaaatgcttatctggatgattttttgctttccattttggtttcttgtagtgagttctacagatcattcttttatttgaccaaggaaacccaataacgattgaacatgttttcgtgattacacgaagtatttgtgtagagaccctatttatttgtctagcttttgttttcagagcttcctcagttgagaagtgaaacatcaattgaattgggctgtgatgccagaggccattctcgtgctggatatgatacctctacttggtattgcgccattcttgcaggaaggcatggcccagaactcaataaaatgcgtgaagtaagtgtctttcctatgcttgtatttttataaattcaggcaattatttgccggacataattttggcaaccatatggtcgcaaaatttatcaaaaggtttctaaagggtcacatgaaatatactattttagatatttttctcatttgtattcaactatatatttatatagtacgagttaagcaaatagtttgttttgggttggtaatagactcatttacatcttgagctatgcgaatgattcacattaaggtgatagaccatacgcagggttcaagaattactatccagtgatattgagtctagcgaggatcaaaccacggcaccagcattgggtgcgattagaagcaaacgattgacctttacttggcttgaaggggaaactcaaaaggtaaaataactttcatttccttttacttttgagtattaagaattcctgtggagaacgattgtatgctccttagcttgagttttagacgctccgttcattatcctgaataaattctaaattctgattgtttgttgcttaatgctttatccctaatttgttttcgtgccaatgaggaacccattttgggaaaggcctggtattagtttatgcttgagtctgttttcagtaacagatgaagagggtaaaatgccagagacagttctaattgttcttgttaaaaagccaactttccccaagtactattggtagtgtgttttctttttaattgtaggtttctggttgagttctttaacattatttatgaattcgggatttataatggtgataatttatttctatgtccagagatattgtttcttttacctcaattctgaaaatagctatgatacttgtggaccaaggagagatctggcagatgtaccccagttatttatagtgcgctacaaaagaaacgctagcgaggaggacacaaagcctaagagaaagaaaggaagcatatgggactcattacaagaacaggaattggatcctgcatcacaacttgtggcaaagtacaatggttcagatgaaacttcagaggtttgaatttgaaatttcaggcattttactgtgtttcaatacactattagatgccttctataacaattttgtaattttcctcaagttggtttttgacattcaaaagcaattaaatgctttgtataagaagttggttatgagagacatcgcatattgtatgaagtatgatataagccacttccatagagaactttaattttttgttggtgttggtttacagatgaaaattgcagctttagatgttagcagtaaagttgtttaataataagtttcaatagatgatatacaattggcgtaaaaatttctatgataagaaactagaaagatcgtgtgacctataaaactgagaaccatttaatatacatgtagtcatcaagaggattaatgtacatcactaagcaggtgttttatagtctcccagtcacaggcttcggtctgttaatattccgtttttaatatgcttcttttctttctcatgcagatcattaaatgggtttcacaaataatcaaggatggcgactccagggatctgcctcattatgtaaaaattattaactatttttcttttcactccttcgagtaatttgtgtaaaagcttcttggtccatccatccatatttctacgaatatcctttattaatttgctggaataatatttatgattatatttagggcaagtatgctaccaatttgtgatatattgatgtaaataaaggaaaagaacctcacatttttgagatggaaactatgttctcttctacttccatcacctcaaaccatttagggactataagaactttcattacttcacgtgtctgggattatactcaagtttctgtgtgcttcaaatgcagagacaagactcctgaactggttccgacgatgagcaacctatctggtcaaaaggtgttcaaagcttaccttcaacatccagaatcaagcagcatattcgtggctttataaccaaaatttatgatcttattcaagatccaaggattggtcccatccttcttctggcagccttaatatcttttggtaccatctggctgcaaagaagtcagccacctcaacagcctaatcaaccagattcaaaccaaccaagtcaacctaatgctaaggtatgtgatgcatctatttatacactcacctaatgaacaagtatcttttgcaattttaaactgtcacctaacaaaccaatttcaggaataccaacattgcattat

SEQ ID NO: 380936 - DNA, 4068 bp, Cannabis indica
agtacatttacattatttcttaagagtgttaccttgaaagttatgccactaatttattgtcttcccttaagtcatttctacacacaatactgctacacttgaaccattccaatattattagaacatttgaaatggatgagctccattttatgtgcaaatttgttacctcaaattcactattgtattatatcaaacttacctcatatcatgttttactcacttttgagttactgattaatgaactcgcgtcgtatctttatgttcttaacattctctttttggtgagaatagcgtttgtcaacgaatatgttgagtaaaggaaccactttttcactcccgcatcaaattatatttatggtaccaacttagtgcttataattaacttggtaccagctatttttaccaccaaagtgcactttagattaaattttcaaacttcacaatcacaacccctcaaatattaatgtgctacgtggatatgcatgtttggtgaatcatcagtatttattttataaacgaggatggattgtgtttataatgagtgttgtgtatgatgatgccagaaacaagtaaaggaatatcatcataagcttgaagcagcataagagaaaagcacagctaataactaccaacagaatatgcagttaaacaatattaactgtctaattcttaatatttgcacaaacctttgtatatattaaaaatgcgaaaaattgaggaagctggctcatttgctcattcatatataaattaattagctgtcttcagattcttaactttgtgtataaacttaacaaatataaatacaaaactagaggcagttatccttttcttttgaaaactatcaaattattcagattcctaaaaaatgacagctgtgggatttgaacccacgccctttcggaccagagcctaaatctggcgccttagaccactcggccaaactgtcgttgttgaatttgttcttctacttttaaaataaatattgttttattaatattttcgttttgctagtaaaactctgtattagcttatagcatataagattgaccaaagcacatttccctatcaacaacacattcgataatactttctgttgttgcaaatttcacattaaatttggcaaaaacaataacagaggcatataaagtgatgtttattacatatgaggctatatcatggcgcctaagaataaaacaataggaaaggcctgttatacattttttttatgactgttagcaatgttggagtgattattattgtggacgaagtttcctaatcaaccacctctttctaagggttgaatccaaagctaaaaaaatcctggctctctttttatcttctaaaaagtcacaaccatccagtagcaaatcatcatcaatatccggaattgactgcagaacgcggagtactttctctattgacacaggtttctcttccttctgtttctttgagaaagatgatactgcagctgccatctctataaaagaatctccaacatcattttcgtcgattctctgctctagttcataggtttgtgaagttggtgtaacctcaaggtggccccttttcttttcatgtgaaccagtcttgttcatagtaggcattggatccccactttctttctcctctgtggcttccttttttaaaattggtgtgctacaactcggtggatcttttcgctcttttctcaaagtaccttcattttggcaaatggcacacatatcagtataaaatgccattgctttgtttctgtacgtttggaagttggggtgttcctgcaatttgaaaaagagtaagacaaagctgcaaatggtggaagaagacataaactgtgtactaaggaaaggaacagttttagaaaccttcacataatgatcccagatcacatcatcagctaccactttcttctgtactttatcccacttaaaaccttcttggctaagcagaatctgtatgttattgtaatgccttctaagtatattgtaacgatttttcaatacatatctactgtactggaccccgaatttggaattgaacgatgagatcatgcaaacccatgatttcttcttgaagactcgtccaattttgttccccttatgaacttgctccaacaatagttcagtaaaaaactgttccatacactctgaccaatcaattcttttaggatcatcctttgtggaattcatagcttccaatccttaaataaatgagttttagaataataaataacttgaagatgaaaagatcaccagagacatgaaatactacacacactaaaccttcattttcaaagtccaaatcgaaacacgagagactgtatcttccatcagcaacagcatgcccacatattatacacaactcattataatatggcacaactctcattctgtatggttgcatttccgggttggcctgcattgcattcatacaaaagttcaaaaactcatttggaacctgaatttcccattatacaaaatttagagataacatcaaagttcattctaaaattgacacaaaatgtatctataaaatcacatattaattacaaaacatgaacaataataatcctgcttttctcagaacaggaaaaactgccaatttacttgtaatttgggtggtctatccaaattttcaaactttttctcagttcatcaaatgaatctcttttttaatatatttttctttctttaaagtataaactttgatatttgcttaataataatattttaccttaatgtattcactccatcccttatcatcagctcttaccatatgcattgaatcatcccacttaaacccagtttgattaacaagactcttcatttcattatattgcttcctcaatcttttgtatcggttccttagaacatctgtatcatagtgaaacccaaattttgaattgaacagcacaatcatgtcagcccatgactgctttttgaacccatgagcagtcttgttcccttttctaacttgttccatcaaaagggtaatgaaataggtgtcctgagatggagtccaattagctctcaaactttcgccattctccattgcctcaactcaatcttcttctgattcagcctgaaatgcaaaacagttgagatataacgtggctttttcgaatttatgtttctgtttggctgctgcgaaaattggagggaaaagaaaaatctaatttaaacaaacagcggcgaggattaggtttaggtgatttacctgttaggcgagatagagatcgaacaattgagactcacagacagcggactcttcaccattggcaaaaggggtttagggttatccgggatagggagatacgaatttattgtttggtcttagattttgttgtaactattattattttttatattttctctcagaaatatagatttaacaataccattttcactgaaaaaaaataattaaagttgagtacatcttaaaaagaatgatagaaaattatccaaccaaactagtttatcattaattatgagtttatacacaattaattcatgagcggatatgaactaaggatgacttaggaaaattggagagtaaactattgttatccgtgattttagataagtgacacgtgtatattcaaactagctcattcactaagcccaggtagattagccacttgacccatgagtaaagtcggactctttaattcgtgtagggaaatttcaatgtgtaactgaaaatgaaaaaaaaaaaaattgaaataacacgcaaaaactgcatagaaaagagatggaaatcggttgagtgtgaaggaagtgttggattaaaaatcctttgtgggcacatatgtataatgtatatgctattataaagtgtgatacaaaattaagtgaccaattatgttatgggtatcaaaagggtattaaagtgtcatggaattaatgtgtagataccataagttaatttataatttgttgaggggccaaattataaatacccaagagttattctaagatgactctataaataggtagtggtccccaagaaacactagggtttctgtattctctccttccccatcagagaaaatactctagaaaatagtgt

SEQ ID NO: 380937 - DNA, 3787 bp, Cannabis indica
atcctttctccaattcgttaacagcatccctcaccctgaaacttgatcgaaacaatttcctctcttggaaatctcatgtggtacccacggtaatcggccatgatctggatcaaatacttttctctgatgtctctcccccagcaattcttgttacaggaaatccaaatcctgaatatactatgtggaagaagaaagatcagctccttctctcatggttacgagcgtccatgtctgaaccggttcttgcatctgtggctaacttccacacatccttcacagtctggcgtgccctcgaacagcgattctctagtcaaacaaaagctcgcctgttacaactcaaaggccagttctctcatcttctcaagaagaacctcaccatttctgaatatgttgacaaagctcagtcgatttctgatgctttaatgattgctggctcccctgtttcacaacaagatttgatcctgcagcttcttaatggccttgggcctgaatacgatcctgtcgtgtctggtataacttcaagaagcgatttactttccttcgaagaagtacaagcactcctgctttctcatgaaactcgaattgatcatcatcattctatgaatgatctctctgtaaaaatgcaagccaatcttgctgcaagaaatggcccctacagacctccctttggctccaatcgtggcaatcaacctgaaaccaacagaaacagaagctatggtcgtccacctggtgcaagattactttgccaagtctgtcttcgcactggccatactgctgccgtctgccactatcggttcgacaagaattgggtcactcccaaatacggtaattctcaaactcaggcttttcttgttgaaactgacattcactatgatcctcaggctgccacaacaactatgtttcctgaattgggtgatgatgaatcttggtacattgatacgggtgctactaaccacgtttcaatggatacatcaaacttggccgtgaccaccaactacaatggaaatgaaactattgctgtaggtaatggtaagaagcttcttattactcatattggccatacctcctttccttcttctttacctactaaacccctgcacttaaaatctgttcttaatgttccatctatgaccaagaatctcataagtgtctcccaattaacttctgataatgatgtctttcttgagtttcacaaatcgtgttgttttgttaaggacaaacaaacagggactgtgctactcaaagggaaaactaaggatggtctgtaccagcttggtgaagcctccaataccgctcttcaatgtcatctcactactctgtccaatgatcctacaaattccaattgttgtacctgtacttgtcattcaaataacaatgtaatgtcatgtaatattgatgatatcaataaaactactgatttccctacatcttcgaatcatgtatttaccattactaaacagaatgacatcaacatttggcaccataaacttggtcaccctgcattaaataccctcaccaagattttaccacacatcaattatacagggtcattacaaacattgcaattttgcaatgcttgccaccaaggcaagagccataagcttccattcccacactcatctaacagagcatcccaaccccttgcccttattcacacggatctctggggtccgtctcacattacctcaaaggatggatttaaatactatgtccatttcctagatgactttagtaggtattgttggatctttcccctcacaaccaaaaaccaagcctttgatgtgtttatcaagtttaagagccttgtagagaagcaatttgacttacctatcaaaagtgtgcaagcggattggggaggtgagtatcgtccctttgctagattcctagctgatcagggaattcatttccaacacccctgccccagaactagtgaacagaatggccgtgctgagagaaagcacaggcatattactgaaacaggcctcactttgttggctcaggcaggtttatctatggagtattggtggcatgctatgtcatctgctgtattcactatcaatcggataccaactccagttattggcaacataagtccctatgaatgcctattcaagaaattgccaaatttcaacatcttgaaaccatttggctgaacttgttttccacatcttcgaccatacaatgctcacaaaatggaagttcgatctgtaccctgcctatttcttggctactcctcacatcacaaagggtacctgtgtgagcatcctgatggccgcatcataatttccaggcatgtttcattcaatgaaacacaatttcatgggaactcagccactgttgatcccatacaggtacatcatcacacttctactccctcatttacatttgatacttccattaataataataatcccactaacactccttttatgatgcccaactctacaaatggtccacctgcattatctactggagtacatgagaatggcacacctgttcccagtcatgcaaatgccactattgccacttatccaacacatgtcactgaaaatcccattcctacctctcccaccaatcccacaaacacaaatatcccagcacccgtagccactatcatgagtcaaaatttaccacctgtcatcactcacactcagcagcctctctcttcagatactcaccaaacagtccaccctcctcgaacacatcacatggtcactcgtagccaaaatggaataaccaaaccaaaagccttctctgcaactaaatttcctctccctgaagcatgtataccatctgaacctaaatcaaccactgctgccataaaaaatcctcaatggttcaagactatgcaaactgagtttgctgctctaaagaaggctggaacatggtctcttgtcccatactcccctggcatgactgttattggcaataagtggcttcacaaagttaaattgaatgccgatggtagtctagatcgtctcaaatctagattggtggctaaaggatatctccaaactcctggcatagactatgaagaaacattttctcctgtggttaaaccagcaaccatccgaattatactcactcttgctgtatctttggcctggacagttaaacaattggatataagtaacgcttttctcaatgggacattacaggaaagagtgtatatggtgcaaccagaaggattcattgactccaccaaacctaatcatgtgtgtcttctacacaaagccctttatggtctcaagcaagctcctagggcctggaatcaaactctaaaagacactcttactcagtggggcttctctgcatctaaatctgacaattctctattcatctatggctcgggtgatcatcaaataattctccttgtatatgttgatgacttccttgttacaggccccaatgaagccctcatcaacaagttcattgaacagctcaatcagtccttctcattaaaagacctgggcaatgttcattagattgagattttcagggatcatactggcatgtacctttctcaatctaagtatatcactgatctgttagtaaaactcaaaatggaaggagctaagccctgtccgaaccccacaagtgcaagtgttaaactatctctcactgatggtgaccctctagaagacaaaactctgtacagaagcacacttggtgccttacaatatctcactctcactcgtcctgatgttgcttatattatcaataaactcagtcaatttattcatgctcccacctcaatccacttggaagcatgtaagagattgatgag

SEQ ID NO: 380938 - DNA, 4043 bp, Cannabis indica
agtttccctctattctgttagttccttgcctctttgaaagttttggaaattcctctactgaatttcctacttcaaactattatattttaaggttggttataatcctccttttttttttgtccctttaaaccctttttacagttgagttgatgaatgcaataaattacatctgttaagtaaacgaaacaataatagtattaggttcctatcattattataaatgataaatatgtagtttgcaataaaaataactataattatcaaacaaatcaaagatcattaattatgaactaaattcgttaatatacatcaaggaaacaaaaagctcttattttctattttacacattacggaataaactaattttgcttcttgtatggtacatttactaaacagtacatctactgtcataaaaggctaataaaaaaataaattaatgtatcaaaaattcaaagctaggtctgcgttaagcagaaagaggcatcctgaaggtatatatcttctttaagccttcgtggttggtagactctttctttacaagcagcagaagaaagagagaaaacgtctgcaatatgcattagatatgtacaaagagaaaaaaagagaaactctcttttgaacaaatgtacagcaataccttgggtgagaacttttgatgatgaagcaagaaataaatttttttatgtgcatcaaaggacttcaggcttgaattcaaagcgtttcgactgtgcttcaatcctggctgtgtatcctactgtggtgggcctaattgatctctgcctcacaatatgacagaactcaggatcatccaattgcccatcttttctcatccactgaatcatctgatggtatgtggggaagaatcttatttggatggatgcataagtgaagtaaggagcaagggatgcaattaacacaaagagggttataagccagtaagatggagatggtgcacatgcttcaatgaagacttgataggcagtggttgagagggatggggtcaaggctccatatgccaattggaaaatgtaccaaaatgcaatgccaccccatatgaagagatgttgtatgtatgtgaaatagttgacggacagtgccatttgacagttgacaacacacactacacaagtgtacatggtggttccaaggatatccaagctagctacttctccaccgttgcggaatgcttgactctccatagcttggttgcagaagaagaagatcaagacggcacttagtaacccgttaaaagcccatcctagtatccggagccagctaaagaggatgttttgtacaccttcttgatatagtaatgggaactgtgaaatgaaaataaagagcattagattagatgttaaataaattgaaatataattcttcttttaagtttatatgtatttttagtttcttttttctttctatgtgaagaaaactatgtttaatgtaagacatgaaaagtgagaggcattaggatcagaataccttgatacataatctagatgagacatcttgatcaaacactcccaaggcaactacaggaagagaagtgaagaagacattgtatagcgaaagataccaatcgttgtaaagagcttgtcctgagaatgaggtatatatcccatagaagaagatagtaaagccaaaagctatgttcttgtagaagaagtagcatatctgtaatcacaacaacgaaaaggaatgagtttatactttaaatttttaagttgggacttaaaggttgacaatccccacagccataacaaaattcttctatttatggaaaagactttaaaaaagaagatgcaattaccattgatgatatccgtcggtaacaccaatgaccatgtacgagtagcaagcgttccaagaaacgaaactgtgcaattgcaatgtcacttgacatgactgcctgaaatattgggaaggagatgatgaaattagaattctctgtgttaaatatttccagagtaatagataagagtaatcaagtataaaagttaaaaacaaaataaaaaatcagtgcagttttcttatcatttacctgcattccttcaacgccactaataccaactccaatatctgcttcttgaagcattccaacatcatttgccccatcaccaattgcaagagttgtactaccagtcttaattttaacgagtcttgtaacctgcatgattttatgaaactcatcgttcagccaactccagatataaatgtgaaaatgacaagaaaatcttctagcacacaatagaaatgattagtaaaacttacgagtgctttctgcttgggagatgaacgacagcatataactgaagcacagccaatggcaagctccagaaaaaggttcttaacatcatcctctaaagcataagtaagtgactttccatcaataattaaagccaatgcctctgagttttcagatgttacagtaagcaactgctttgctgcacttatctgttggatgacacttgctttaagtgcctaaagaacagaaacattctattaagttaccacattcattgtatgaaaaatacagccaaagataacgagccaaaagttacggtagagaaagaaagggaaaaaagagcttaccgaggatgcagcagacttgtcctctcctttctctaatgctttcgcttcaggagtctcagagctaattattatttgcttcatctcttgtctaagcaaactacaggcaaacctggaaaaaaaaaaaaacaatatggtgagaaattcatgtctaccaaaagtatatatgctttttcactatcttgcactaatcttacccaatattgattgccgtctccatcttatctccagtcaatacccatattttaattccagcctgagcaagtttgtctatgcattctgggacctattaatcacgaaagcaaaaaagaggatacttaattttagtccaaaccctattaccaaactccaaaaatattagtaatgttgctcaagcttgaaaatatctggtatttataggactaaacgttcaggaaatatcaaacattcagtaaaagctttctgagcatgaaatttgcgaattaattttcacaaaaaaatattatgcagaataaggaaaacgggtaagaattaatttcttcagacataccccattttgtaatttgtcttcaacagcagtagcacccagaagaattaattctgtctcaaattttccagccacctcctctaccaaatcttcccgatctgcactcactatggtcttagcctcattgaatgccttgctgaattcattgtattcttcttcagaaacttcacggaaggcaagaaccaatgtcctcagtcctgcatcagcatactcatcgatatgccttctagtcttctcctcaaactgtctaccatcctttgcaagtctttcaaacatgacactgcttgtacaaaacaatgttaaaatctccattacttaatccgtaaactcttagattgctatacaatagtagggattgagcttacaaacctgtcagcacctttacaaagcaaaagtatctttccctcttcagttcttacaaccaccgacatccgctttcttgagctactaaactccaggatgttcaaaagcttataatctctgaaaaagtagaacaaaaataagatttaacttaaaaaaatcacatcatgtaattaagattgcatataccagaagatacttagtatctcagttttttgagcattgaatatgttatgttgcaagaacctcaccttttaactttcctgccagagaagggatctagctcttgcactgaaatgcctgtatgggatctttcataaaatttaaatccaagttctcttgctgcaatcacaaatgctgcctcgtcaggcgattcagcttcatatgaggttgttcctgtgacttcatcaacttcaggtaatgctgtatggcatatagccaaagaccgtaaaaactgctggattacatctgcacgaggttcattaacccatttaccattcatgattctttcatccacgaaattaaagcctttaatggttggctttgattttgtgagatcttcaatgtg

SEQ ID NO: 380939 - DNA, 2741 bp, Cannabis indica
tggagctatacatgttttcccagagcctacattttcaaggtttaccggtctatattgggagaagtgattgtagctgagatgaaagcttttaccttagaaaaatcaataacaaatatctgtaagttccatcctaagctgccaaaagtataattttttcaaataccatttttgggattcatgtctaagtactcatctcatttttgctttgctgtgtgttgaacagtgcaaaattcagtgcaaggtgcttcaagaatggtgaccttcttgctcttgatggcgagacggtggctatcttaccttcattagctgtggcgcgagctcaagtgcatcattcagaatgataaagtgagaaaaatggtgtaattcaagtgcttaaaagtgcaactcatcactatggatgttgaagttgaaagtatcaaagttcacaaatgaagcacttttatgctgatgattatgaaattttggaaaattttcacttagttttgttccttttcccttcccacgttttgaatagtgttttgtagccttttagcaaaggattagtcacctacattttcctaaaattggtcaaaagcaaatattagtggtgactctttgtttttcagaatctactaaaattaatcttcttgattttgataaactttttcgaaaagatatttacccttgttttattttcttcaattttaaaaaaaaaaaaaaggaaatttttataattacaagatgtctttaaattttgttgtgagataagttgaaaaatagtttgtttttgtatgcattaattaaaaatactttcatattatattttattaaaatatattcatttttatgagtaagttgttcaatatactttcactctctacttaagtctagcatataatttgcattgacttaacaggtctaatagcaacaccatttataaaagtaagtatatcttaaaaaatataaaaacaaaaataaaaattaaaacaaataaagtgaagtgggtatacaatataatttcctctttatttttacgaatgaaatgacattttcttgaaaatttaccaatgaaattcaatttcactatcaaaatgacccccatgtgtttaatagctttcatcaaacaaaatgctttaatcttgagttaaaaattttatgcaacagattattcactttaatcacaccctgtgaatgttcaacacattagcactttgagtgacttgtaatatattatcactgccattttattgcctgtattgtatgtacatacaaacatttctcaacttaaagattcttctgctatcaaaatttttccctgtaaaaaaagctctcattcagtacactttgaaaggaaaggaataaaaaatcaatagaaattcaatgtgcccgaaatggtgacaggcgggtcgatatggatgcaggtagcctttccctgtgagagcagttcaggtaatgtgttggcctccttggcgagaacaccctcagcagtccatattgtaacatggggccactggtttttcgagattacctgctcgccttcgacagagccaaggttagcttcgaacgcagccatattgtcggtgaaaagtaaggcactaaattttacagggacttccttgttgaggaagatgccatagttagcaacggcagttacaccgtgacttctcttatgagccagagtaacatgagccttcattaggttcttcaaaaggttgtttccgagaatagctttcgcctcgggatgcttttctaatatctgttggaaaaagaaaaacaaagatgtcgcatggaatcaggcattgtagaaacactgagatcaactttcttattcttcttcataaattcaggatcagaactagaaagtagaagattagatataaaaacaattcgaaacttgatagtaacaagtaacaacggaactctcgtatcaaatctattcctatgtaagatgccctacaacaaggccaagacacagcccagaaaggttggctaataacgtttcatttaaaatgcaagagaagaacctcaaaaggaaaaataaaataaacttcacttcaaccaaagttctcaatgcgaaaatttagcagacgaattttcacttacattatcgagtagagttttcatttccggaacaggcagactgacagctgcataaacaatgtttccaaatgtcctcttaccggaatctggcgtcttaaattcaccttttgatatctttctcagttgttccaaaacctccttgacagcaatgtcaaatggaacctgagaattaacaaggaatgaagatttatttaggcaatggtcatcactactactgttgctaaatcaaatgggttgaactcagtgaatgatcttctatcaatttaacagaaaatgagagatagatactgacctgaattgaattaaggtattcagcattgccaagtaaaacttcccgcaatcgcttctcccattttgcccattcttttacataagtgccttttgtagattccaatctaaataaaactcaccaacattagccaccactatgccaccaaataaagcaaagaaacaaatatagaagcaatgacataacacgggctgcagacacaaaagaaccatttggggtactaaaacaattcactgtagtgttttttttttttccaagacaaatttctagtgctataatgatcaataatttcctctacattttaatccaaaattcaaatgctcgcagacacaacgaaacaagcacagaggcacttgaaacgatgaattgtttt

SEQ ID NO: 380940 - DNA, 1949 bp, Cannabis indica
aaaaattgattttgttgaatattgacttatgtggtcaaatgacgaaaatacccttaaggccatatataccatacacgtataaataagggcaatattgtcattcagcacacacacacaataattcaaattttctcatttatcatataaatatcataaataaattctgaaaatgtattttggaccccgaatctggttcggcccaaaatacctggttgttactataccgtgccgacttgtcagaaaatacctgcagatagacagaataaagatattatataataatataatccataaacacagtatatcataaaattatgattttacccttctcgtgttgaaattacgaaaatgcctctgacacaccaacgagatcttaaaatgcaatatatcgtaatagtttgttgctaatccggttagtaaaccttagggtattacattccctataaagaagagctctactagttcattttttgaagttacaaaaaagtgctctagaaatttaagcatccacacttagtcattttatagtaattcatctcatgagaaataaaatttgaaatagacgtagctctattactgtcgattacagagagtgaattactataaatcattgtatctctcttatttatacttaacttataatacacccatataacgaacaagtgtgactagatatttgtgtccagatttatgcgagaataattataatcaaaatttagtaagaataattacaaaattattcttattttactagacaacaaagaaaaaaataaaatttagaaaattttggttaacaatctttgtaccattttgtttatatttggctctttttattttgaaagatcaattcttgccacaagtcaaaataacctttactaattagcaacaaactttgtaaaactccttacttaacaaaataagggtatgaagttatatataagtattatacatctttggagagagctccattttcatgtgcgactccaacgaatccttcattttcttctacacattttagtgagctttagctgaatttattgtttactacataatttttttttgacatattatttacttataattattttcaaataatgttaatatttattttggtaaactcactaggagaacataaatctaccaatacattttccctaattcaaaatgttacagtaatatatgtcgaaaaatctctaaataaaatggtgtttgataataaaaatagaatgcctgaatacccgaatgttttctaattttaatttgataattaaagaaaggatgtctgaatgcccaaatattttctaatttcaatttgataattaagggttgcttagttggatataaatgcctcaatgtttttattaaatcatactgagagcaagaatagatgatgagaaaattgaaaagaaagaaaattaatgtgaatatttatacttattttatagtatggtgttttctactttttttttttttttttgttaaaatgaattgtaaaaaatgctcttgatttacttagtgtctatttttttttttttataaaaaaatgtatgataatgacattattgtatgataaaagtactagtgatatcttgcacttttttttggtgtcatatcgctattggtgtaattaagtatcgggttacatataatttaagaaaataatttttaggcaatatcgctagagtgccacctataaaagatgctagacaccactagtatctaatagcaatcctcaattctaattcatgtaactcaactagttcaatcataaattttctattcaagactaatcttattaaaaaatttcttttcatttaagtaaatgtcataaacatgagttttaaaatgtgagttcctgtgtgctgttgttttgatgggttttataaaattaacggaaaaaaacagaaaaatacaaaaaaggaaaaaaaattacaaaaatactttgggcc

SEQ ID NO: 380941 - DNA, 2249 bp, Cannabis indica
cgaacatgtcctcataaccctaaaatgatgaaccatgaagatgagaatgtcacctggacgtcctagggctcaacatgggtccaacatatcggtgttgggcgcccaggttaacatcaggtgcatcgtctcgcatcaactttggttcctactcgcttcttatgggcaatttgctcagtcattatcttaaaatacatgagagacttggcatgcttcttggggggagacctcaaacacaggacatacttaagagatttggagtcatagcagaagatgtttagtttgatttgtactggtgctacagaaagtcatagccatctctttttttgtgcttgtatagtaggaaggtgatttattaggttctggattggctgggatttggttcaaaacatttaccttcttgctggtgttttagaaggatcatagaagcagtcaatctcgaagaagaaaacaaatttatatagtagctcttgatactattgtttattacatttggaaagctaggaatgaggttttatggaaccgaattgtgtatacaattcatcatattgtacagtttattaaaagctctttgattacaaaattgtatagaatagatacgaagaagttaagttgtaaagatagaatatggctcagcaatattttgcataaggagaatactgccatataaacttgtgtatagccaacttggttggtaattgtacttgattaaagttttgcaataaaactcattgcttgcttaccgaaaaaaagatacatgagagacatgcctcagccaagtttcagactttggagataagtctacaacaaacggtacttgagcaccatgaaaccctaatgggtgccatggttgacatgtagtcgatctgggcacaccatgactagggtttaggtttctaggaaaattcttagaccccaatgatatttcatcaacgacatcctgaaggagctatgggcgctcaggttgacattcaaacatggacactgatttcgtttaactgggtgatgcctgtgcaaatttgacaaattaaaatttgtggagtacttttcaccaaaaagaatattgaacattaataagactaattccagggatatttacccccacctgggcacctagtgcaggctcccatgccaccttgggcgcctagtgcaggctcccaagccaccttggacgcccaaattgacgtatctcaacatagggcactccgagccttcttttgagagaagttttcatttttcttattttcatccacgaggaagatgcaagtgctttcaggaagcaaacaaagctattgggggctcagatgaaaagatgggcgcctagggtgacaactcccctgtcactgggtgcccacgttgacatagccacccaactggtggttctgtcaatccgattgtgattttgtcttgagcattattcttattttgatcccaaaacaaaatatgagacttggaatcacaagaaaatatcattcgagtggtgatttagccctcaggcatcatcagtcgcggatatgcaagcacactaggtgcccaagttgacattggcttggggcttagtgttctgtccttcaaatagaagttctactacgggtaacagtcttattttgcccccaaaataagattttgatgcttctgcaagtaaatatctcatgcacatttgtcacgtgtaagtccaccgacacacatgtgtattattaatcatttggttgtcacttagtcgtcactaacgattcattgggcatcacccgagcatatcaagtaaaattaccatgagaacttcatcaatgcaaagaataaaactaagtatagtttccacatcatttaacatctcaaaattctggaaacccaaaaatccaagttctaggcgcccaggttgacatttgcgacaacctggtcacttgcaagtcagtttgccaattttttaccagttcacactgcttagtaaaatggtcatgtctgtctcaatttttatccaaatgacacggtttaagtggcatatgaaagctcttttcaagaataatttaagtatgtctcacacctccaccgcaattatgaagttttgggtctcaaaattgatttgtgattttgtacaaaatttttgacgaatttcaaatattctattaatttattgtaatttaattggatctccttctttataaaaggagaattctcttagctcattttacacatttctcattctctctacaaggtaagatcttctctctcttcacactttctctctaaaaaaa

SEQ ID NO: 380942 - DNA, 5186 bp, Cannabis indica
ttttttttttttttggctctgataccatgttagatttggaataaggtgaacagagttccatctcaaaactaattggtaatgggaggattagctcatttctcttatatattctattatctttctacatattatgctaaatacaaaaagaatttatatacacattctacacacaatggtaggtaagtaattataactatatactatttgaaaattttgttataaccaataatccaaatgtaccggactgaagtttcttttatcatttttgtttaataaatctactcataaagtcaagtcccttacctgaatcctctagtttcaacgtcaatgactacacttgaggggcttctccgccagtttctgaatgctgcaacaaaaacgctaccgatcctctgaaagggacctttctcatccttgtctacaatgctatgcctataagttgtacttccaagcatgaaaacacccaatgcaataaccattgcaatgcaaggaataccaaaccccagtgcccagctcagattgtcttgtatatagcttacgagtataactgccactgtaacacctgcagaggcaccaaaataccaccagttgaagaatgagctcttggccttgcactcctccggatcttcaccatcaaactgatcagctccaaaagcttgagtgcatggcttgtggccacctacggccactgccactagatataaggcaaagaagaacaatattacttgtagctgtggaggagaacaagcagaaatgttgttgttttcggagtcaaaacaactctgagaagacagagtagccgatagagtcaacagaccaagtgcctgtcatccataatatcaatttgggccaattagggttggccataataagttcaataagcacatcttgaagcatatctgcagttagtgacttgaccaactaatgaaaatcgatgctaattcatatcctagataaatattaaaacaatgttttggagaaaatacctaatatttttttctataccatctttctacaaaaaataagttcgtatacaacttgaaaaattatcatgtgtccttccagtcattaaatatttaaaattagaaaactagcccaaataataaaaatacaaaaaaataaaacttgctaattatctctttcctatgtcacaacaacttaattaataatagtgaattgtcaattgaattttctgagccccatgtatatatttggagaaaaattttaatatatttaggggtatatttttagagctaccaaaatatagagcagggaagcgaggacgatggtgcggtaacgccctataaaagaatcggccatgaatgctcctaacagaggcatcaaggcagcggttcctccccaagcattgacgtttgccgccgccgccgccgtcgactgcccgagtggcccagtcagatacatgaccagatttgaactgatcccataataggcgaatctctccgccacctccacacctgttcttccattacaattttcattcattcaacaatatttaatataaaaattaataaaaacaatctagtttaccaataataaaagccgccgatgtccaaccaccggaggttgacctcgaaaccttatgggctttatagtcaacggtgccgtcgacagcgttgactagagtcaaagtttcggcttcttcggccatgaactacaatctaattggacactgggaaccacgagccgagtgtgcagtatgaaagctaataattctgattccacaaaatatcttgatatattgattgtgctagcaagccatcccatcaagatgattataaaatagttttcagtttgatgagttccaaagcaactagagctcaccactctgtaggggtccatgtttagttaattactaaattgagagtatagtttttttctttctttttgtttatgtattgatgacgaaggcaataggacaagtttgtatgattttttataaactaaaaaagaaaatatctgttgttataagagtgaggggaagtcaagtcaattcagcaagtcattgggcacacgcaccaagtaccaatatggagtttggttcagaagaaagaaagggagcttattatcgccacacccaactccaatatctattgaccgcatccaattatatatagctgtccaaacaaaataataaatataaaagtggcaaatgacaaccacatttccaattatttaggttttttttttttttttttgacggttgtaactacaaatataacaatcaacccaagttacaaaattcaatttggaaagaagtgtcgccagattagcttcctctcaagtcctattgctgctttagccataccatgagcatgaacattaaaatgtttgggtataaacttcagatcaatagtagggattatagacaaggagcgccttatatcttgcaaaatatcagaaagagctgagagatccatcttcttggacttcaccttgcccaccaacagttgagaattttggcaagaggaagatgaatattctggtaccattgcaaacctgctttaagagccaaagcttctgcctttaatgaattcacctttgctggcataggaattgaaagcccagcaagtacaactcctttccaatctttaattacagctcctagactgagttttccatcggtagagttaatggcaacatctgtatagagctgataaaaccctttattaacctgctggtcttgatggaggacctggtttttttgtcatttgcaatctttcaaccttcttgagttgagctcccttgtagtccatcaagtacctaacactctaattgactaaataatcaacagtagacaggtgagatttgccaaagatctttttatttctgttttcccatatggcccataaaagacataatagcaacataaattcatccttagttaaatcaaaaaaaccagataaaataaaatctctaatatctttatgtttattttgaaagtaaaactacttaaaagaagaagatttctaaacctgtctcgctctagaacagtctagaagtgcatgagaaactgtttcacttaagttattacaaaaagaacaagaaggagcagaaagagcttttttggaaaagaggttagaagctgttggtaggatgtgataaaaggctctacaaccaaagattttaacctttggtgggagacttaaatttcagaacttcttcgaccaatgagtcatgatattaatattagaagttgaaggagggaaggaacctgcattagctaaatgataagctgattttacaatgaacatacttgaagagttcccaatccaaataagtctgtcagatctctcaaaaccccctataggaacttgaagaatactatcaacaatatctttgtcaaaatactgagatagtttattaaggtcccaatgagaattttgagtaataaagaaattgaccctgtcagaagaaggtgcatgatcatccttatatctaagatatctaacatttgggattcattgatcattgagagtacgaatggtactaccatccctgactttctaaataagccctttcataagaagatctctaccccaaagaagagtactagtccaagtaaaggaagaagaatgcccttttttagcttctaggaatgaattatgtctgaagtatttagctttgagaattcgagataagagagagttagggtgcagaaagactcgctaggtttgcttagccaaaagagcttgattgtgatgtatcaaagatcgaaaatccaaccctccaaagaatttagaattacaaagataagaccaagccttccaatgaatttttatagattttcccatagatccccatcaaaactgagccatgagcttttcaattttttgactaataaaaaaaggaagtttaaaacaagacatgacgtaggagggaatatcctgaataaccgctttcaaaagaacttccttgctagccttccaaacattcaagtgagaactgactctgtcaaggatgaaattaaaactggttttcttagagcgaccaaaacattgagggacacccagatatttgctaacaaaaggcttattatttaaccctaaattagtataaaaataattagagacctgtgagggagtattaggggaaaataaaatagaagacttgccaaagttaactttctgaccagtggcgaggtggtcaagctgaagagcctctttgagagcatcaaatgaagttaaggaagcatcagttaataaaagagtgtcgtcagcaaagagcaagtgggaaatagaaggggcagaacgagtaatggatatgcccttgaaattaccaaggctttattgaatcttgagggcagaggaaaggccttcagcacaaagaaagaaaagatagggagagagaggaatctccctgtcttaagtctctagagggaaaaaatattaaacctgatggaaaccgaggaaaggcaattactaatgagcttaatgaatttgtcaaggaagttaagtttattaagaatggccaggacgaaggtccattccacacggtcaaagactttttccatgtccaatttaagaccaacccatccaagtttcccttattttctatgaatgatggcatgaatcatctcgttagcaatgaaaatattagctaagatgagcctatcaaacaagaaagcactttgggttgaggatataatatcactcaaaactgcctttaacctattagcaatagttttggcaacaatcttgtacaaagtagtacataaactaataggtctaaagtctttaagagagataacattagttttctttaggaatgaggacaatgagagtatatttaataggggacatattagcattattgttcaaaatgttacgaatggttgtggtaaggtcctcccctagaatatcccagttcttttgataaaagtaggcattaagaccatttaaaccgggagatttgtccccaaagatctgaaacaaagcctctttaacttcaacaccactgaatggggcatttaataaaaggtaatgctgatcactaagtctgttatccacaacagagagagtcatgtcaatagcttctttattaggaccttgagaacaaaaaagagtggaaaagaaatggcaaaaataattaaaatatcacaaatacaataaagcttgagtaacgcttgtcaaaaatacaataagccttgaaaataaatatgaaaaaaa

SEQ ID NO: 380943 - DNA, 1184 bp, Cannabis indica
aaatctaattatattgaaataaaggacataaaatcccaacaaaattaagatacaaaatgacataaaaagtcattatgattcatgataattagtaaattaaatataatttttaaaattataacaatattgtaattaaaaaaatttattaaagtcattaatattaaatgataataatataaataaaaaaaatattaaatgtgtgtcaaatttgacacaatattatttatagtgctaaattactaaacttttagcatgtgaatgtgtcaaatttgtcactccattagagaagtattttttataaaaatatcaaaatatataacttgtataaagtgaactgaaaaccacttgaggttagctcaagtggctataggagggtgcgtgtgtgttggaagtcttggattcgagtcccaaattatatatgattgtaatatataaacgctcaaataaaaaaaaatgaactgaaaaaaggaaaaaacaaaaaataaaacaaaacaaaatacacaaggaataactcaaaaaaaaacatagagtatgctatgttaaaagaaaagttctctcttgttatttggagtttgggcatgctagagtcgaaatgtttaacttattatctaagagaggaaaaaaatcaggtagatatttcaagacctacgtaaaacaatcatacttatggtatgagacacaatatacatgcttgaaactggagcaaataacagatcaaaataaattatttagagttgaaattaatgcatggaggtttctacatacaacactatgctcttatcacttttcttcttttgggaaggtcaatcttgcttataaaccagtgttgggtattctggggaccacatattgttcttcacatactctacaatttcctcctgcaataattaaaaagaaaagaagcagttatcagataatgctacgcttgaaatctgcagttgggtttcctaatttggcaacacaataaactatagtggtctatctcatattctcatgttagcttacaacttagtgcactcgtgtcattaggttccttcttaagctttcaattatttttttttctttagaaggtcggccaaagcaagcgaaccctataagttaacacaaatggctcgtatggaacgtcgtattaagtcgtattgtattgtattatattgaattagattatatatcatatttatata

SEQ ID NO: 380944 - DNA, 1365 bp, Cannabis indica
ataataataatattaattaatcatggaaaagaactttggaccacttattattgatactcgcggcggggtctcaatcagattaaaaggacaaaagaaactggaccacctgttatatgatttgataattacatgtttttttttttttggagaagattattacatgatgtgagaaaaatgtcacccacataaggaaagaaaagtaaaatattacaagtagcaaacgtaaggtctatttaattttattttttaaaaagatgagggaaaattgtttggattagtcatcgaattcaaccattcacctctttcaaaaatgaataaatacaagccataaaagtgatccaaaagtggaccactttttttgggtcatttctcaagatatggagggaaggaagctgtgggaaagcatgcaccccaaacataaaactagttaccctcaccaaattcataggaacctaaatatgtacacttggtcattattgacacatccttgtcacaatatgcccacattctcaccggccgttttttttttccctccacgcaataatattttgacaagcataaactttcaataattatttttaaggtaaataatttcatatgtaaatttgaaaataacataaatttaatatttatttttagtggaataaatatcatatttgtaaaactgtaattttatactaattaaacaagacacatataagttctaaattgtagatcattgggtttataaatatgtagtattaatttttttttaataaatttaaaacaaaatgtgtactgacaaaactgaaaaaaaaattacaatttacaaattttgaatacttatatcgctaacatgaaatattaaatttatgccgcttataaatttaaaacttaaaatactgatgctatttactcacatttttattatatatatatttatgttaaagacacatatataatcaaaaagaaatttatgagtattggacacaaaaatactataaagtatttccaaataatttatttgatccaaagcatcaatttagtgtattattattatttatttatttttgataacatattattagtattagtaaaataaactacttgaaaatcgcctttcaacgctcatatcctgcaatccgggtcagttggatcatgaaataaaataactaggcctcagcctttaggtcaaactttgaaaaactgctcatttatagctaattttaaaaactgacctcctctcatcattctaaagagctgataattttaaaaactgctcatattttgtcttattttacaaatattattttaacgtacattaattaaaaaggctacaaaatttttaaaaataattcaacaggttttacaataaatatacaaaaa

SEQ ID NO: 380945 - DNA, 4954 bp, Cannabis indica
gagacgccaatgtctgacattgcgatcctcaagtgctcctctagtaaagcctcatccgattttcatgctaaggtttctgatcagaacaacaagttttctggtatgttttgttactcattcattgaatctgaatacataaattttttatttttaagtgattgttgaaatgtctctttgatggattgctttgtagaagaatttacagtcattcctgacacaccaatgtcagatactgcaatcgctaaatgttctagagtttcatccgttcccaagactactacagtgtccagttcagagtacaaattctctggtagactttaccttgtaaatgaatgtaatgcgcgttttgtgtttgtggaaatgcctgtttgatggatttatttagtagagtttaattatttaagtcttaatctctttcaactagtttgttcctttacaatacatcatgctttcttttccttaatctatctttgttgacataagattttcagctatactgtactttcagaaagaattatagtatatctatatctttgttctttcagatttgggcattaatcgactgatatgtttggagtctgataatgactcggaagatggatatgaaagggaaaagtggaggggagatgacattttggattctggttttgatgcagagaaggattttgattggaattctaaatttgttctgcccactcgtactacttctggtaagttaatgctgatcaacagtaagattgtacctttttttttgcagttctccggtaacattgttgactatgtccctcaaagtaggaatattttttaagatatttttaaatggctcagagtaattatgtgacatgtttgtcaggccatgctgatgaaacacaaattcctgaagacagattttccaacccagttctatcccccttacgaggtgaaattcctcaggtgcttacatcttgattcatgttgcttttcacaatataatcctctctctgttttcaaactcttgcaagttctttgaaaaattatgttgtggaattctaaagctcatctttagtgtacaaatatgaactttggtcttgtaatgatcttcataaatgccttagttggggattgagaaagtgaggcgggcactcattatattgatgtgaaagagaagtatagagcatattgtggcaatccttcaatagaaaggctctagggattaaagagttctgaggtagtgagtagtttggaaggacatataattgaactctagaagtttgggctatatgctttttaaagttcatacaaagatgaaagagtttgtaatgctgttaacactcttaatagagcaagtttcagtttgattgtctaataatagcatatgttaatgcaagattagcaaggttatagttaaatcttagtggtgttttttgtcatcccatactgattctcaatctgattcacagtaattaaaaaaaaatcatgttgtttatgagctggtgacttttaagctgctttatcttctgtaagtgtatgataaagttttcttatgtatttagaatctttataatcattagatacagtattcttgtttacatttaaatttgaatcagttgggttgtggtccctgttatggcatttcacaggtgagtgagagtcctggaaaagaatatgttagcacagaccagatagataacattgtgcagaacaacaaaacaaaagattatactgagaataaaaatagtacaagagaactaatgagaagaaaagggatagcagaagaggaaaagattcgcttaaaagaagaaaaaaaattgaagaagttggtaagtgtttcccgcgatttgaatgttcattcatgtacccataatttttttcaaatgattatgaggtttacttatatttaaattaatgatgaagcaagaaaaagctgaaaaagcagctcttaaagctgaagctgtagagttgaaaaaaatagagaaagaaaggaaaaagtgggagaatgggaaattcgccttaaaatccattgtagcagagattgatgcaaaagtaattgagatggggtcagttggaggtggggtattttaatttttcagctctcttctttagttttctattatattatgcatgttacaatggctttattcttcattccattcatttaacggaaaactgttttacaatttctttaggaagtttgttaacgaggtttgccgaaaaggggcttacataccgcataacatcaaatccaattgaaaagtctatctgttggactatgaaatttccggaacatatacccgaggtaaataactgtcccgagactcctcactgctgaagatgagaagcagtcaccaagtaaactacattacaatttagtcacttttcaagttatgtgatctatgtggtttctagtttttgttttgtttttggaaagctatgtggtttctagttaattgactcacttttataacaatgtttgttgtttatgcctttcaccttggtcaaatatatgtggctttgctttagactggttggctgtccatttttatgattaatgatacacaataaaatgataaatgatgtgttctattgtattgcatctttatggtttgtagttgtacacctttagactggttggctgtccatttttatgattaatgatagtaccctatttgatttttcttaattttttgttaagaactttgaagcgggggtattgccaacgtttcattttccttcttgcttgttgtctttttcttactaaattcaagtatgttatgttttcctgattgttgaacccaatctgatttacttcttcacggacactaaatcatgaatctttacagctttctcctgaaggaatagagattcaatatgtattactcgtgtatgaggccgaggaattttgtaaccttgtaacaagtgaagcttttttggaccacgtttctggggttcgaagtcgttatccatctcatacagtgtgttatttgacaaataggttaatgtcatttatcaataaaaggtgagagattacaaactaaataggttgaggctgaatagtattagaattttgcatttgaggcttattatccaaaggtaataatatttatgcaccactcattttattgtctcagggaacaagaacagttcaagaacccaacaaatcataatggttggcggcgcccacctgttgaggaggtgaatttcaaactaaaatattattctgataggtttctagcttctcattattgttgtttaagtagctgagtgtttcttacagatgctggcaaagttgaccacccactttgttaaagtgcgttcaagacagtgtgtagatgaggctgagctagctgaacatattgttggtttgacaagcagtttggcctcttgccaatttaggtaatttaatgcaccctttctgaaacaatgatatatgtgttttttttccccgaactatgtcttagttgactcttgcctcccctatttcttttgtctggcaattatgcctgctaaagtaaggaattattgaaaacgtgctcttatattttttcaaaaaatttacggttcttgttgacattggcaaatccaaagtgccaaactgttgcacttttatggtctagctaattatttttttgaaaaaatcattttaaattgattttaaaatagaaaaaaaatattttgatgcacaaaaataaatgttctaaatatttaaaaataaaagattttcttttaaaaaaatagttttaagatagaattaattaactctaattgaagtgcaacatttattggcactttggatttgccccagccacatgacaaaaaaatgttaaatttttgacagaacttaacaaaatagcacattttcaatgatttatttagtttgggagcattttggggaaggctctgcaaggactatcgttggaggagaaaacaaatttgtccttataactagcaacttaaacaaaatgtattttctgttatgattgagttgccatactatatgctacaagaaccatatcatatattgaacaattgttttaataataataatattgattcccctacttgaactagaacggacttccgaaattctgttcactctaaataagaaatgaaaactgtacttaatttgttttattgcagctttgcatataatcaatctttcactgctgttactttttttcttcctctattttttttttcattttcttatgttattattttgcagaaagaagttaacacgactgtctgtaaatgcaaatggttcccttatccctaaggattctgttgacaggaatttaatacaaaagaacttgtggtatgatacactttctaattttcaactcagatgtatgcggtgttaaactgttcattactttccttttagctatgttttgactcgtgttctttgtgctgttatatttgctattccttcatatctaccgcagaattttctatttatttatttggtgtgtgtggggagttgtcatggatactacttttttgttgttaataaaagttgagttttacatttgtctcaaccaactttttgagcatctcgatttttaataaataaaacagaacagaaaactgagctgctgagcatcacttttttctactgacatctgttgcatccaggttaaaagctttggtagctatcccaaaggtacaaccacgatttgctattgctatatggaagaagtaccccaccatgaaatctcttctgattgcatacatggacccaagtaaatctgtaagtgatggcaaacaaaactcttttcattggtacttttacactcttgattcatcatactattgaggttgtgttgcttttggttggaggtaatgaaatagaatgtaattgaaaggaattagtttttattccatctctctgtttggttgcattttaaagtattggaatgtcatttcaatggaataatttcttttccattttgatagaataactattccattttgaaat

SEQ ID NO: 380946 - DNA, 1470 bp, Cannabis indica
tctctctctctatgtatatatatcttaaaaataaatgtgtaattttacttggtacacattaatagaatagaatagaatggtcccggactaaaatttaaaaagaaaaaaatagaaaaaggagagagtaattataggagcagtaatataagttggtcccaaaagcagttggacagcattggggtgtcatcttcacttaacagtaatgggctggacagcatgtgcaaggggaggaaacacagtacgttagtcggccagattaggctgtacttccctggcattgactttcctgggcctattttgtcatctttataggcccatttatcatagcccaacacttaattggctaaaccaaacttgttcaccttcaacaatactctctctactttattacgactcttaacttttctttacataaaaaccaaataaagggaaaaggtcacatttaacttccactccaccacagttaatatagtagttaataatatcattactataagaaaaaggaaagaccatagtaatttacaattcataactccccgtcggcattgtaattgtaaatatataataataatatagaattaattaaatgaatccttttttcacttggtctccaccattctttttagtttgaaaaacatgcccttttgtcgtgctttttctctcaccgttttgaaaaaaccaacccctttacaaatttataattaatagtctttgataaataaaaaccagtcttataatttgattatcaagtcaacttatactattctctctctcttgattctcacatacactttcgttaaaaacactctaacgtacagtaacaatgtatcatcaatcaattttcatatatgtatatttgttttttcaaggaatcattttggagctgcatttgaacttcaaatgaaaattgtagcctagtactactagtctcgtgctctttgcacgtcctaagaaaatattgtatcattacttctaataattattggaaaaatgttgacaaaataattgttgttacattgctaaaataattgttgatgcattctaataagtcaaaagttgtgttaaaatcgacacgtaaaaattgtgttaaattcaacagacacttatatatacttaaatttattttttagatattataatttaaatttaaatttacatatttaaaaaaaaaatttattgttattttttctaaaaactcatcgatatatttttaaaaattacttttcgattgtttttttttacatattaataaaaaaaatttctattattatttttttaaacggcacatatttaaaaatatgttttcttattaatgttttttttaaaacaataaaataaagaaagcctttatgatatgtgacatccttacttattgtagttaccatttttttttttatcttttctaaaaaatacaattaaaaatataaagaaataaaataaaaattaaaaatataactaaatatacataca

SEQ ID NO: 380947 - DNA, 1764 bp, Cannabis indica
atatatatatatatagacatacaggggctgctgggacattaaaaacattattttttactttaggtttaattagaaatttcgcttcatgaattttgacatgtaccaaatcatgctcccttaaaatttttaaggttgttaaaaatactccgtgaactattgagattgttggatttaaagacttttgtccaattttaataaaaaattcttatatagatgaaagttcgatcaagggatatgatttaatttatttcaaaattcgagagacataatttggtatatataaaagtttggagagcatgatttagtacataaacaatatggaatgaaattagacaaaagtccttaaatccaacaatctcaatagttcaggcaaagagcatttttaacgaccttaaaaggtcgatgacgtgatttagtacatattaaaattcagggaactaaaatcataattagctttttttttttatttaagtgtttactattttattataaataatttgagagtagaattcaagacctctaacacacatacttcataaaactatctaacatgtcttacacgagattatgtaatgtgtatactctataattaaattgtaaatatattattgtttataaaaaaatttaattttattcaataaaaactttgattttttattttaaatctttaaaatgtgtgggtcctaaacacgggtctaactcaccgggtgagccctctatatatatacattaatattatacacaaatattatatagagagagagagagacttgcccaccaaagtagggctagccatattcctgcccaaagcaagagcactatcgttgatatctcattcaacacagggcctagtttaacccctatctctccatcaatatataatacacactacgaagagtgtgagtgtatatatttgcctagaatcacatttggttaatttggcttttctatgtaatggtcatgaccactaaaattataaatttacagtcatttatatatatgtatatatctatatataaacgtacgttcttcactattaatgtttgagttaggttgtgaataggccaaatagtacgtagttataatgaaaattattaagatatatatagttttttggtcctccaattattgactttttccttccaaacattttggtttgcataaattaaatacatgaactttatattatacataaaaatgtcggtagcaatattatcaaaattttactattttggaaataggaataagacatgtatatacaattaatggaatggaatacgtacagcaataattctatgacataaagctaatattgtaatttaacacttttatctatatactagtatattgttacgtgcgatgcacgtatgctatgttttatattaagtattatattatgagttcggaaggaaataaatgaataaaaaataaataatatttaatttagagagatttgaataataaatttaaattaaatttttatgtccagtaaaaacatattggaaacaataataataaggttataatatatgttgcatttgttccagttctttaaataatagcagcaagaacatctttgacctgaaaaaacaaatattacaaaattaagaataaacaaagcgtgtgtaaattagacaaagaaagaaccttcaattctcaaagtctcgattataaagtaacaaagaaatattaaaatttcatctgctcattataaagtcaccttcactcaaaatagcacaacaaaagtaacaaagaagtattaaa

SEQ ID NO: 380948 - DNA, 1889 bp, Cannabis indica
ttttttttttttttctaacaaaatggaaaaaatcatgaacataacatatagaattgcctcatcatatgctaagcgttagctccgcctagattgaaatcttaaatatttattatcccctaaaaaagattaattaattaattaatatttatttattatcacagatgaagatccaaactcacatgctcttgtacactagacgatttggagtcatgataattaacataccggctctgatgagaaccaataacatgaccactactacttgacccaccaacaactaaacccgacgacgacgtcgttttcatttcttcacctgcgaataacggcattacaggcccatggatcgaccggcttatagtcggcccactttggacacccgccggaatcctccacaagcccaatgggctcccatttatgggggtcgccaacggagcctgaccatacgagctgtggccaccataatacctagaaccgctatttacggttgttgtagtagaattggcgttccaagaaggataagccggagccgcggctgctgagtggccgaggcggtagttgattagtccgtagacgtgagcatcagtaaggccgccgtgaaccatggcggactggaggtgagctcgcttggcgtgttgtctttctctcttgtgcgcgttttggtggcctccaagggcttgagatgttgggaagtttcgacagcagtaatggcactcgaaacggcggctactctctcccccgttgttgttgttatcattgttgttattattatctttggatgagtcgtcgccgcatgagtttatagtctctgctgactcagacccatccatggcggtggtggctttggaatcagtacctccgccgccgccgccgcctccaaattccttcccaaagagtctaattccgcccttctctttaagtggggcgggtactggacgtatgaaaggtagctgagagaatgactccacgttcatgaaatcatgagtctctctttcggacttgtccatgaaaattatacaaaaatatattaatgtaatattttataaaagaatgaagattggtttctttttagggttattaagaagaagtgaaagaaagaaagaaagagagagttttaaggtttatgtgtgtggtttttgtttagaggatgagttgagtatgaatgaattgaatgggtttgggtagtgaaagaaagaaggttttttgtgtgggacctataaaagagaggggtgttgtgtagggatgagtgtgatccgacgacaattggggctgacccatctgagagtaaagcctgacaacgccaagtttgagagtggcttccctagcttctctaactcaaagtactatcatctatcttaattgcatctttgctaatatcctttcacttttttctttgttttttctaaattgtttcataatcgaaagtgatctctcctatacatatatactgtgtgaactcaatgggatcccagttttcatgtcttattcattaattcattagttttcaaaaatatatatgtatgtatatatagtgttaacattaaattcaagagaaacaaagaataatttgtggttgaaaatttatcgctattatattaattgaatttcacatttcaatatatatatagctagtactatattgttcaagtttaaaatataattatgctaataataatataaatattgataatattttgttggtctctaagacttcactgtatgttctttagttttggtttaatttttgatagatttaatcacaaattttgctttaattaaagatgtgatatgcctactattaataaattggacatggtgttaataattactctcatcatgtgttcatgaactagtcatatatatcgtttggaacgccgtattaggtcgtattg

SEQ ID NO: 380949 - DNA, 3690 bp, Cannabis indica
ccgattctgatccaacggtgtgaccttctcgatcctcattttctgacgaagcacgtttggatttggcagttgccggcataaccgatgctttgcgcttagatttttcgttgcgagatagagcttgagcctcagtcaacaaagcatccaagagcccactattctctcgatactcttcaaaattgaactcttcagcattatttccaacacctcctcctcctcctcttccgccgtttgtgtacgacgaagctggcgtagttgttgactgaagcggtgtcgtttgggtcgaagggagctcagtaaccatattcacccgatgcgacaacggtgattgaattccgaccacagcggcgtcgaacggaggtcccgtgacaattgcattgaagttgctgaaattgcaattaaaacctccgggatgagcgttgtactgaaacgcgggattggggagtgtcgtttggggaatcggtatgtgagtagtgctctggttaagcattggaggatgagacgaggatgatccgaatgaaaaaacaggggaatttataggcaaagcgaaaccagtgttatttccattgaatatctgggctgaatcggatggttgggaatgaaaagccgaacggtgatgatgaaaaggggcatagttgggcttgggctggtggaattgggatgaaaacgacgaagatgatgaagtggaatgcctttgagagttgtcgttttggtagtgtcggatgtcatgtgggtagagtggaagcccagctctctggcgtcgtttcattcttgtgttccagtaattctttatctcgttgtcagttctacctggcaactgaaaaaataaaaaacaaagagaaaaattatgattgggtttgaactaataaagaaaggtcaaaagagaaagagaagacaaaagaaacttaaaggtaggctacttcagtgtaaaaaacgtgggtcccaaaatgtgggtccaaaaggaaggaaaattcaaagaaaggaatctgaatttcaaaggagctcataggattcataaccccctttaatatattttttttaaggataaacccctttaaattagatattacaaaactacattaaaagattattatttttttttcttatatcgaaattattttgttgtgactttgtttatttaagtttgagcaaactagcgaaataataaattttgggataaagattaatgtaagagaggaaaacaaaataggtaaggtagtaaaaaagtaatagaatttatggtagaattggaatataactataaaaagcttaaagtcacgtcaagaaagatagtcaaagaaaggaagacattgaccaagaaaataagaaacagatgggtctaatttagattgaattggaaaaaataaattaaatataaaataagataaatcttttgaaaattgatgggtaaggggagagagaattttcaagaacaaaatctaaaaaaatgaaccacaactgactcgagataggagtgttacatgtagaaaacgacgggtaaatattcaagtcagaagacagaaatctctgaataatatcatatgtacgacgctatcttcgtcttataactcattttattttaccatttacccgttgatatatatatatatataaatttatatatcacctttttagcaggcgaataagtagtttctgcatattcatcatatgtacttttcaataattaattataataataataaaaaataaaattaacctgagaagccatgcgagcccatttgttaccgatcttggcgtgaagctcaataatgatccgctcttcgtcgggagaaaaggaacccttcttgagattgggcctaagatgattggcccatctaagtctacagctcttaccgcatcgagccaagccagaattcttctgaaccgcgttccaattcccttcgccgtgcttcctaacgtactcaaccaggatcgcatcctcactcgtggtccaaggacctttcttcaacccggccccacctccgagacccaccgggaccatcttcctccgcagcctcctctgccgccgatctttcatctactgattcgttgttcatcagcatcatcatttttcgacatatattaattatatgatcagtagctagcttctataatatcgtataattctatggaattggtgttttgtgagaaaagttctctcctccctctaaacaagtgagggaaaaatggtagaaagagaggagagaagaaaaagatcagtgataggattgttgttgtcctatcttcgattaattattgttctctagagttatacaccagatttagagagagaatcaaagggctttacttgtgtgtgtgtgagagagagagagagagagagagagtatatgtgtgtgtgtgtgtaattgggagaataatgagataaggggggtggtggtgaaagaggggatttaatagaatagaagggttagctatgatttcggtccggtttgcatgctaagtggtacgtctatggacgcgtttctttttgtacagccttgatctgtaaaaacaccacaccctccttatcttactctttcttttctttaataacttattcccaacattttttattaaaaatagtatttgtgttacaaattattctatatatttttaattattaaattatttgagaatatatatagcataataattgtatacacagtaataaaggttaaaagggtaaaagttgaatagaaaagagtgctcatcatttgatacttattaagagatatattttagtaaaagctctatttcagaaaacaattggttgatcttgttttcgtgcaataaagagatatatttcagaaaaagcattattgattactcttttattgtgacttgtgagttacaagtacaaatccaggagagtttggtttaaacgatttacaattatatagcataaggtagctagagtttaggaatatatctaaaataaaagaacacacaccaaaatcatatcaaacttagatttttgatcatgctatcatcaccctctagacaatatactcccattgtagagccaccgatggtgaagacgacatggtatgatcaggtatagttgatcattataattagattctaaacacacaccaaaagtcccttgtcaactatagtataatacataacatcatatacttcgtttcactgaaagattaataatatgatcgaggccatccattgtctcgatcacaattgcagatttgagattgtggcctcggtgaaaaatccctagctatagcccaaaaatacaaatgatgtgtatatataattaagagtaagatgttcggtgacgttttatatatataactcaagatgaatatagtttgtttgaagttataacaaatatatagttggtttcaagttaataagtgtttataagtttgcatgaactgggcatgtaagttaatttactataaatatgaatatgatgaatcagcaaaaatgttgatatatattttgtttcatagcaaggacttgttaatgatgcgttgtataggggctgatgtagagaaagagatatagtacattatttgctgggtcggctctcagtaaaaatggggcataagtaaaaactaaaaaatttaaaatttgagtccttactataaaaataaagaggaaattacactctaaaccctttttatattgttctcttttatttttaccttcttttttaaaatctatcatttt

SEQ ID NO: 380950 - DNA, 4975 bp, Cannabis indica
aaaagatgaagggtatttcagtaaattcattaacctcccatttaatgagagtttagttttcggggtcatttcagtttctctcttctctgccttgaaactatttaccctcctctcctccactgtttccgtctcgttaaaagcttaataaaatggcccctcaaaccaggagaacgacgtcgtttccgcgtgtgatcattgataatgatacagactctgaacaaagttcgtccgaagaagaggaagaagagcaagtagaggaagaagaggatgttgctgggaggaataatggaaaggaacccgaacagtctttggaccccaagaacaaaggaaaagcacccatctgtattagtctcaagaaagtttgcaaagtaaccttttttacactttccctgtactatttttctcgtccacttcctaaaattattattattaatttatttatttctatttttgcgttttttggggttcaaattgagtaggtatgcaaaaaggcgggacatgaagcggggttcaaaggagctacttacattgattgtccgatgaaaccatgcttcctctgtaaaatgcctggtaatcatggaaatgactgacttaatagtttgttttttctttcttaatgagattatcagaaatgatttgaattttgtcttatggtggattttggagtgaaggtcacactacaatgtcatgcccacatcgaattgcaaccgagtttggggtcatccctgcatcccataaatgtagcagtaaccaattgttctatgtctttgagcgccagcttggacatacgcgatcccaggtatggatcatcatttgtttttaacgaaggaactttaaagtgttgtgtaatatatgtatccatacatacggttacttctgtctaaataaggcgacatatttatgtttcagtttcggttttgaacttgtttccctgtgagttgtattaagtgccgtgcaatctttactagatgaaaataagttgaggcaagtcatgttcttgccttctccaaattgagaactggaactgggaattatatttttaagtagagcattttgctgtctgattatttggtcatttggaagttaaggatttgagttttttcaactaacatagtgatggcctaactttcttggcattttaggtcttattatttttgcaagtgagatgtgtattgaatatatatatattatataaatggaggttgctgttgtagatagactcgcataagtatacacaatgagagaaagagagagggagagaggaaagaaaaaatattgatacaaggtctcaaaataatattgtcaccattctttctctacaatggaaaataaacactttgttctaatctatacaaatgttcttatctagaactctatgaaattgtcacgcttttcttattatgatttattggggcaaccattgcaggttagttaatttcggtggtttatttgttcatcttttttaatttgttgtttgttatattttgcttcatgataggtcaaaccagtgcgcatcattccagatcaagtttgctgtgcagttattagataccacagtagacgagtgacaaccttggaatttcacccaacaaataataacatccttttatctggtgataaggtttgtgcaacctgaaattcactacttgagtactttgtttgggcttttgtgtgtttttttatgttttttgatgagttgtttgggcttttgttaatcattagtagttgacacttttctctctttttggtttacacctattgctacacaaaaaagaaaggacaagttggagtgtgggattttggtaaagtatatgagaagattgtatatggaaacatacactcgtgtattgtcaataacatgaggttagttatctctttattgtgccatagcattgttgtatttgtctgtttttcatcactctgtatatgttttactttgtgcttctccttccctttatccgattttttttttctttttataaactttgtagatttagtccagcaaatgatggtacggtttatgcggcatcatcagatggaaccattagctgcactgacttggagactgggatttcattatcccttctgaaccttaaccctgatggttggcaggtattgattcactttctctttctttatgtttcaaaatgatcattatgcaaattttattcaatagtttacgttcatagctaaggggtctatttctcatttgttttaaatggtgagcttagatatacaattaatgtacattttttgcaatggaattcgttactctttattttataattttttaattcttgtgtttgcctttagggcccaaacagctggaggatgttgtatggcatggatcttaacaaagagagaaatgctgtgctagttgctgataactttggttatctctactcgtaagtattcatttttcttttctttttggtacgaagttttattaactgatcgggaggacactcgagcaaattgtcaacaacttgtttaagcaattgttgctgtctttctttgctcaatttcgtcactctacattattcacttacataaattgatcagataatgtctaatcattttcgggccagctcgttttaattgcacacctcagtgtggcttggcatgcgatcatttatatccatcgagttcttgatttaggtcttttaactcttttcattggaagagataatgagcttaagtgtgtcaatcttgaattccctttgaatatagtgtttacgttttcatgtgagatatttatttgcagttctaatccgctacaatttatatatatgtactttattaaatacttagggtggatattcgctccaacactaaaactggtgaggcaatcttgatccataagagagggagcaaagttgttggactccattgtaatcctgttcagccagatcttctcttgagttgtggaaatgatcactatgtaagctttgtaatgcttatttgtatgtgaatctgtaatgattattgagctctctatccttccttctatctaagtgtggccaccacctttatccgtgatttttgtatgtataaattaaaatgtacaaatttatgtttatgcaacattattgtcgataatggaatgcttagtgaagtacttcctttgtacaatttgaaatacgtgatgtttatttacacattttgtctgtaccactatggtcatacaactcttgaaattgacatttgttttcacctcaggcccgaatatgggacatgcgtcgtattgaagctcgttcttcattatatgagctagcacacaaacgtgttgttaattctgcatatttctctccactatcaggaagcaaaattgttaccacttcgcaggataatcgtcttcgtgtatgggactctatatttggcaatctagattccccaagccgagagattgtacacagtcatgattttaatcgtcacttgactccttttcgagcagagtgggatccaaaggtgatccatattttcttgtagtatttatctttcattaacttatgcttttcttttattatttggagaatctaaaatggtttacgttgcaggacccatctgagtcccttgttgttataggtcgttacataagcgaaaactataatggtgctgccctgcatcccattgatttcattgacattagcacaggtcaactagttgctgaggttattgatccaaatattacaactattagccctgtgaacaagctacatccacgggaggacattttggtaactggtagttcaaggtctgttgttatgaacacttgcacattcttattacacttgcacgttcaagtttttgacatccctgcatggtttctgatgatttgttattcagaattcaagtcaattagcatttgatagattggtcaacctggttttgattagtattaggtggtttgtactgacttcttatacatagataacatggatgcgcttttaactgccattataaaagctgtttaatttgaagtttggagtcatatatgttcgaaaggaattaatgaaactttgttgctcgctggcccgtcttcactttttcttgttggttcttagttgttaatgctaagtgttaacgtactcttgctacacacttccaggtctctttttgtctggcggccaaaggagtccgagagtgtggaaccgaaagatgaaggaaagattgtagtttgtggtaaagacatgaagcgcggtggtggtcatggggatgaaagcgataattctgatggtgacacattcagctccaagaaaaagaactcgaagggtaaaaaatccaatcttaaatcttacaagtcgataaataagaaggtcaaacgctaatctgagagaggcattcccggtgctaactgattatggagttcctgctcttttttgttttccttgagctcctcttaacagtttacaacatctcctaaaccagcagcacagctctcacccttttgtaccaatggtgggcgttttacttattgtataatacaagtttaagttataaccaacgtcagcctttttcgccccacgaattgaaagatgcactagtgtctagtagtgtagtatgtttcgcctcagaaaaagtaaagctggactttgttcacactcttttatgatatatttggatattggtgtcttctgttattctcttgttgtgggcgaataactatttggtattatgtgtttttatcgaaatacaaatttcatagtatttatatttttaataatacctatttggtatataatatatttaatattccaagtctaaattttatttaatgttttttcaatcaagaaaaatattttgcaacttgaattgacaactcaaggaagcccctcacagtacaaatttacaacccttttactatattgagaacttacctatctatactagaaatctcctttaatttataagattaagtctactctttatatttttctggcattttacaattttatatacattattttaattaatt

SEQ ID NO: 380951 - DNA, 4489 bp, Cannabis indica
tttttttataagaaaatttgacatttcatactaaaatatcacacttgatacaaaaataaactcacaaaaccaacatagctaaattgttctttaattttaatttggctccaaaaatactcctcccatttcatttctccccaatttctctatatttcttctctctcctctttcttttctaatctctcaaactcccccccccccccaaacggtgtaaagccaagccacaccaacccctgacgatagaccgagacaacccaagcaaccctcgacgacggaccgagcccagccacccaacccccaacgacgaaccgagcccacccaaccaacccccgatgacgaactgccggtcattctcccatcgtgagacgaaccaagcgacccattcgaaccccaacagccccaaagaaacgatttgatccccgatagccaaacgaaccattagaacccaaccattccaacctcgataaaggtgcattttttgtgtgtgtgtgtgtttttttaatttttttagttaaataagcaattatattaagttatttttttttaatcactgaaatttgtatttaatgtttagatttggaattgtttgtgtggtggaattttttctaggtttgggacgaaataattttgggttatgagttgaattagcaatatttaagcgatgtttctgtaattttctctgatatggtgggatttcttaatttttgctgaatggtactgggttttgagtgaatttcgcaattttatgtgatattatgctattatgtgaagtagaaaacataactgtagtaaacgtcagtcattgtgcgacattgtgcgatattgatcaatattatgctatttatagtaaaataaacttggctgaatgtgtgaaatgaatgttaagcgattttatgcaatttatagtaaaacaaacttggttaaatgtgtgaaatgaatattaagcgatgattgtgcaatttagaattgtttttatgcgagttcttgcgatttattttgcgacattgtgctatttataatcatctttgtttgtaaatgcaaatggctccagaactcattcttccattgcctgagcatttttcggggtgtatcacctacagagggaacatgtattttattttaataaaggctaagttcgaagcctttaagttgactgacaaggtcaagaaaactcttgaatgctagtgatttgaaattctccagggtgattgtacatcaactattattgaggaaaaagaaattcagtgaggtaaataatgatgaagactagttttacgtgggtaaacccgaagccatatttggcgatctgagttcggtttgatcgcaggcctaaagatgagcggtgacccctcgatagaagaattgaatacacaatgtgattctgatcagatactgcgagactattttaacaatataaaaaaggtgacctttaaaactaatagcttttgaggcatgtgacattgcatacaatgtgtacaagcttgggttatgtgcatttattgaaggctttttgttgtcacggtctgagagtgtgcatatctggacagatatgctaaatttagtagaaaatgtatagaaattatttgagtatcctgggggtctcctttcttatcagaagtttttgtcttccaaaactaaaaatatgcaatagcttaggcaaaaatacatggataagatctcgagtaagaaaaataagatgaagaagaaatccaaggaggagaaaaaggttactcaacgagaaatgaagtatactgtgtacagatatgcaccgaccctgcaatattaggcgtttaaggtcatccaagatgtggggaagaaatatgaccagtgcaaagggactagattccctcgaatgttaaactagagcacccctaattcggttatgaaacacgatgtgaagcaaactgatgtggttgcactgtttaagaaaaggatatgtgaatctttctctatttatcattgttgttctgatatctgttttgctatgtgttatttgtatttatgtgcgacttttgtagatgttgttcaatatttatgcgatattttttatgtttattcgatatgtgcttaagtttgtgaaactttatgagattttcttattttattgcgatttacattatattttgaacgactgcaatatgtgtgcgacttatcctaaattttgtatgccttttttattttgcaatttaaattatattttgagcaacattatacgatttatcttaaaatttgtatgcaatttttgtgcgatattggtcgacattaatgcgatttgtatttgttttgtgatggttgttcttcaaattgtgtatcctcagaattgggaggttgaaaagtctaattgtgagggtgaagtcctcacagtggatatgggcttggatgagagagaagaaacacaagttggcacacaagattctactgtatttgagacccaagcaaaatgggtgaccggctatgtttaaagtaccaaaatcattccactatcaccatcgaaagaaccaatggagcccaccacatctgccactatgccctcaacctcaactcatactgccaatgatgtcgattacctagggttggcgaagagattaaaaaaggttaaagcccaacaacttgcgattctggctgcacaaactgagatgaaggctacctttctgagtagtacagaaagagatgaagaatcctatcatggatcaaattgcgaccatgataaatttgttatagaagcaaccatcagaatcgagacagtcatcacagctggcagacgataaaggtcatgagtatgcttgtgatgaggatgatgtgtatccgaaagattaggaacccaacgtagatggggttctttctactccaatagatgccattatgattgccatcagtgatacacagtctcaggttgtgcaacaattagatgggccacctcctggagtgaaatttttcacggctaggagaaaatggaagtctgttttcttgaagaactacatggatgtgaagaaaacaacgaattaggccagttaatgtagatactttgaggccagcaggctcacacctttacacatttttccaaacgtggattacttactcgagggacaacgaccgtcctaacgatgttcacactggtagtgccaatcagagtaagttcggaagttgatggtggaaggagaatgactcaatgatgttataagctgtttcttaactgtttaaatttagtgttttaaacttttgagcgacatttatttatatttatgcaacgtgtttgcgactttttgcgatatctaacctatgtatttgcgatgtggtttgtaaaccataaatacatcgcttaaactcgcaaagaaattactaaatatgcccatgtttgatgtgtgcaacgtctgtgcaatttttttgaaaattatatgcaatttacttctgataatttaatttgtttgatctttgtgcaagctatgtgcaatgtttgtgcgacttttgtgtgatttactgctgataatttattttgtatgacatttgtgcgacctatgtgcgaagtttgtgtgacgtgtttctaactttttttatttgcaatgcagtaaattgatgacatgatgcacttgtaaagaagaagacaaaagcttttccctaatgtgtacacttggaaatgtgttattctggacacatctgctccacagatatttcagatgtattggaattttcatgatgatgataggagcacattcaaatgggatcaatcagttcttgattatgtggtggggatggagcatagacacttgtcatgttgagagaaccaagaatatatttactttatgttgaaccctcttgctgagcataattggatggctgttgaggtagacattgagaactaagggattgttgtatatgactgtgatatcgatggcacgactaagaacaacaagaaggcatatctgaagccttggaccgagctatttgcatccttattacgtgctagtggttattttcaattaaatagttgtgtacttccggttgatttaggtgatcttagccaactcccaccaatgcattatagaagagctacctctaaagttgtactacagatgaaaaaaaaaagtaaatgtctcattttatatttatttaattttgtagtcccttatgaattacttaagtcaattgtttctattagttttatatttttttaatttgtagtgataattatggaatctatgttgttgaatacgtgaagcattacatgttggatcgttcacttgagcatgttacagatggtaacatgctcaactttaaacataggaatagtgtagacttaatttactagagtttaatttaatagtttactgcatagtatattttttttatgattagtttacaaattttacaacactagtatttttgcacatactttaatgatacttaaagattgtcttttaatcgtatattttgtcaattaagtaaattattacaatatcatagtcaactaaattatggcacaaactccttt

SEQ ID NO: 380952 - DNA, 2403 bp, Cannabis indica
tgtttcacttaagtccaccattaagctaatacatgacataaatcacaattgatattattttattcctttatccattaattatttattctaatgatgttatttcaatgttagtgaacaacataatcaaagagtttgtgtctagtgatgatttgaaatcataagatattatctatgtttagtagtaggtgaggtgaagaggatagttatttgttggagggaatctctcctctcactcttaataaacaaagaaattaagagtgttttgtaaaaatagctttaatcaatacctctatctctctcccttcatccatctctcctctctaccaaaaatgttagatgtgttgtgttcatttcagataagaaccttacggaggaggatgtaatggaaatcttttaagaaaagcaataaaatatcctcaagcttagaagtgcaagtgtaacaaaattttcaactcctccttcactgcaccatttttatagttaaagatcatatcctctaaactgatctaaccttctcagaacataggtttttcagtatacaaacctgaattaaattgtaagcataaaccgaaaagaaattacgaatcaaaagaacagaagccaaattgattccaccaaaatgttttaaggaatttttcaggacaagaatgtttccttaagaaacaatacatacaagaacatgacttaattctaaagacaattttctattcaaatttctgagcaaaagaaacaccacacaccacaataactgcataaacagcacaagtcatgaatacagtatcagctcccttcttaatcatcaaacctatctctaaagtattacctaattgtgtagccaaatcatttacatcggccgatggggtgttattttctcttctagttccttgtatttgaagaagttgtgcaagcacaaccgttgcatttgtaagcaaaactagatagagaggcctgaagcttattataatgctctttatgaacttgctgcctagtataggaaacccaaaatatgatagaacaacaaaaagggctaatgctattgaacaaaaaaggcgagtaagctctgtggctgcaagggcagaagtaatttgatttggagtaaaaaacctgtatttcttctgtgtctgagattccacctttgtttctgtagccaaatcagaaactgaagcacttggatcccttgaagagaccaaagatgaatttgacaagctgtcttctgaagctgagttctggcttcttctaggttcaaatttggtctgcaatttactcaacataggcatcaaactgcttccatcaaaatcatccttagttgggacagaaaagtcagtgctgtgattgtctttgggcaacacagggttagattttctgtcctctccatgagaagaatctgcgaatcagtaagtaagacaaaattccagttcattgttatttttcatagcaaggagaacaaacaaagttttcaagatttgacaatggttacaaccaaataaaagaacaatctttaaggaatcaaaaccataaaaagcttccaaaatgtgaatatgaaagaagccccagtaactcaggaataattagacctagaaatcactataatgtccgaaaaacacatcttcagattggcacctcagatgacatggagaaagttgaaattaaagcataatgaaaatccccaaatcgaatttgcaattataggttttcgaataattcactgcagtaccatgtccaaaataacatattcatgtatgtatcatgattaagaatatggagataaggagaaggagagagagaggtaccgttgattgaatcaattggacgagaatgatagtcgtggtgggaaagcacaggcacaggctgtgtatcttgattaagagtatggagagaaggagaaggagaaggatcaggttcaggaaggttatcgatttggcctgtgatgagagcaagacggtcggaccctcgctccaaaatcctccttctccgagcttctctgctgttcgacgccattgatgaagcaaggaagcttttattaattcgatttcaatttcttagccaaaagacggacccgaccacatcaagaagaaaagaaagggaaatttgattttctatgcttaaaaaatcctaaaattatattcctaaacctaaatgttataacataggcaatatatgactacttttgctttatccctataatacccctcacatttgaaccaaagcaattgtctctctctcggccaaaacacctccaccacctcctgcaccacctccaacgacgacgacgaggaccacccagccccctctgtcggacccgaagccttaacccacccagccccctctctctcttcgtctctctcggacccgaaggcttaacccacccagccccctctctccgtcgcgaagcctcaaccccga

SEQ ID NO: 380953 - DNA, 1982 bp, Cannabis indica
tttcattaaatcaaaaaaaaaaaacgtaactctctttcccctccaaacttttttccaaactcaatcacatctataaataccaataaccaaacccaacattcttggccattaacaaacacttttcaagtttcatcactacgtagccacaataatgcagtacgaaacagagtcatgggtcgggtcgaataacggttacatggatattgacccggttgagcacatagagaggttagcctcagacaacgccgtggtcattttcagtatgagcagctgttgcatgtgccacgcaatcaagagactcttctgtggtatgggagtaaaccccactgtacacgagctggaccttcaccccactggatcccacctccactctgctctactcactcttctcggctcctcctccgcccttcccgtcgttttcatcggcggaaaactagtcggagcaatggacagagtcatggcttctcatatcaatggtactcttgtccctcttctcaaagaggccggagctctttggctttgaacatttcaccaccaccacaccaccataacaaccaccgtcgccgtcgccgtcgttttctttttttgtttttgcatagaattagaaaaaggttgaagcttgcagaggtagtggagtttgagtgttcttcttcttttgaaaaatctaatctaattaagtaatcagaatcactagttaatatctatatatattatataattctttttttttcatgttatgatttttctttgtattttgcactaattaatcttttttttgtgtgtaattttctccctcctctgtataccaaagaaaacagaaaatgaaaaagaaaaaaaaagagttaattaattaaattttctttttttgttttattttatttggtctacttttgaactgttttattttatttttattaactagctagtacattgtctttattagcttgttatagctaggactttttttttagctccaagtttatactgttaataatataattgaatattcagtcttattcattttaatttatatatgtatatatattttttagaagggtcaacatgtggagtagtggacccctgttcttttggtcaaatgagcaatattgtaatatacgaacggtgtcgtttatagacaaacaaatccatatccacagcaattagcatcatagcatattgtgtgtttggccaaaagagttaaaaaagtgcttatacttatacagtgtgtttgactttgaccatatattgtttgacctttgatgacgtttttgatgtataatcaatcaccaaatctagatttgcgccagaaaagtagcttattttattttattttaatttatttaagttctctttagcttaaaaaaagtagcttaactcaaaagctcaatttgggcccaatttttgttactgtggcacccacttgccattttgactgggcctgacctcacttttcgacggtgatggtgggcttgagtccttttcagtgagcggtcatcaaatatccgtactcatagggtcccactccacttctttgatctttctacgtacggccacgtaagacaaacaactagccacttcttctgccacgtaggatttgatatttgtaatttttttaaggtcggtatatgtatgacgtatctttttctttttaaccacaatttgcaatttcattaatgcaaatcagctattaaattaacggtctaattttcagatcgctttataaaatttactaaaatagaaaacatagaaatagactataaacttaacggtgttcgcggtgcgggtggtgcggttttttaccattttttcaaaccaatctgcacatgcggtttttctaatttttcaaaccgcacccgcactgcaatactaaaaaatcacaaaaaccgcaccgtaaaaaataatgcgatgcggtgcagtttttgcagtttgaactatcacaatttttttttttttgaaaaagtcataaaataattaaactatca

SEQ ID NO: 380954 - DNA, 2157 bp, Cannabis indica
atcaatagctgcagtaactttgtatggaagaatgataatgctcatccaaaagttcctaatcccaagaaaaacggagtggataagttgagctctacctacagatgaaaggttttggctagcccaaaaattcaaattcttgttcagcttgtcaataataaccccacagtcagccactttccatttagttcgacaaagatgagcccctaagtatttcaagggaaaggacccctctttcatttgcatcaattccagattctgagccttagtttcctttaactcctctagagtagatgtgggattttaatttattagcagcaaggccaattgaatcacaaaaggacttgaaagcttcctggatgatctgcatagatttgatgtttccttcgcaaaacaaaactaagtcatctgcaaaacaaaggctagtgagcttcaacttttacataatggatggaagccaaaacctttcttactagtttaatggcccagtaatcttgtgatattcaacacaaataacagaggagaaattggatcaccttgacgaagacctttagctcctttaaagttatcctggatcttcccattcataaggagattatagtttgtccccttcaagcacacaagaatccaaccaataaatctcgaagggaagcaaagatgctttaggagctcctccacaaaacactaatcaaccgtatcgtaggctttactcaagtctatcttcatgatacatcttattgaaatgttcttccttgtgtaccctttgagaagacttggaagatcatcatgttatgagcaagaagtctattctttataaaagccccttgattgctatgaatgaggaaaggaaggatttccgagagtcttgagcataaaagttttgaaatacacttgtaaagtgtattacaactagctatcagccaaaaatctcctcctgacttgggatctagccctttaggaacaaacgatatcacaatttcattaagagacattggaagaataccttcctgaaaaaaaaaaatcaagcactgagcttgatatttcatcaccaatattgtcccgaattcccttggaaaaacccaagccaaagccatctaaccctagacttttagttgaatgaatgctaacgagagcctttttaacatcattcttacttaaaggcctaagtaagctcatttgttgctccaaattcaatctattgtgctgttgcaaacaatcaatatcaatgccctttgagggtaaacttgtttcccccataaaattatgaaaatgagagaaaaagtgcttcactacctctgtgtaatcatcttttagtttaccatatccttatgaaaagtggtaatcctattttccaatctccttttcctcataatagcatgaaaatagcatgtatttttatcattaaaattcacccaattgatcttactttcctgtttaaggaaactagcataactttgctgtaagacagaaacctattgttgagctttttgacagatttctgtaggaaaaggtcttggggatttgaagtagccgcctcttgtctcctgctgtaatcttctttggccagcctataatctagagcaacatctccaactttatcctgatgaaatcttttcaagacatgtttgactcgtaacaatttctgcataactatttttagcccttttcccgaacctgtatcagcattccaactcatacaaaacaacatccttatagcccttgtagttttttccagtggttgcagaacttgaaaggcttgaagcccaccttactaacctcgtggttttttgatcacacaataaatatgatcgataacatactcccatttgaaacaagcttcagccttcgaaaacttatccaaccatgcttcatttaaaagcacggtcaagctatgaaaaaattaaatcccccacatcatgttatttagacaacgtaaaatgagccccgaacaactaaactcatctacctgaccttaaggcaaccaatcttgagcaccaataatatctttagcatttatttgacctctgccttttctatcttgaaagctaaacatatcattgaaatctcgataataatttaagggatattcaagtgatctatgttaactaatttctcttaaagcttcgtcctctcccctatattgtgttgggttttgtgccc

SEQ ID NO: 380955 - DNA, 2180 bp, Cannabis indica
aaaaaaaaaatgaaaaaattaaacgcagcgactttaagcagaacatgcatatgatttaactgtggtaaatctcaagtttcaaattaataaagtattactagacataaagatgacagctataaaagttgctttctagttaattaattacttgtgtatgtgccagctgtcatgaaaattattatgtaagattctcttaatgatgagtacaggacaaaattatgtgaaacaacttaataactaactatatggacatatatacgtcttatatatgcaaatgaaatgttatttggttcatatatgcatatatgctttgctttgctaaaattattacaacaatcagttgtacatctttatgtattatgttaaaagcagttttttttttttatattattattaggttgtcgagatggaaatgtggatcagaataatgggtcttcagaagaagatattgatgtgaacaacaacttcatagatccacaagcagaagatcgagagctgaaaggtcaacttttacgcaaatacagtggatatttagggagtctgaaacaagagttcatgaagaaaaggaagaaagggaagttgcctaaagaagccaggcaacaattgcttgattggtggagtaggcattacaaatggccttatccatccgtatgtataattgtacttcaaattacatattattataaataccctttaatttgtttggctcataaatattatatatatatacgtgcaggagtcacagaagcttgccctggcagagtcaacaggtcttgatcagaagcaaataaacaattggttcattaaccaaaggaagaggcactggaaaccttcggaagatatgcagtttgtggttatggatgcagcccatcctcatcacttttacatggacaatgttttggccaacaaccatttccctatggacatttctccctctcttctctaaattataattattaatattattagtactagtactatagctatatgcattgacttaactaaaactactcttgttatcctagtattgatcatgagttaatcaatccccaacaatatattatatatataatatgcattttgtatgcatgcttataaaacctaccttttggttaatggttttttttttttcatcattataattagttaatgattatatataaatgaattgtatgctttgtaagttagcttgcatgtattatttacgttgaggaagtcaaaagctaattttgttatttgtttcatgacatttttagcatggtaatataatcttagtgctgacactttaatgtgtagttctataattgactggtataggtttctttttattttatatatatatatatatttttggagatggactgtttttttgtgattttctgtataatttatatctttttgaaagttattgatcgaaagagaatattttatcctaaagaggatacggatacaactgtctggtaggttggaaattattgattctttataaggccagggttattaatatatattcttagttactgggaacttgttctattcgatcggctttttattgatatgaagatcaaatagaactgtttcatcctttagggtttgaaatattagagtctgttattagtttgaattgtgtttggtgtgttctctattataaccgtgctagatatgttatctaattgatggtgtaaaatattaatttttaacattttctctaacgtaacttcaccatttagattttctttttctaacttggttagggtttgataataatcaatttcgtgattatttaattgtatgatttattcaaaaattattgatcaattttgtgattacctgagcagcctagttttagctagatgtatgagaaatttaactgaggatcaataaattatggatttttaaatatcaccatatcgccgacgacactaatttaggtgcatgcatctaatatattaatttcttttatattgcattctgaaattaggtgaggtgacatttggtcatattgtgacctattaaaatattgttgacatgatccatgtggtaagagcatctccaatggtatggaaaatctttagaagatgtttggtgatgtggacatattacgtggtaaaatattgagatgctatgttattgaaaagaagaggatggtattttagaaatttgcatgaatgctatgttgt

SEQ ID NO: 380956 - DNA, 2272 bp, Cannabis indica
aaaaaaaaaaaaaaaaaaaaaacccaacaatatattatcgtgcataatataaataaaagtttaaatataaatgaagaaaattgtgatttcataatatgtttcggtaagtgtcaagtacactttttaaaaaggttattttgatatttagtatctaagagttttttagcctttttttttgttttctagtatgctataattatttaaaatcacttataaatttttataattctaaatttacaatgcaaaaatatgatttaagtaattattacaagtgtaactattttctctaatatgtatagtaaataattgtttaaatcttattttttgtagtttaaattatttacgattttttgaaattttatacgtagttttaagtacaactacaacacacacaattatatataaattataaaaaaaatctttaaatattgagacaaatagagagtatactaaaatattctttttaggagatgcattgtaactataataaggtgatgtttgctttgatgtaatgcaacataatggaaatggtaattgtaatatgaataaaaatataatggaataaaaattgtaatgaaaatagtattataatgtttggtttaactctataatggacattataatcaaataaagtaagtggtatagtgacaaaaatatccttagttttattatttttaatatttaaaatgtaaataaaggtaaaaaaagaagaaggacaaaagaagtattttctaacaatgtatatttacattagttttataatgtaataatatataatgtataatagccattgcaaaattttaaaatttaaaacaaacaacataataaatagtaatcaaaatacaaagttaaaacaaaaaaagcttcgttctctttgttttctctcttccatgacaaagaaaagaagaatagtgcgaaagccagtatctcgaatgaaggaacttgattcaagcttagctttgcaagaggggaagacagataatgaagctgaagatgcagctaatggtttagatctgattatagatatgttgaatgttgcagataatacgaactaggctatcgaacaatttggttccaaaaaccaggttatggaataggggcatttgaattgggctaaggaagtggaagataaagcagaatcagataacgatcaggttcaattccaagaatcagcgaggaatcattggaaatctttcaaggaggagaagatgtactatcgtgttcctaaattaacgtatacaaaacctatactcaagaatggaatcaagattgcacaactcgaccttaaggaagtgaaagaacaagctgcaacttgtaatacaacagtgatttatttgtatggttcttagagccaatcctcctatggctatttttgagggatttatcaaacggatttggggacatcttgggatagtacagatagtaaagatgactatgggactgattatagtcaaattcagtgatgaagcatctagagattaggtcttggaattaggagtgatccaatttgataggaaacatgtgattataaggccacggtccactgatttaaatgttgttaagcttgttcgatcagtgcccttttagattcgacttcaagaccttggcctccaatattgggaaaataattgtctgagtgctttacttagtacagttgggaaactaatcatagtggaccagcatactaaggatcgcacaagggttcaattcgttagggttttagtggaaatggacattacaaatactcctcctagatcaatacagtatattaatgaacatggtcagctagttgaacaaagtattgattatgaatggctcctgattaagtgtgaaagctgtatgggttatggacacataatgatggactgtcgaaaaggagaggctaagaagaaattgcaggaaactgtagttgttaacttagtgaaggaatcaagaaataatgagatagagataaaggtggctaacaaggtagatggtaataaatattcaggtcatttcaggaaggcaaatcaaaagaatagttctgatgaggttaaccatgacaaaaaatgggttacacctcagaaaactatcccccaaaaataggttaaagctgcagatgagacttttgaagttgtgcaaactactgctaatagtttcagggctttaaatgaagaagaacaaggtttgacaacaaaaatggtgtccaaagaagcagcggatttaggtataatatggataattgtaatgttacgtgttggaatattaggggtgtgaataatagagataaaca

SEQ ID NO: 380957 - DNA, 814 bp, Cannabis indica
  modified_base (96)..(96): a, c, t, g, unknown or other
tttgagacgtttgaatctggttttgcattgggggcagttttgagagccttctcttctctcatactcataacaaggacgacaacagaaagccacacncattacaaagcaacaaaacaacactccatccactgtcaatcccacttggtctccacatatctcacacacttgaccatccaagttcctcaatgtcttcggctgcaatacacaaacatcatatatatatatactctattaataattgtcatgcacgtaacaataattatacaacatgcatgtcttatatatatgcacctcttcatggccatgaatgacgacgagttcatttcggttatgagatccggcgacaagtccggcgctagcttccatgttgtgatcagaaagatgggagagagcatgcaaatgtggtgagagatgagaattgagaggtgtgaagtagtgaaagaggggagagttgtaggttattatgaatggagagggaaaagagaattatgggatatatattttttattataattttggtgtgaaggtgtctcacctaatgagcacacgttattagaggtgttgttgctgttgttgttggttgcagggtccccattgccatgaagttaagcttcagctattatacattttcagattttcttttcaactgccatatatatcttatatggtaatgtactatactatactattactattcttcttccttagcttattaatattctatctgtgttgccacattttgccttttcacaacgaccaatactgttttcaagtctcattcttcacttttttttttttttttttttcaatgggc

SEQ ID NO: 380958 - DNA, 1931 bp, Cannabis indica
tgtgaccaatgcacacagcacagtatgctctagtcccttttcaagcatgcccaacaattagaatttatttatttatttttgagaaatttaggtcacaacaatggtgtgcttaaaaacaaaatgcaatcaaccgaacaaactgagacagtcaacaccaaaccaaacaatttaactaaactagctaaaaaatgaaatgaaatagatttaaaatgaagaagactaaaccaataaccaaagtagagtaatttttaaccccctacaaagaaatagattgtgcaaaatattcaagactatttgaaccttattcaaatatttacatccatacagaaattccatattgatccagaaccaatacaatacttttcacgactaatttatattgtttatttagtttcaaaatattactagaccaacatcactgcaaacgatgaagtacttgcagaaaaaactgtaaataataactttgaagccctagactatgtatcttaagatcccgggcaaggagaattctaaatacatcgtagcatatagctcaactggaagatgttcgaagtataaaatggtctaaacactaatttgagaaacaccgctctctcgaatatccaaaagcttgcctcttagtgctacaacttgtttctaaatagcatactaccttacaacttctcttttattgcagaccatcattgtctagctaatactatcttgaccattaaacaaagccgtgaacaaaggtgattcagttatgagcaatataatggtggaattatgagcacaatatccatctagatttctaaaattcaaagatcaagacattacaacagcatacctcaggtgttctcgagaaactgaaaaattaaaggaaacaaggaaagttgggaaggaaagaattcaattgcacatacttgtggtgttctcgagctcttttgtaatctcctgtgcacgaaactcagcagctttctgtgctgcctcaactgcttgtttttctttacgtgcacgagatgatgctacaatggcagcatcaaggtccctttccaaagattccaccctttgttctagagcctaaacaagacataaagttcccatatttgattattaatgtgaaatatgaattacttctagacatttaaatagcattagcactatcgctatgaaaacacttcaccacagatgaatctgaattataaagctgcaaatgatacatgatgagaaccaacattgatcagcccagccccactgtttagcttgtatttaaaggacaacccatttatatacatgacgatttgaagcatttaaaattttaaatagtaaaataagtgactaatttaaataaaagcacaaaagaaattgaaaccataacttcatcaccaaaacccttaaccatgagcaacaaataaggtttcaataaagaagtattaagattaaatacaaaaatatatatcaagtttttcgatcaagtaatttgagaaagaaaaaaatgcagccacttctgaatataatcatctggaaaattgaaatcctttctttttaaattggagtttctgaagaatgcacatcatatgaaacaaacataacagcacccataattcattgtattcaaatctacgatctatcaatatacccattacgaaaaaaaatactgatttcaaaatctcatgttttacactacacgttgatcaatactcatgggaagtcaacaccaaatttggaattaaaacccagaaataaaataatcagacagagaaagaatcaaggataaaagcaaagcttaattaattaactaactaagatgagaattgcggaagagaccttgatggttcgggcttgttcggaggtgagagaggctttggcaaaggtttcttcgtcaacgaaaacggctttcttgaagagagtcttctgaagggagtccaaattggaagacaactcggtgagat

SEQ ID NO: 380959 - DNA, 3324 bp, Cannabis indica
tgatatttacccataaataaatatattattcttctctgtgctcttttttctctttcctccattttccttcttctttgactttcactctcctataacttattggtggcaaatttgattaaccatgcacacataatttatatctccaatataaaatgtaaatattgtaataaatttggcataaaaaataaaaaaaaaattatttttatagcacaatatttgttatattgctccaatacacaataatattttaagaggtaaattagtctaaaaaataaaatatcattaatattaatgataaacaataaattaaatatttaaaaaattactaatggtaatattgtaaatgaaatgtatgtaataaagtatttcattaatgattaatagcaaaagtataattaaaaaaaatggcatttaatgtataccgaattcggcagaatactatctcttatgctaaatttggctaaatttttagcatgtgctaaatttagcacaacttatagcataccaatagagaaattttttattaaaaagtgttaaaaaataataatacaccacctatttagcactctattaaaaatcctcgaaacaaaaattatacatttaaggaaaaataaaatttttatttacacactataaagttataagtatatccctaatattaaaaaaataataacttaaattaaaaaatcacttctaatatatatatatatatatatttacattattcatttaataccaatagttagtttaattctctctacggactttttataattttgttctagctaccgccgtaagtttttctcctctccttctctcgctaggagtcaccgacccttttttgggattggcataaggccatggttgggaggggagagggttcgttctcaccttgagtgcgggtacaatggcttttccacatgttcttcttcatttctgtgttgtactcgctgaattttgataattacaccaatagcgatatgacaccgaagagagtgctaggtatcagtggtactttttagtaaatcttttttcaattatatgtgacctgatatttaattatactaataacaatataataataataaaaaatattaagcactattaatatcttttaatatttctcataaattatgtggtatagtaccaccattactttttccccacataagaagaaggcatcatcgaattcaaagtctttgctagttggagaggattattattattattattattattcatttttttcctatttctgaatattttcgtattatatttgaatggactataaaagagacctcattctttcatttcctacatcactcacttaatgccaaatgagaattttacttctcttcatcactctaatcctcacaatccatttttgaaagcactttgagatattacacaaaaggacatgcaaataatatgagaatggtcaaattttccaagaaaaaaaaatcgttataattagctaacatatactatttctctcctataattaagagaaatgctaaaaagggatttgttaagacgttagataccatttatttttctattagtataatattgtttgctttaggcctaagtcctcacaagtttgtttttaagcacctttccaaaaggtctcattccaatagagatagtattcattcttaaatactcaagatctttcatgtttctagtcaatgtgaaattttgattgtacacccaacaatcctctcctcaaataaatgaccaccttgcctcccttaaaataattacagatctaaatttaagatcatatttctaatccccttgcaaaattacaaatcgaatacctcgattccaacactcaagatctccttgagtaagctagatgaatctcttcaccagctagattcgaactctcttcgaatcagatctgaacctgagacgcttctagtagcaagcttcacctcctttatttggcaatctgaagattcattaacatggttaattttgggatctggctttgataccacttgttaggaatgtcgaacaccatttatttctctattggtatgatattgtccgctttgagcctaagtcctctcgagtttatttttgggtaccttcccaaaaggtctcatctaaaggaaatatttttcatccttaaatactcaagatcctttccatttctagctaatgtggaactttaattgtacgcccaacaacactattggtgtctagcaccctaaacccaaaactaagcagcaccaaaagaaacgatttgccaattaactattacgtttatgacatgtattaagttgagaagatctttggagttacttcattctttgagaaggatggttcccctatatatgcataccaatcctccttagggcatatatattggggcgtttacaactatccaaattgcaccacacctgatgagccagaaaaggcacccaaaagaaaagtgctgcaaagaagataaaaaaaatgggaaaatagccaaaaggatattggcctacttggcgaacccttaggaaaatttgcctacttagtcaaatattcttacaaaatactagttcacgaggacatttagatgacggaatgggaatatgaagatgataagcataagccattactcccatgttacaaaccaaagaagtttaaaccaaatgcctcacatctcttcatgctaagaggtagttgttaacttgaaatatttccttggtgatgtggatatcattgtttaacacgtggcatgacatcatagagttgagtagactcgagtcataggagtcgatttgggaaggggctgtatccttacgcccaggttgacttcaggatttccgggatggaagtttagacttcaataacttgaatctgactcactatctttcagtattttataccataaagacatggaccaagcaagctcggggagaaaaccacaaacctgacccttggaaacggggcccagcacccacgttggcctggtgctgggctcaatgccccaggttgacaatcaacttgggatgctaccttcaattgctcaaatgccaaatgccaaatttgacgcgaccattgaatcttgaatggtcaaaaatagggtaggatacctcgtcctcaagttcagaagccttagaagtatcaaaaacgagatcctgggagctcgggagtaagtacccagtgcccaagttgacaaaaggcctggtgcgttgggttctgcttatctgattctaatgttctttcgatcgtccatttagtttttcaccataacaaagatccatgaagttagagaagtcaaatttacaactttgcatttctcatgaacaatatctctgagaattggtg

SEQ ID NO: 380960 - DNA, 4071 bp, Cannabis indica
aaaaaataaaaaaaaatgtatattttatcttaaaatagaatattaacatatttatgtttaattgtgaagtcacaataagtatgagtcaaaaatagaattattagtattttttgtccgtaaacattttacattatcaatttgttcttcttattgtatacggcttattaataatactcatcaaaatatcatttttagagtaacgtaatttttccattacactatattcaattttattataaaacaagttaagtagtagatgatagttgataaatggatacaaattaaatacccttcactttttttatgttaatgaataataaaataaaataaaaattatttttttataagaagagtgttaattacaacattttagtcaatctccacatccgaatatttttatttttagttttttaattattaaagtaaaaaatgtgaaaagtatttaatttacatccatttactaactaccatccatcgcgtcactcgtttcacgataaaattgaatagaatatgatcgaaatatcacgttactgtaaaaattatatttcaaaagtacacgaccctatctaaacgtatcttgtataagccgtcgccaaggcaaaggacagcgaaggaggccaaggtaacaactaagccaaggggcacctcaactacgcacatccttcctaacattacttctgtgtgtagtattttggtatatattttaagtgcacataggcatactcagatcatttaaagcttgtgtgttgtggtttttgtaattatttttactttgattaaaaattacatcatactagtcaactcgtgatattgttaataatatgatgtttattccatattctagatccccaaggtatagcaaatgttcaaagatctcttggtaatcatgaagagagagcaggaataatcatgaagaattaatgtggcaaatcatgtttacatgtgtgttaattagtattagtaattctttcctatagcagtctatgatgggctttagtagatactgaaaatacttcactagcttaagttttttgctaatttggacgacttcactgcgttccaattatatttctaaacaggaacatgtatagctatattcagatttcaaatcccaattaacattcattttcatttcaattctagtaatggttaaaattccaatctattcccactatcttggagccaataaataagcatctacacaagctaattctgtacaaatttctaatgaggggacttatttttttactcgaaaaggaaagggaaaccagataaagaaaaacataacaagaacaagaaaaaagaagagggatctaatctaatctaatttaatggtttgctcaaggaaaccaaaataagggttcaccttgttgaaccaccacgccaatacccccaattgctcattccacactttgttagaaattcttgataatcttgttcaagttttctgtaatcatgagatgactcttcaaaagaaatttcaaccagatcttcagattgatcctgcataatgatcaaaattaaccaacatataaagtagaatacttctaatgatcataatggtgcaaactttgagagtagagtttctcttgaaacatatacctcttaattcaataaaatttagttcactgtgaacaaaatgagaagtaaaacagcataatatctttaaggcaaatgtttgcagttattctagaatttctaacttgacaagtaagacatcacagtatatagatcttaatactacctcctcgatagttagtgaaattgcaccaatcactactaactcagacagcgaaattgctcacttagaagtattaaagagatatgacaactagaattagaactcctttactcacagtggaatccaaaattgactcagtatctaacttttcgggttcccatgcatcaccaagagcatatctccatcgctcacctctggacctatgattctttaaaactgattcattcacagctttgtgtctcaactctccaaaaactctggtgtgaaaggcactaattatgcatttgacacaaaatgccataagtggcgccagaactagaaaaccacaaacagttctagcctgataatatgatggaaaaccctgttaaggtcatcaagtttggtgagcaagtataataagaatacacaagaaggcattactactatttatgtgagatgaaaacagggtatgaaacacactaacatgaggcgtacaccgataatatagcacacttaaattcttctggtccaatactccattcaagatattcaaagagaaatgatcctttttaggtaatctaaagtaagctgaccaacttctcccaacctgacaatgataaaaaaaaacacaagtctacagcattagagacctgaaactgtataaatttaatctttatttgagaaggatcaagagaagctactctagaattttggctaaactaaaatgcttaacatgcaagtttttaccatgttcaaatttcgcatggcataaacctgaagtcttaggcatgcacgtggcaatttccaactcatttactcaacataaactcattagaaatgaaatcagtagtgtctaaagatttctagtaaagtaacatttagcattgaagcatgcgttgcttcatgtcaacaataaaaaatagctcatgaaccagaaatttagcaacatcttgaggcctgcactacgcacatcgatattcattctaaagtaatagaatcaagtcaaaatttaacagatttcgaatcctagcattaaaaattcaatccaaaaagtacaagaaagaatcaagagcacactttataaaagagaagcttatggaaagtgtttatttacaacattcaaggagatatagtgtccaccacatttaattcattactttcacccacatgaagaaaatgcattactacttatctcattcgaaaagaagaaaaaaattcatacaagtgaaattagctgaggctatgttatctctgtcaagaatcagtcttaccgcttgaattaatgtggatgctgaaggaatgttaagctgctgaccttcaaaaacaaggtcaacatccactatgttcctattagctgcagcaatttcatacatagaaactccatgctgcttcgaaattgaactcaaagtttcacccctgcacccaaaattttgcatcaaatgacatgaaaccagattaaaaaacggtaacatacataactcttgactacagcatcccaaaattcggatatataagttctgatttgaattcatataataacttctggtaccttttgacaacatgaaccaagtaatgcttggctgagcattgaccctctgacatctcctgaatatggaatctccatttctgtacatcaataacatatataattctttcatatatacataaaaaatgtgtgtgtaatacataaagcttgagaaatcttacctcaactgagcctcttaaatgtttcttaagaaatcctgtactgtttgcccaagatttaaaaaacaaactttcggacaacccacataacaaaacaacaaaaaaaatgtcaaatgaataagaaagaacagaatgtgaaaatgcatagttcatttttccattttaatgagaaaagcaagaaatacctgtgagatgggattgggaagttgggttttgattggaatagcggaagaaggaagtgtggtggtgtctgccttagctgcacttccatcacaaaatcatactcagttaacccaacaaagcgatgaatcttctctacccattcattccccgctgtttcaagtttcagaaaagtataggtttacccctaaattttatcttctttatacttttgtcccctaaattataagaacaacaaattatatccttcgaatattacctctttattaacgacaccattttaataaaacgacaataatcgaaaacgataacatataggttacatttgactactctttttacattttaaaaaaaagtaatttgtagtaaaattctcttatattttgatttttatacacttaatccttttattttatttttggtaaatctctcttatattttaatttttatacacttaattcccttat

SEQ ID NO: 380961 - DNA, 636 bp, Cannabis indica
aaaaaaaaatctcaaaatcacatttccaccaactagcttagaagaaaagggaggggacaaggatttattgattaatagcatcactttaagataaatgcgtggatacaagtacgataaccgaccacttaatcttactggtaaaagcatacttaacaagagtgtgaactgcaacattaatagatctaagataatgagaaagactagtaaattaaaaatagaaaaactatgtctaatattattcaaaattactcttcaaaaaaaaaaaatattattcaaaattaaacccaaagatgaaactaaaataacatgattattaaacttgttcaccaaattcaaacaattaattttaaaaaggacattaaagaaacctaacatctgacactaaaaactgcaattcacaatgccaaggcctctgccaattcgggtggataatcacccaaaagataacatatcgtcgaagccaaaacagctctcactataaaaaaactgctatttttagtgacaactttttagtcacaacataaaaattttgtgactaaatgtaacttttagtcacatcaaaaaattatttgtgactaaaacataacatttagacacaattgtcactaattagttttagtcacaacaaattgtaat

SEQ ID NO: 380962 - DNA, 5527 bp, Cannabis indica
tctctctctctctctctcaattgctcttgtgaatctttgagtgaaattttgttacaggcttcggagtttggggaagaaagagaccgaggtattgggattacggagatagttattgctctctgctttgcctgatctctctactgttcattttttttcctttctttttttactcgagctttattacagctccaccgacactagatgctttgtcttcgaggtcgctatggttttccgttgatggctaatcatctgcattttcagagttgactctggtatgttgtgcttttcctttgtgtttttttctttcttttagtctttcgtgtttggttggcatgaaagttctgttaacacgagttttacgtgattctcttattctagttttggattttgtttttgcattgttggttgcttctttatttttctgaaattgtgtatttaaactaaaattggagttacagaaggctacgaaaggagaggaatctcatcttcttgatactttcgatggagagacgctgtttgggtgcttaggaagtgcttctttcaggggcttttacttttgttattttctttttactgtaatttttctcccaataccaaacggcattacagttttgaaattttgaaaaacgaatgcgctctggttttggaaagctggcaatctttgtttcttccgttagcttcgagaggatagtactgcttaggatgggtcgttttaccttatcttgcgttttgaaaatggcctttcatggaccactagacgattgctttctgtaagccttttctggtattagtcttttgtccatataccactcaattgtctttttgtgttaagtttctgatttggatttgtgcaaatttaaatttgttgtagtttctttggtttttttcgtgaggtagtttactgctgttgattaacttgcttattgcctattggttgcgaacttaggaaggtgaaatgtaaatttgtaaagcatggaacaacccttactgctaaatttgtccatttgtgtattgtgtatctttaaagtttaagcactgacccttgacttcttctattgttaattcctccttaaggaacgggcaataccagttatcgttttctttttttttcccttgtttagtaaaaattatcatgatgggattctttggtgaaaaacttagcctttagacgctgagttattttttcaacttttatttctctatcccttgaatgtttgctagatgctcctaagtacctaggactcattctaggtcacctgttgttgttgtctgggaaatcctttttgctagcaaataaaaatacaagtatatccgttggcattatggtacttgctatgatgaatttaggaaaagaaaattaaaaaatttgggtcatcatacttcttaaaatgagaattttgcattttatgagttattatatggataaattttaattttatctttggctgcttaaagaaccagactgtttattctggcaactttttatatttatatatataatttcaactctttgtagagatttaatcccccttatttcttcagtttcccctgaatatatatatattttttaaaatgtctttgtaataacgtgcagttgagaaaaatagtccaacattctttggcaagcagacaccagataccagtatactgcagatacatatggagtatgtggattccatgaaagccctggagcagctttcaaaacccagaaggagttcgggaaagcaacaatccttaggaacttcagggaatgtccttcctaggaagagccaaactatgaagctagaagacaagttaaacttagaaaagtctagttgctcatatgctgatctccatcacgaaattacaaagaatgtaagagacactcaaaagcagcagatagatgggaaaaatattgatgaagacgagcttgttaaatacatgtcgaaattgccaagttatctgcaaagaggaaaaactgtacaggagaaagctttaaatgtgggggttcttgactggggtcttctagaaagatggcaaaacggccataaacagatgccatgcagaaatagcagatattcgccatccagtagtaacacatcctcctctttttctacagatggatcacctacctattctactaggggtcacagttgctctccttctcgccaaaggactagccggccttccctacaagctcatccgatggaagggccatcccaagttaaatcccgtggagcaagtgttggaacatttgaacctgtggagactgcacaaagtggtaccgtgacgataactgaaaaattcattgtcccaactccagctctctgcaaaaagcatctagataccacgctggagcaaagcaaaaagggtgagttaaagctaaagagggagagggatccagtaagcagaaatgtgaacaatgataacaactctgacatggaatcacagacaagaaagactcaaggtgttgagtgtttaaacaatgagaagattcaaaaaccaaattcaaagaattttgaaaatacccctaaaggatgtaaaacaattgttctcattctgcctaaaagtctcccagaaaacagtcattctggagaaccgccaaattctaattccacagtttttgctggaccaaaattagaaggatgtaagaaggcatccctggcagaggtaaattctgatattccacaattgggcccacttccttcgggaaatggcattagagagtctcaggtagaatatttgagtacttcagattcaggtgcagtgaaaatgagctgttcatctggctcatcttactccacattagtgtcacctaaagtgggattgaatccgtccagaagcagtaatttgacagccaaaagatcagttgtagtacccacatgttcaacttcagttgagcatgccaaagcatcagaaaagagctcaaacaaagtaagggccgaaaaagttcggagcacttcaccattttatcgttttaccattacaggtaagatgagtaaaagttccagtttgaaagacgatttaaatgcaagtgaccagggctcaacaaatgtttctacaaaatctgtgacccgaaattctctgtcatctgctgataatgattcaaccagtggaaagtgtaatgcaactagccggaagtcaagtcctctgaggcggtttcttgaccctctgctgaagccaaaggcagaaaactgccatcaatctgtggaaccattaaagagggcttcagtatcaacagacaggccttgcaaatctgctgatgggcggcatgtttcgatggctttgcggccagggaaagtaaagttggacatggctggttgtaagacagttaatgtcaatgaattagctcagggcaagaagcctggaccaacagttcatgctcttttgcgagttgcagttaagaatggtctgcctcttttcacatttgcagttgataaggagagcaacatccttgcagccacagtgaagaagttaaatgcgacaaataatgatggatgcagcttcatctatacattcctcaccattcaagacatgaagaaaaaaaatggaagttggattggtcaaggtagtaaaggcaaaagtcatgattacacctctaatgttgtggcccaaatgaaggtttctgactctaggttttccaatttgagtacacagaataaattcaagataagggagtttgtattgttctctgtggatttgaaacagtcagataatcagagctcagacttccagccaaataatgaacttgcagctatagttgtcaaaactgccaaaaagaccaataatccaagctccgtgaaagaagggcctgggtatgcatctcagtctgatttggagtctttgttggagcatagatctcattctaattctttggatgatgttaattgtcattctttcttcagtagtcaagactttgtcagcacaacagtcatacttcccagtgctattcacagtctaccaagtaaaggaggaccgtcatcgttagttgaacgttggagttcaggtggatcatgtgactgtgggggttgggatatgggttgcaaacttaggatccttgcaaaccagaataaagtgcataagaaattaagtgtatctaaaggttgccccgtcacagaaagattagagcttttcccacaggtactagtttttcacttgaaatccttagaatggttaaatttcctactggaacccttagtgtataaaacttatatgcatataaaaaatttcctcctgatgttactttttgttttcacctgtccacaggaacgagggcaagaaaaccagctgtttttcagtttgtctccattcaaagaaggggcctattcagttgagttcaattcttcactatcaattttacaagcgttctccatttgtgtagcagccttagagagtaggaaactatgtgagcgtttagatccaagtaactcgagtgaagaaaaaacatgcggggaacccatattagtggaaaatgctgaaacaagtggtggcagcgtaattgaagcagaggttccaagttacatctcatatccaccactttctccagttggtcgcgtctagattttcttgcaaagtacataatgatcacttttgtgccgtcgggtattgttcatagtctacagccagtgcttttgaaccctgtcggtcagttggcaattgatcctcagattatagagttcctcatatggtggtttagacatgtatcaccctagtaggaaataggcaaataacaaatgtacctattatatcgttagagaaactcccttaatcaaattaagtgtgcatatattgagtgaaatgcagcccttttagctactcactgaatctttaatgagttctattctattagtattatttgtctattttggatcataatgggactgcccttgtatgattcttcttagacaaagttttgcatgttcaaattttaatctctatgcttcatccatcaaagcagacttggtaaaatctaaaagggaagattttcttctcctcttgttgaaatatgagattcatctatagcttgtaaagagtaatgttaccaaactggatttcgtggctggacaggtaagtaatggaagtttgcttcaactcgaatgaaatacagacttggggtggaagtattaagagaagtgaaactgaggattccagtcagataagagttagttgactttgtgggattagctttcttttttttcatcacattaaactacccttttcacacaactttattttcatttttatataaaagaaaaagaaaatgatgaagcatggagcttgcctattggccaaaactcaactcaaaaatattgcaaaccttatcgtacgcggtgtattttttttttttctaataagcgggaatctgaaaatgcaattagagctgtttattcgattcaattcgtatttctttttatcaaatattattcaattcgcaataaatgtggattttatattttagaatcaattcgatcctactaatttcaattcaataatcatttaaaattattttaaatcggttatttttttaataataaattatttaaaattt

SEQ ID NO: 380963 - DNA, 2066 bp, Cannabis indica
ctctctctctctctctctgcgttgttttaatggctaagaggtcaactacctatcacagtgtgcaccatgccggtttccaacctaaggtcgaagatatattggaatggggtggcaactttttaagggaattccaagaaagtaacagtagggggagcaagggccagcaaaatcaaggagtgtggtgttggcaaaaccagaagttggttcttttaccataaacgtggatgcaggggtctcacagtagcgggatcgatatggaggcgggtttgtgattaggaatgatgatggggagcttctttttgctacttctaatcctcagattggggccattttaccacatgcagctgaacttgaagccattttggatggtcttaaagttggtatttaacgaggtctggtgtgatttaaggtagagactgactgtcttcatgctattaatttaattgagagggatagtgatggatgtaggaacataaatggccttgttcggagatttggcagttgctacatgctagtggtgttactagtttgaactttgtttatagagaggcaaattaagttactcatagttaagccaattatgcattatttaacaatgttagtgctatgtggattgagattacaccccttatactcgacatgccgtgagacaagacttgccattttcttgtaatgacgcttgattaaatgaaggaattctatttaaagaaaaaaaaaaaaaactatgagcaccggtaacagtataatattgccatccagtactagatactttcccattatttttaataattacatgaatatgtgaattatcttttgttttttttttcgtaaagcgtgaatgaatgaattatgttgatatatagtcagagaacgcgccatgaaaggagcgtgaagttgggagatgaatacaatctcgatcatcattttgggcagaaagagagtagtgctaacccaaccccactgccatagtaactgttgccttcaaaaactaaataaataaaaagaaaaatcaatcaattctctctctctctctttccttcttttcttttaactacttgatccatttctactttctcctctgcctttgcaattaatgcttcaccaatccaatattaatattcctgctcaaccctctacctggtttccttctactgcctctctgtttcaccgtttttcctccgctcggatcctatccattccaatttcctgaaagcctccacaaaggtaactgagttttcatgctcctaactttctcttattcttttgctttctcaaagttttaatctttcactcatttatcttactttacattgctttatgtacctccatttttactttcttcttatctgtttgttttgctgcaatcttaggatttttaagcagtgtaatgaaattgaagatctgtatgtaacgtctattcaaattttgagttttgggctatacagtgaaagagtctcggtttttttttttgtttgtaacgttgcttttaacttcaaagaatgaaactttcagatttggtgatatcaaaaattagatagtaaacagctctgttaactgtaggattctctgttttagattttccggtgtggatagagaaagcccagatttgaattttcttctgatttgattatgagttttctttttaaacaaacagaacaattgatattgaagaaggaaaaaaaaaaaaaaatcttttgtgacttatcttctgcaactttgttcaatggaaacagagcattacagcttcttttacttttatttgttttgtccttttgtatgtatgtatgtattataattacgtaatttttacttgattctttttttgacaaaatcacacctttcgtctctttcctgcttttccgtttttgctttaactcttcctcgattttctctcgtagtgggaaagttaaagttttgcacacaattttcacttttttctttcactgttcatattgtgatcactgatcactatatttgttttaagtttgttctaatttcaaactgaaaatgaagaccattgagaaatcttcaacaaaataaagagtcgaattctctctctctctctc

SEQ ID NO: 380964 - DNA, 1164 bp, Cannabis indica
aaaaacaaatggattcgaagcagtatttttacaactactaagtagtgaatccaccactatgaatctagaagagtctccagaatttttcttcaaaactgattcaatcaaagctctagcatccacattcaaccgagcttggaccagaatatgaatggctatgcagtaagactggactccatgctcagatttgtttctgtgagatgaccaatgaaagaaacccaaagcctgctttgcatcaatgggtcccttcaattccaatagtactttctcaacaagtagttcatcaagctcaacatgatgaaattttttagtgagtgtgtcccaatctaaaccacttctgaacgaattacaaatggaagtgacaacattaactgatgttgcctctgtatgaatcagttggattctttctgactgtgaaccatagcaatgtagtttcccacacgatttcaaggatttcgagattaaagatggagctagtaggcggagtaagctcatattatgcgaaattcctcaatgtaatactgtcagatgtcaatgatatcgttttatcagttctaaatatcaaactggtagtactaaggatataggatttgttggagaccaactatcaagccctccttttttacctttacagtattagaatagtaaaacacatagtaaacaagcaaatgttgaaacttgaattggtatatagacttgcataccttaaaataagccaagcctacttaaatatccttcatacgcacgggaacatgctagctttcattgagcacagacatgccacaaaggcatcttatccattttctatttagtgttgcagatgctttactgattctccttgcagttgcagacttttgtatagtcatgagagctaatacaaaaaaaaaaaggaaatgagattgagaagattagatggcttaatccattacaagataattaggaaaattaataacagatataactctagatgtgatacaatttaagtacttttggtgagcaattatgggaggaaagaaacgtgcagagggcatccccctttcgaaaataaaaaagaagagggaaaaacactccttaacatgcctataactatataaatacatacattatgaactaaatcattctgtcacatgatttttgcttcacattcattgacaaaatttacag

SEQ ID NO: 380965 - DNA, 4220 bp, Cannabis indica
agagagagagagaaagagagattcaaagtgttatttaattatctaaacttattcatgataaatcattattagaaaaagaaaaaaaaaagagttgcaaaagtaggtattatcttaagacacccaataagagggaataatcatagattactacattaatgaaactcattgaacttcaacctctttcctgcattttacattctaaaaatatttgatattaaacactctaatttctaaatattaaataaaaaaaaacaaaaacaaaagaaataatacaaataccaacctcgatctcctcatcacaagcttccaggtttgcttcttcaccaggaggagtagcactgctttgagctttctaaaacaaataacatatatttaacaagttagaattggtaccaaagttgcaaagaagaacaagattataggaggttcaccaacctttaaattttcaaagtggcttaatgcagcaacacgtgagtaatccttcaatttgttatagaaatcaacaaaatccttaagttgtaacttggtataagatttgcttggtaaatcttcaacatgagttgcaaaagtttggttttgatcttgggtatccaaaacagcatccttaaattcccaagcatcatcatcaaaatcgtcgtcattgttgagaatatcagattccaacggtctaagggaaacaggcattccattttcacttacttctggtgtatcactgacagaagtgttttcagcagcttgaatatataaacttgatatcaaatcattgatagataaattagaaccaagagctttattactattataactaggataagatgttggtttttgcatcaaaacatcttttggaaattgggaagaatcattctccagttcttcatcaccaaaaatggacagcggcaaggcttcgtgactctttagcttgacttcattcttctgaataataacaagagcagttaaaatactgacaaagagaaagtgcatccataataaataaaaggcacaaaacactatcacagtacaatttgcggacctaaaatcataataatcacaattcaaagctagacaaagaaaattagatatacatatactttatacatgtattttaaaagtttaaagagaaagagacaactttcagatgtacataattgggtgttgtattttttgattaagtacagttggcatataccaaaaaatttcatgagaaagctcgccgactactcttcaattctatagttaataataattaaaaatgacacaacacgttacctgatttgcaccattaaaacaggtggaatcatattagcagtatgatcaggaccaaacactgaatctccctacaatttaatttaaatttgagtaagtaggtcatttaaaagcattggcattgacaataaaataaagataaataatgaagtccaactgttgagtcacctcaagctttgacacagtttctgaagaggcatcttgaaagtcccaatcattgtcatcacactcatcattcttatcatctgcagaagagcaagctccatttcccatatcatttttcatgctactagaatgtaaatttggtataatactatcttcaattgcagaacttgaggtgaaagtagactcaaagtcccatcccccagttttgggtaaagcctcagatacagaaaaaaaatcaatagtgccatcagcaccatgtccatttaatgcttgtcctcccaaatctgctggattagcaaccttcgcagcttcctacaacaaaaatgtaatcacaaaacaaatgttcttaaactatataacaaaaaacaaaaaatgaaggaaacctcgtaaataactcaccaacttaggctctggtccaacttcagaaaatgcatccctaaattgccaaaagttttcattagaatttccccgttcaccaactgtaggaaactttgatccaatctccatatgattcttctcacttgtagatggtgaatcccataaaaaatcatttggagaggcaaaacttggattgaaatcaaacaatgaattatcagctttatgaggcttatcactgagctgagtaagcatatcaacatgaccaaatgcaccattgttaaactctactgcagtaatggattcctcaacatttaaccgtcctccatcgtcaacctttcaaatttgaagtagtcagactcgcgagactaaacagaaatatttgttcctaggcacttaaacagaaatatttgttcctaggcacttaatctaaaggtacaaattaacttacaggaaaattgaaattatatgatacaaacatgaagcatgaacccgtttcaaaaaaaaaaaaacacatgaagcatgaacataaagtatgtagacttatcaaatcatagaaatcattctatgggttgaaacaaggcccaaaatatggacaattttgtattgtctaatagttttatatcgaaagtataacaattaaacaatacccgccttaaattcccggtcattctccatagctgcttccaccttcggctgtggcatttcaacaacccgttgttcctgatacaaaaacaccaaaggaaatcaattaaacccaatttttcaccgatttaatgcttctgataacatcatcaagatcttaactttactagcacctaatccaactcaatgcgaatcatatcaaagccaaaacaattagaaacaagaatcactaatttctttccattcctgagattcttatcatccaaaagtaggaaatcatctagtaaaaatttataaggatctccaatttggcacaaaattctcattcctcacctgtttgttagcatcagcgcctttgaattcccaaccatcatcgtcatcttcatcaacatcatcaatattatcaccctcttctaccaaatccgaactcagcccattggaattgaacttcccgctaccaatattagaatctaatttatttgatgacttcggatccgtatcgtgaaaagcggaatccaatccattaggttgccaataaaacgcattagttttcgataccaggccttcaacattcatactagatttcgttgtcgccccatcagaaattgaattcggatgcgatccattttcaaccttgatccgcggactctgactatacaaattcgcaattaaatcattaataccaactcccccattcagaaccaaaccttttctgtcacaatcatctttcttatgaaagaacgaggctgcaccatcaccaaccgtaggctgagctgcagcagaattattctcttcctcctcagtctccccaaacaacgataacggaatagctccctgaggttaaacccactgaacctttgccaactcggctccactaggcaccgattcaacccgagacatcgtagattcattaccatccactgaattcccaaaaaggtacaagggattttggttctgggaaggactaaaagacgaacgaacggctgttccattggagaactcaaatccaccattgatctgattagaaggggtggttacgaagtcgccccaatcatcgtcggagaataaatcagtggaggagctggtcttcagattggtggaaatagaggaggcggtatgaacaggagtcattggagcgaatttgaagtccccaaagccctcatcgtcgtcatcgtctgccataggtgagggctctggttcgggtgtccgttttctcccaggtacgcctctgttttgcgctttggtttattatagtttgcagattcgggttctgcaatttcggactcaaatcaacttcagttcggttccttcggttgggtcgaacagaatcactaatatttattttgacttattttgaccacaactcttcgtgttttggaaaattttaaaatgtagacggtgattatttaatggttacatttttattttaataatattttttttaaccttaataatagattatcaatatctaaaacttctttttagaattaattaattataatcaattattttcttaaaataattaattcaatatttaattaaacttcttttagcaattaataattgttgctcgtaaatccgcccaaaatacgtggaccagtcgagaagggacacgtggatcagataacttggaaagatttgctaagtctttttatgccacctggaagcgctattagcatgggtcccggagtagacacccggagtacaaggtactccaggaagctagtatagcatgaaggctctcccggggatggtgtcaggtctctcctgag

SEQ ID NO: 380966 - DNA, 1211 bp, Cannabis indica
tttgtcatgtttctcaagtctggaaaatctgagctctccccatttaaatcagtaatccttctgcaattaaagtcttattagaaaatgaagttagtgaacatattaatattttaatacacaaaaatagatgaaaaacaactcacaattctgttaacttgtccaaattagaaatactagaagggattggccctttgaaaccacttgcttccatctctctgttgagtgtagtatgtaaaagagtcaactcaacatagacatagctcatgaatttttgaaaaccgaaaagattgatagctcttacaagttctgaagttgtttccaattgctaaactcaggcatccttcctgtgaagtagttactactaatcctactgcaatgagaaaacatgagtcaaatcttaagtgacataataattggttcattttagttttcgagtcagttaggctatatttttcgaaaagtagtgtttgagagtcttacattgataatgtgtggaaactaaataccatacataagattcatgggctactcctctaattattaattggttttgagatggaaccccatgtttcttaacattgtatcagagccaaactaaactctgatgagtgactgatctaaatccaaaaaatcggtccaaaaagacgagccaaaagaatcgcttgtggttcggggatagtgagccaaaatgagccattgtgagccaaaaagagttacttgtgatcgagtcgtgcaagacatacataagatctatggcctactcctctcattaccgattggttttgagatcgaaccccatgtttcttaattcttaacaagtaggattaaattaatcctaacaacctagttaatccatctagcatggcataaattaataccattgacagactttgtatcctacttgttttagttcatttgatactcctaaatattaactaacctaattaactctctatactcgagaagttagttaaaaacagttagtctattatgttagtttgtgtacaagttcagattgatcatagagccaaaatttggttctgaactaggataaaaatctggtgttcttattccatttctctgctttgatttactttctggtttagcttgttgatcactaatcatattgttgttagatgaatcttggtgttgtttataatttgagtaatttgcatcgttaatacctaagtttaactctcggttgcagataa

SEQ ID NO: 380967 - DNA, 1209 bp, Cannabis indica
atattttttttaattatttttgtttgtcttcagtgattgtggcatgtttgtcattaagtatgttgatttattcattcgggagaagattcatgagattcctccaaacatgggtgacataatagcaaattatagggatgacatcgcagtaacattgtataactatatctagaaaaagatcaatgaaggatatttcactgaaaatatatcaaaaggaaagaagtcgaagaggaagaactaagtgacttgatattatcacagatttagttttgtagttttatcttgaatttttagttggaacaatacattttgttatgtttatatttagattttgatttttataacaatatttggaaccagtttcatattttgttaatttcttatatatgtttctatttatacagtgttttattttttttttcttttgtaatatatctttttatgtttttacaatttcaataaaaagtgtcttttatattctgtttgttttatttattatttttcctttaagtagaatcgtttttttttttgcttgcttgactggccttgtggatttagctaaggttccttgaatctttgaccgagtgtcgttttatatttgctgagtggcttatttgaatcttttattgagttgcatattgtggaagctagtatgattgaatagattatcttctgtaagagataaatattgtgtttatctattttagtctgttgatttagagttttcctttttatttttatcttacagaatttgttttatttcagttaatattttctattagtagtgttattttttattttgaaaatttttattaattcaaagtctttattgttttagtggtcttgttatatgtttagtttcaatgaaccggttatttttttagaaacaaaaaaaaaaaatcattatcaatgccttttttggtgtgaaagtttcatttttatgtatattgtttaagatttttaacttagttttctttgtatgtattttatagaaccggtttcattttgtgttgattatgtttaggctaattagtaatttttccccccgaactttgacatataccaaatcatgctccctcaatttttttagccgttaaaaatttcccctgaactattgagattgttagatttaatgttacatggggataaaattactgttacaccctttcaatgtattttatccttaaaatacttggccacctataaatgata

SEQ ID NO: 380968 - DNA, 2880 bp, Cannabis indica
attaccagaacttgaactccgggggagtcgtgcatttcaggatcatcacataatgtagttacttacagagattgatttaaaacacataatgtacaattaagcaaccttaacaaaatgcagagctaaagcaattcaatttcactaaaagaaaaccccaaagatacatacaaatcagtaaatagtacacaaaagaataataatgctttgcctcaagaaaataacaagctggatatcatcacaagtttctgttggatgatctattatcatcacttggatatctgctgaaagcacattgcactaaatttctatatgcaaaaacaccaatttttgttctaaacattgtcaatggaccattactactactactactactactacttgaagctgctgcagtactagcatctgttcctcggcgaaccgtttggtgaagcaccattcccatttcttgagctccagtgtgactactactaacactagcatcaaccaaaggcttgtctaaaccatcatcccaattgactatcaatgattcccttctttccctcaaccactcagcaatcccaccactcactcccctacatttcttgaccttaatcttagccaaattggggcaaccccaagcaagggtttctatccccacatccgaaatcgggcaacccttgatacacagcttcttcaaggctaaacattttgcagcaatgcaggctatttctgcatcaccaaccgagccgctaccacatagagccaacctttcaagcttctggcaatttgaagcaactgctgttaagcccaatgaagtggggttcacaccaatcagaacaagctcctgtaaattaaggcattgtttggctacagcaataagaccctcatcaccaattctattggttctccatgcatctatatgaagctttctgagttggctacagtgttcagcaatacacacaagaccatagtttgtacactctggagttttaacaatacgcaaaacttccaaatttgaacattttgatataccagaaagccccaaatcactaacctgaagcctctcaagatggatttcaacaaaaccagtgttcccatttccaatcttttccaaaactctatcccaatccccaacacaccgaatcaacttcaaagtcgttagctttttcgctccgactataagaggttggaatacttgtccattcatcaactccttcaagcaaacggatctaagagatgaagcagccatgccttccccgatcaactcagaaccttcatggattcctcgaagcctctttacagaaagctcttctagagctttacaatgagtgaggagagcattcatggcttttgcaccaaacatgcaagacccacatgagaatttcttcaaagacttggaattttgagcaaaaaactccatacccaaatcggtaatttctctacacccacgaagcttaacccttgaaaggttaggacaacgaatcgaaatcaaaatcaacgaatcatcattaacgctaatcgatttacgatcacaacgaagagcaagctttgttacagaatcaaatctagctaacaaagaaggaagaaaagtcaatatctctgacttagcattcaatgaaagccgataccgattctgaccatcaactctaaaccaccgtttacaaacaagagaacaccttttccgatctccagcaccaagtgactgaaaaatcaaagctaaacactcatcaggaagattactcgtatagtcaaacccaaatccactacttcctcctccatcaaaaccaccacttttcaaattaaaaatctcaccttcttctttcgaagaagaagaagaagatgaagacctgaagctaaatctgcaactccgagaaatttcctggccataatcctccgacgaaggaggtccaagcgaagaactagactgacccataagatcaattgaagtgaaattcagagtctttacaatttttgtgaaattggtggaaagtaaattagggtttctgataagagaaaatggggatagagaaacgaagacgaaaatgaaagatcatataatagagaaggaaaaaaagtttggggaaaattaactaatttaacgccgtcaacccgtcaaacgggtttgccgtctaatttaacgtcgttgccgtcaaagacacgcgcttttgaacgaagatcgacacattttgttgttacatgtaaaaactaaaaacagttttgtgttattattaaaaacaataaaaaaaaaactgttttgtgttaaagttgtttatttagttaggctaatacatattacaaattcaaatgtaaatctaccatattaacgattttactaggtaatttgttatgtgatcataagtgataataatgtatatatttatagtgtaatttacagttattaaataattaagtttaatttttaacgataataatataattttaaaaattcgtaagtatctagctgtcattatccacgtgtaatatttttatgggtatattaaaaaaaattaatgatctgtactaatcaaaaattattacgtgacaatttattataaaaattctataatttactaaaacgtttttaaatatcaaactatggtgatcacccctccttaaatcattgtaaaaaaatcaataatgtaaatgcacatactttaactaaactagctttattccttgacgtgtcttcggactaatttattttattaatggaattattttctttgtttaaaaaaaattatgcaaaaaaatgtgtgtattttgtcacacatgattaaattttcccatatataaatatactaggtgatcgttacgtgccaagccacgtactgttatagttttatttaatattttaattttttattttaattaataattaaaatagtataattatttgaacga

SEQ ID NO: 380969 - DNA, 4647 bp, Cannabis indica
gcaagcttcacaaaaatcaagaatacttttattactatctgaaatgttacaagtttgcatgattctttttacaactttagcagagggatgtcccaacctgctatgccacaaagagaaattagaacaactagatacattgtgaggactgtttgtgacattattgatagaatacaaagctgtgtctttatccagagaattgatagaatgagtttgatgagtgagatgcatttgggagggttgaatgacatatagaccttgattaagatgtccctgcagaaggacttccttggaagcctggtctttgacaaagcaatgattaggaaagaactcaaaatatgcattgttatcagtagaaaactttgaaacagaaatgagattcttggttatttttggaacatgaagaactcgattaagaaataatggtttagaagaataaggtgtggtgaaagatgtcttaccaacatttgaaatggaaattccagcaccattgcccatatgaacttgttcatttccaaagtagggatccttttgagtgaaattgtttacatcagcggtacagtgagatgttgcaccagaatcagggtaccaggcagggtcattaactgtatcagccgtggcaatattggcagactgtctgtcaaggtttgctgcaccaacacctggaaaatcaagattgaatcgctgataacagcgagaagcaatgtgaccaactttggagcaaagttgacagacaggacgactgtttggagctgatgcagaaggattgttcatagagaattgaggaggtgcacttctgccaaaaccagggggaggagtagcaggtgtgttggaaaaattacttcgaggattaatggcatatggattccaagatccacgaggaggtggagaggtattcgattggcgaccataaccagatcctcttcctcgattgggtctgttggtagcaagattgacagaatcaagctcttttgagtgactatccattcgatgttcttgagaaagaagtagagattcgatttcggcaacagtgtaaggaacatttcttaaatttacagagatgacaaaggtgtcataatcggagggaagacctttgaatatagcagctacatgttctttcgcagtcacagcatggccaactgagcgtaaccgatcaacaacagtctttatacgaaggagatagtcattgatagacagtgaagctttcttgatattctgcaactgagtaacaaattgatcgatcttggcagaagtttgagtaacaaagtagatttcgagagtgttccatacctgagcagatgtttcacagccaacaacacgagttaaaattccttcggacatagatgacagaagccaggaatagagaagttgatcttgaatttcccattgaacaaattgaggattgatgagacctgcttcttcatcacgatcggagaggaatttttgtggaggtgtgaaattgggggagatgaaattgagtagttgatggcctttgatggcagagacgatttgaggacgccatagcagaaagttttcattgtcgagcttgatagaaagtttgtgggagaaaacaacaggattatttgcaggagcaaccattgatgcagaagcgaagcttgaatcttagagagaaaaaaaaatgaggctctgataccatgtgaggaataacagagagagagagagaatttgagctgaatgattttcagtattgagatgagtaataactcattgtatatatacaagcctaatacagttacaaagctaacaaataataacagaaaacagctgtacagtaactaacttagtcaaaggaaataacataaataacaaacttaagtaatagctctaacaattctaactttgagagagaagcagggaattcaggaagtgctccgctgaaattgttgaaagaaagacttaatgacttcaaggatactaactttccaaatattgacattggcatgggaccagaaaatttattaacactaagtgagagactctgtaaatttttaaaacctctcatttcatccaagattttgctagacaaaatttcaaaaaccattgagacgttgccttcgtaattattgcttgtcaagtgaaattcctccaaattgcaaagttttcccatggatgtaggtatttttcctcctaaagaattatgacttcaatggaggtcaaatttgccacatgatgacttgagataatgccacgcagtttagtttgagtaaggtggaggtgttcaagattgggaaaattataaaagcaattaggaatgagagagtctatattattgccagacaaatcaagatatttgagaagggtcatgttatttgggaaggtacaagggattggctctctaagctcaatagaattgaaactcaagtcaagtgtctcaagggacgtaaggttaatgtgagatggaaaatgaatatgactaagttcacaagaggacaaacgtatttcgatctcgcaaggaaggaattgtgttcattgcaaaaagccattgatcagatgctttactaagattaacactagataagtctagaaattccaaagaaaaaagatgtgagatccaatgaagattatcaacatataagccatcataactatttctaagcccgagagagagtaaacttgagagataccttaaactcacaagacaacccatgaattttggaatattaacgctcccccaatagtattgtgagctcaagtttaagttatgaagatgtgtgagattaagtatggagggattgatgttggcctgtaaaggaaccgtacctgagagagagctcagagacatgcatggccagtaagagcccagtccatttgcagcaatcctcttcttcagaaacattccatgacactggatacatgttgtggcagagtatgttggtaccaacatctccatatttgcatttgcatttgcaaagcaaacattcaacatcatcatcatcttaataataataataatactaataatcattgttgttgtaaagtgaatattcatggatactaatattggtagtaatattaattgatttgaatgataattaaatagagagatacattagttgtccttatatatataattaaggtggagagaccatacatattaactatctccctttgacctttcaaagtgttttactggccacgtacatattatttgaataccaaaacacataaagtctacaatcacatgcaattaattagaaattcaaatccatcaacattcaaaactttgaaataacagcttttctattctcatcttcctctatcaatagagaaaattagaaaacctaaaatcaatacatagatcacctctatcaatagattaaggtacgcttccgctattcatgttctttctcctctttgaatcatcaaaaggcttagatgtatcgttatacacttctaatacaatatgtaatatttaagatattcaaactctattaagtattcataattaattaataataagagttagtatagtatacttcgagctatctagaaaccgatcaacaacaaataagccgaatccttaccaattgacctcacaacctacaatataaaaaaatactacaaaattacaaatttctttatttagctacttactagctatataatttattactaactagttgctcattaactagttgctaatgagcaactagttagtaataaaatatatgaatatagatgaaaattattagtaacttattaagtagttgtaactaattatttattagctactaagaaaataaaaacacatgaataagattgaaaataaaaatattgataaaaaaatataatttatttctaaactaattttttagaaattaatttataaacattaattttaatactttcatatctcattctcattcacaatatttaacaaaactattagttcaaaatattcaatacatacatatacaatacataaaataatctcctatatcacattctcattcacaatacatatacacactgtatatatttaacacaacacaaagtacatacatgtatattattaaagtttaaatttttaccatattaccgcaatccgaccaccaataccgactaaaatttggccaccacgcacaaccacaataacacaattttaataatatagaaaaaccctcaaaaaatttacaaaataaaatataaagcaatgcacattaataaaattagtagaaatttaatttataccttaatgaacgttgagattcaatattttctccactaaaaatggtggtcggaggtataaccaccataaccactacctctactttcggtttaccctaaaaaatgaggaaaaatgtgatcttttagcgtatatagttttaggtatggaaataaaagatttagaaaaaaaaaataagttaaaatagtgaaaaaaatggtgaaatggaggtaatttttcgtagtagttggcagagagagggtttgagggtttttagattggctgattgaatgaggaagacaaatggctggatagggttataaagcccttatggcatcggttatttggaaataactaacgacataattattttcaaaaaactgacgccataagaggcatagaattccctttagcggcactaaaaaaattgttactttagtgacaactttttagtcacagcataa

SEQ ID NO: 380970 - DNA, 1983 bp, Cannabis indica
aaatataattcatagagcaaaatcaacaaatttagacataccaagctattcaactagatatccaataagtcacccacggtcaaacatcaaaaaagtataaagtatactagatttccaaacaaaatgagtattaatagattcaatccatcaataactatcaattaatgatctttcagtaaaaattaagacataacaactcgattattcaatttgaaaaaagagataataatacggccaaccatgtcaatgacaatcttgaaggaagaccgatcaaaaaacccacgagaccaataaaaatttgagaatctccaaaatcaatatagtgaatatccttcaccataaacaaaattgccttaccatactaatagcagaacggtattgcaacaccattattgaaaaaaaaacacaaaaaagaaaaaacagcaaatgcaaacacctcccacataaggcttcaaaagccatatactaaactaataccaacaaggtgcattgttcaaaagaaaccatcccttcccacaagcactcgaagccaataaccaccattctaacccacccaccgacctccaaggagcaccaaatccccttcaaccctatgagtattgaaccacaactcacccgcaaagcccaactaccgcaccaaaaccaaaggcccaaagtcaaatctagaacccccaaccaacctccaacaaacccgaacccagaaaacaaaccaaggccgcaatgaagactagataaaggccgccggagaagcaaacccaaacccatcaaccccacacaacccaatgacaagagataaattgccaacgaacataaacaaaacatgaaagaaaggaatgaagcacataggaaaaatcaaacccatcaaagaaatcactcgattcctaaccagagccacgcccaaggccatgagcggccgacaagccctggtcaaaagtatcggcagctaaggttaagaaagaaaccctagcaaaacatacatataaatgaataaaagcatgttaatgttagttaacagttttaagttaatttgttgtatctgagggaacacagtgggaacatattagtcaagtataatttttcatcccatactctcataatttttcatttgtttgttagtacagcatatacctaacaatttccaaattcagtgaagaatttgattcccaaaaaaaacccaagtataaagccaaaaggagaggataaagcatgttctctactacaagtttttcatttttttcatgggagcactccactgaaaattctaatgtaagttatacatactttctataaccaacttcaacatcaactaccactagtctaccctatagtttctcttctgagacttgacaaagaaagaaaagcatataatttaaccgaagcctcagtagaaaagagttgtacgctctcctatcttacagcaagggtggttatgtaaaagatgtaattctgcctgtacacctctaagctggactgagtactgactgcatttgtaaagaatatctataaactttgccaaatttacttcaagaggtaactttttgcctcatccattttgtagctgaccacttttcccctgaaagtacttcacaaccgccatgtatgctatttggatcagattgtccatcaagaccctgaaatatgccaagtaaacataaaaagataaatgaaacgaaattcccttatcgtaatttaatttgtattaataattgtgttccaaaactaaaggaaagctggcccctcatctgtaactaaaaggatcaagaggaagagggatacagcctgatcagggtttcagtatatgtgttctactccttgcttcttcaagctcataaataatacaaaaacaaagtgaaacaaacccgaaacattttaaaactacttatgaagcacaaggagctaaaccacttgaagctagttcaagtggccataagagagtgcgtgtgtgttggagatcttgggttcgagtctcagattatgcattgt

SEQ ID NO: 380971 - DNA, 5182 bp, Cannabis indica
aaaaatagaagaaaaaccgagtcccgagcagctgacttctgaaactatttctgtctgtaatggttagtagaaataaaatcttcaaaaggaaaaagaagatgattagcattatgagtcggtctcgcttagatgcgatgatttccatgttcgtttcggtgcatccacacgagacctctgctctgctccattcatcttcctgtttcttcttcgtaagctccaatctcattttcaatcttctattaatttcaattctaaattttcttgatttgaacggaaaactcagaatctaagagcacaattttctctcaaattctaattgtataatatgtatatatgtacatatgtatgtatgcatttgaaccccgcagattttaagcgcctatttcgtggttcttcctttgcgcgatgagggtgctatctccttaggtttatcgaatcttcctggtctatttttgggatctttagctctcactttggtcgccgcccctgtttcaactctcgttttctcattgcctaatctttctaaagctaaggtacttcctttttgtctggttttgtatttttttcccctaattcaagaggtagtagatgattcgtagcgaaacaaaggtgtttgtcaatgtaatgacgtgttttggagtttggttgtgtgatccctgtggaagaacaaacaaaagaaaagaaaaggtttcaattattggatacattacgataatgctgtcagtaaagagctgaagttgttagtttcatcacttgagtaacatataaaacatatttctactttggttagaattagtttggatcaccttaactgaggaataaatgaataaataaataaataagtgagggactcaccaaaattcgtaatgcatgaatgagtagatcacctttacggttggtaaacattgtctaagtgatgagaatggtcttcgcagctaatatataatatatataatatatattatatatatatatgttgaaaagttttctcctttgttccaatatcaaggtagtacttttgatttgagtagccagttcttaccagttatctcaacagtttactctgtctctctctcattttattttttcatatcttcccgtaataaattcttcttgaaatttcaggctttggttttgatacacaggtttttcagtgtatcacttgttttatttttctttctatggcattcctcaccagctgcttcatcaacgtcaaaggtaggaatagtttctaaatttagcttattttgtatattattttctgctgaatctcttgttttctcgcatccatctagagtgctgtcggtacccctgctagttcagcaaaagatcaaacggttgaatccaatgatgataatcctgcatattcagttgggtggggcgatcatggattgttttatgtctctgtcagaattggattgtttctttgggtatgtagatattgaatttagttatatatatatatatattatatatatattatgtgcttggttactatcaggattagagttatcctaagttgtttttttacccttaattgaaggttgctttactcaatctaatcacaatttcttcaacttgggctagagtgattgatgtcatggacagtgaggtttgtgtgctatcataccattattaatttgatttacagacttctggtgtacacttaacatgttctgtattcagtcaggttcaagattgtttgggtttattggtgctggagccacacttggccagctttttgggtcattgtttgccacaggaatggcttggttggggccctgtatgtttgttagctcagtctttgacaatataaacctatattcttactcctccttctctttgacattggttttcaaccgtaaattaatctgttgcagtcctcctattattcgctgctttgctgatggaatttgcggcacaatcagcaaaagggataaactttgatatttcccaactccctgaagaattagctcctatcaggtaagctatattctttagcttacatgaatgcacaaatagtggtcatcactgtacatttgaaaatggaagttgtgataggaaaaactaaatataaatttataaaatatagaattaaaaatcatacgagttatgatagcaaaaaaaaaaatcatatgagttaaattttaaagaaggggtcctacacggctacacctatgatgcggtgcaaatccagttgagagaaagtaaacatgctattaggatctaaaactgaaataattctttcttgaaggaggtttcaatcacagaagaaaagatagggtggagttttttcttgacttttttatttatatattttaattttctgttttgccagtgaaacaacttctgatatgcagaaagaggctgatgagcgcacaattcaatcttcaaatatttcttctccagaaccatctactttggcagggaagcctcatttatggaccatcttagatggacttaggctcataatgtcatcaacctacttaatgtctgtgtctttattcttgtggctgggtgccgttgtatcttcctttttctactttcaggtaagaaaactcaaggatgatgataaactcactagaaagtagcataataagttgtttgagcttcatccacttaacttcacctataaatgttatctcattgtcctttctgttttcctttctctcacttgtctaagtctcagatatttacattaagaattttaaaaaatgctcttctttatttttggtttgatgcagaaagtgagtgtaattgcaacaacagtttctagctctcttgaaagaagaaaattgtttgctcagataaatagctttattgctatctttattcttacgggacaacttaccatgactgtacgtacttatgagcttgtgtaacatgttgtatctcaatcaagttttgtgcagcaaaggaaattacaagtattttcttttcaacataccaaaattgcagggacacattctgactgttgctggggttactatagctatatgttctgctccatttgttgccttattaaacatggttgctcttgctgtttggccaacctgggttgctattgctgtttctgagaccctgcgtaaggtttgtctaatttaaattatgctttaacagattcaaattaattttcctatcacaatttctctagtttagcaattacccttttctggggttgaaagttaaatgttgtaactggtgacgtttgcatgcaaagaaactaatttaattacacaagttataccaaaagtatacatgctaccatttacatacatgtatatgttatacttggggagaaagattaccaaaaatcaagactcaaatgtgatgaacgccaaaataaaataaaataatttggtacttatacatggcttctcaactacggcataggttgttacttacgttgtgaccaggccaggaagagaacttctgtttactgtggtatcgcgagatgagaaatacaaagccaaggtatgccaattttattttgaatctattatgatccgaaagctaactatcatgtatgttcattcttattgtttaattttatgttatcttcagttatgcatagatgttgttgttcaaagacttggagatgctacagcagcaggaatgtacaaactactatacagcactcataatggaagagcatcaaccgtctcactctatgccgtgcctgtacgtgtgaatatttattctttttagatactgtttgcattctttatttggtaaatccaaactgtgaatagaaaataagatcgaagtatcaccaaatgagattttgattgtatatgtttgttcaacactgctatcctgaacacgaagcactttggttgatctttctccagatctgtttactgtggatagtgacagcataccgcttggggcgccgccaaacccaacttgccaagctccagaatgttcccacttcttgaggtctaatacagtttattattcttatttttttttctcttccaaatcaaagatcaatgatatttagcttttacgtaccaactgtaacattctttttgatcaccttgttatgtattgtaaaggattcttaaaacacattaatattatgagtaataataggttattcatatttcatatattagaatgagatcacttgaggcatagtccaacaatatgtgagattatatttagatatatttgcggtaaaatttcttattagtttgaatatgttatacatgactctacggctatttaatgtaacgattaatttgcttgaaagggaaaaaaaaaataaattagaatttttgcattttgctttctgaactttgatatgtattaaattatattttgaattgatacatataaattctaatgtcaaaaatttaattagccaaaataaattattagagattattaaaataaaaaggtaaggaattaggattagtcacggagagaaggctacagttggtgcaaagaagaagtaaaccgatccaatttcactccattttcttcatggtctttaaataaaataagtatgtagactatagagtttgccactttacaaggggccaggggccaggcatgcctaaatagtaagagcattgttattagacaccagtggtgtctagtacttttacgacatatcgcgttgtaattgactaacgatattccttaaaaactattatattaaattatatgagacccaatacttagttggaccaatagcaatattgacacataggaggatgctagacaccactggtgctctttagcatttctcaaataataaatatgactctcaatcttctccacctcgcacttctagatctccatccatatatcccacattacttatctaacttgtttctctgagttgtatttacatttacactcgactaagagcatctacgaattggtgatattaaacaagcataagtccttttgaattttcagagtaaatgaaagaataaaatatattaatactttgatggaatttaaatatttattttcgtctccacaccaattcatttaaaagcccaaaagtcagctcatgttacaaattccaaagactaaattagtgctcttgttcgtaattgtaactgttatttgtactcttctttgtgattttgttgtaataaattcaacacgtaatttaaaaaaaaaaaaaaataccaacacgtaagtatacgtatcgttttaacaagta

SEQ ID NO: 380972 - DNA, 1202 bp, Cannabis indica
attttatctacaatttccaaagtagtttacctactaataatgtctgtttaccaagctatacaatataaataaataaaatatatataatacgtaaaaagggttcattttaccaaacctacaacataataaaactcaattaattattggtcaggttagagtatttagaaattataaccataaagaaaagtacactactttatattaatattagttggacaaaatagtgtctttattaaatgaaggtatacaaaccacacaattgatggtaactttaaagaaacaaaataaaaatggacagtagaaaaagacagtatgatatgtggaccaatatagtaattgatagtggtccaaacgaaaggggtgcagtcggcccgttcggtcccgttttgggtcctatgccatcagatcatgattcatgtacctaatacattcacatatatatatagaccaccaacccatttgctatgccttctaattccaaggctctctctttgtttttgtgcctaattctatgttttaacttttagtattgtctttttattattgtatatacaacaacaatacagatggttgtgttccaaaattgtaggcctataacaatgttattttgaactactctttcttgtagagggtgccttcatgaatgtattggaccttgaattagtactatatataactacttaattattatttaaagactctaggtaggccaaatggccaattacttgtagatcaagtggctggggtcttggaggtttgtaaataattatgtatagagaattattaaaagtattagttcacactctaaaatataatagtgttattgatgtaattaaatatcgtattttaaataatttaatataataattttgtggaatatccatatgcctaatagcaatactcttgtcttgtatatattttgttcattaaattattttatcatcctaacattgaggatcttattcttgttttctggtatggtagtgtatatgttcagtgaaaaagtgaaaaagggagaatacatatattaggggcaaattgtgaaaaaaaaaattggtggggcaagataaattagtaatattcacacacacatatatataatagatagatgttaggtgtcaagtcacgtatattaattttatttaagtttttagtttttttaatatcataattttaaaatcaataatattcaatgtattgat

SEQ ID NO: 380973 - DNA, 3201 bp, Cannabis indica
ttttttaaaaaaaaaaaatttatatatgctggggctcgttcttctcaatctgttgccttttattgttattactttagatcttatgttgagtaacaatccgatattttgtagcttttgagttgtgatataaagctttttctttttatataattcattgcaaagttaattgggactactttcttttcttgttttcacggaaaaatcacagagctttgatctaatttaagcttgttcctgcataatcagttggctgattttgtaaattaacttcctttttttctttgctttgaactcattaaggttttctcactctcccttgatatatgtataagtataaccgaatatatttgatatatgtattggtaggtaatgatatgattgtctgatggtaatacgcttacccaaatttacaagtcaatgtggcattggttaaatatattggggagtgatatttacaaacagactctgttctcaacaacccccccctttttttttgtcaataatctggttgaatctttggttaagttgaagtttttttttttttaatcaagcagattatggaggggcaattggggctgctaaaagttgttgttgtgcaagggaagaaactggtcatccgggatttcaagagtagtgatccttacgttgtagtcaagttaggcaatcaggtgagctcttcttttgattcattcccaacgtggtacactttgtcagtagtcctaggatgttgatatgatattccccctcaatcttggctgaactccacaaattcttcattcattttggagatgacaacataaggggggcctacatggtctcttttactggtttttatacttttgttttgtacctacaattgtatcttgatgagattgatacagttctttggactcttaagcacaatagtgactttaatgtttgtttacttatgttttttcttctttgaatttatttctgtaacagacagcaaaaacaaaggttataaatagttgccttaatccagtctggaatgaagagcttactttctccctcaaagaacctaatggggttttgaatttggtaagtttccaagattttgaatgtctagctatctatatcactgccacatagtttcaatttcaagatatattttggtttagcactcatctctgcttctgctatgtaaaaatcctgaacctgtattttggttagccattgaagttgcacattgttaaaggcttcatatacaactttgttttaggtagactttaagtagcgtttggttggaaggaatgaaaacgtagaaataggaatagaattgaatcaaatttaaaatgcataaatcctaaaatagaatggaattcaaatggaatagtcattccatccaaatgatgaaaaagtaattttattggaatgacatattatttcattacctttaacaaaacgccacttaaacaagcttatttttcttgcgtttattagtcttaacttgaagtattacaacatttcaattgttatatttctttcttactcaagccaactattgtttttgtctttctatttgtaatattctccatgtatttcactgaagacataattaatgattagtatgttatatgactaaagtgctttttccccttaggaagtgtttgataaagacctattaaagacagatgacaaaatgggacatgcacaactcagccttcaaccacttgtctctgcagctagactcaggcagattctgcagaacttcaatggggagacagtgttaaggaaggttgtcccggatggcgataactgtttggtcagagagagctccatcacttgtgtcaatggtgaggtggtgcagggtgtttggttaaggctgtgtgatgtcgaatccggggagatcgaattgaagatcaagctagctgatcaacctcctgttggtcttcctaatgctacctcaagaaagagtggaaactaaggttggagtagttttgtgtaggatgtagacgtgtttctaacaatggaaaatttaaaaagagtggaaatattattgtagtttagctatcttgggataaaacactatttgataatataagcagatttaaatttagcttagcattgatttgagtttgaaatatgagattgccaagattgtttgtgcttgtgagtcctgtaatctgtatgtgtacatactttatgttcctttttttaaaatgatttttgatcaaaaagctactgatgttgttttcttattaattagcatgaagtcaccattcttaaatatgttttggaatgatgattccctttctaattatttattttagaaatggtgattctaattcttttttttttcttttttgaaatagaatcaccattcctgtcaattttacttctgaaatagtgattctaatcctaatttttaatggaatcactgtttatggatatttttgaaaatctatctagttcttgcagattcgtggctgctattgacaacccagtcttaaatgttgactttgttattatgataatccaattcctaattttcacttttttattgaataatattcctcattttttactcaaagttttgagattgtgatgagtataaagtcaatgatttttttagttcaatatccaatgataataaaaatataactttgtctgttagtttttaaattagacacatgtaaattccaaattttaaatcattgagtaaggacgagatggagtagtataactgtataagtgattttcaaatctttttatggcaatttaaaaaggtaagtttgattataagtctaagacattaatgaaatttttacaaatgagcaaaaattatagttttactgatattaggtgtttatgccgttttcaaatttaaaattttatatacaggaaaatattcctattaattaatcctacaaagaaaaaaagctctttagaaaatattaacttgaaaatcacgctgagtatacttaaagtttgtttaacagagtttcaagccaatttttgatgtgaaatttttacaaccgcccctagttaagatttgttaaacaactatattttgtaaacataattagccaattctttttgggttaatttcacaaatgcacaaaaacaataaaaatacagtttcacggaattttaaatatttttacgatttttttaattttatttacataaaatacggtttttttatgttaaaattttgttcatttgttgttaattttttgt

SEQ ID NO: 380974 - DNA, 1936 bp, Cannabis indica
gatgattcaattccatctgatgatttaaaattgctaaaacacacgaagttgaatagcataaagttgagtaaaattacatgccatgccactccccggaaaccaacctcagtggtggccgaagagggagaagaagacttggatgataatttgaggagagcgcttcaagttctgttgtgggtcgctgagggagtctacatattgtggctttttctgctaccttatgcccctgttagtatatctatgcctttcttttgataacaattttttgttccatttgttgatcatcctaattcaatttggtttaattgtcacaaaaaatatgaacagggagatcctgtatgggctatcagttcagacacagtaaattcccttctgggcctctctctcaatttcttctttattttgcctctgatgaattctggtatgttcaaatcattgttattaacataccccataaccacttttcactcatttgttaactttttccttttaatgtttaggatggtgtgagtttactcaagtgtataatggataattttgtattatgacagttcttattcttttagcatatttttgtttgttacatgattgatatatcagtttactttcttggcagagtagttggtattcatttgcttgaggcaccagttctacacccggtatgaatcaataacacatttttggctttgattaaccaccacacttcatgtttcttgatccaaacatctctgttgttttctgatactgcttatcatatatttccttagatgtctgaaggactattcaattttgtaattgggtggacatttatgtttgctcctttgctgttcacggatcgtaagagggacagatataagggatctctagacgttttgtggggtttccaaatgttcctcacaaacagtatgttttgttttaatatagttgaattttgtgcttacttcttataatcattggtaagagttacattttgaaatgaccaaagaatcaacttttattttccatcacagcatttttgataccatacatggctatcagactgaatgaggctgaatcagacgacactcgaaatcaaaacaagctttcacagctggggtccgtcatgacaagaggtgcatctgttgtcggtcttactggtggagttgtatgtctggtatctacattatgggcgttgtttggtcgtatggatggcggtttcgggggcattgcagagagatgggagtttctgattagttatcttggttcagagaggcttgcttatgctttcatttgggatatagctctctacactatcttccagccttggttgattggtgaaaatcttcgaaatgttcagcagagcaagcttggtattgtaaatcttcttagatttgttcctgtggttggcttaattgcttaccttgtttcattgaatcttgatgatgaattatagcttcaagtatgtgtaatcccagcttgattgtcttgtggtacttttgctgttcaatatagaaatatttttgctatgagcttctattattcaatggtattctgaatgtgtgtgccatgcaaaaagcaacacaatgaaccatcgttttttattatttattttccactaggagcatcaacaagtgaggaaatttcaagaaatgaaaatgggctaccattaccaacatcaaaatctacaacacaatattttgacataactgaccgtgcaagattagtctctaaaattggttgtgaaagaactggatgtaatcaaacagctttcatgaaccaccgcaccaccttatcctgtctaagattgagctagtttaaatagatgtcatttattcttcatttacttaaccttattcagtattctcaactctattaattccattattcattttactcaattttttttttgaggaaattacactctataccctttttatattgtcttcttttattttta

SEQ ID NO: 380975 - DNA, 3289 bp, Cannabis indica
ttttgagagaagaatataataattaatataagcaaattaaggtagtatgaactcagatgtaattcaaaggttgaggaaaagcagttggtagttatttgactttttgttccaatataatttccatgttaatattagtgaactatgcatttcatgggcttattaccacccaattttcggcattaaataagtaagaggagggcacttgaatattgagaaatgctaaagggtaatagtggtgcttagcactctcctatgtgttaatatcgctattggtctaactaagtttctggtctcatataatttaatataatagcttttaagaagtatcgctagccaattgcaacgcgacatgtcaagaaggtactaagcacgattgatgcctaataacaatgctattaaatattagatgaatttcatcaccatcattattgtattaaatttgtcaaaatatttcaagtcaaatgttggtatttttgccgcagtcagtgggggaaaatctcaaaattaatatgcttattatattaacgttctctaaattaacagcatatttgtaaatcaatttataatagtaatattaatgtacgatattgatttatatatagtaagaaataaaaagtcaaaagaagagatgattggtactgagtactgtagtaagtaagaaaatatgttccaatagatgggaactgctaaagtccaaaactatttgggtgtttggtttgtctctacgtcaggtactactcatttgtacctaaaacaaaggaataattttatatattagctagctaccacaagattataatacatatatagtcaatatttttttgtgagataactagatttttttaatgacatcagcatgcatgtccattgtaatattgtgttatttttcatcacagaagtggcgttcggatctgatctcaactccaagcgcgaaaattacactaaattatctcatatttatttttttaaaaatatgaaattaattatatacattattgatggtgcaaatattgtaatttttatatacattaattatatacattttatttatttatttatttttattttcatgcatgattgactaatgctcaattttattttaataattgtaagactaattaggatttttgccttttaaattttgacatgtatcaaatcatgcctcctgaacttttaaggtcgttaaaaatatttcttgaactattgagattgttggatttatggacttttgtctaatttcatttaattttactacttcagtgattgtttatatattaaaccatgctcccctgactttgatatctaccaaatcatgcccctcgaactttaacatatactaaatcatggttcctggactttcattcatattaaacttttttactaaaattagaaaaaagttcttaaatccaacaatctaaatagttcagagggcattttcaacgatcttaaaagttcagggagcatgatttggtatatgtcaaagtttaaaggcaaaaatcctaattagcctaattgcaatttgcaatgttaattgtgcgctggaatccaacaacatgataagagaatctttttttaactccatatatagaacacataattgctagctagagtagttaataataaagttatccctatatctatagctttaaactttatttattaatggataaatataaagccatgcaaaagagacaaacagacaataaaaagtagtaaccataaaaattacagtgttcacacacacacatagcttattgttaagaaaaaaacaaattgattatatatatataaagaatgaaactgagaccaatttcatttgttatatagctcagaaaaagtatcctctatgccatattaaattttaaaagcttattatttattaacatttacatacattctaaattataatgttactataaacagtgacaggttctggccagcatgagaaatagtcaactattttgacttgagagagcataaaaacttgattaattaacggtctttaaactaccaaagtcaaagactgttattataaatatatagaaatatttagccataaaaacatatatatacacacactattgaaaccctaaaattacgatcaactaataataaggggattggccccacttttcttaaaataataataatcacgccatcactctcggctttattcacttataaataattctcacattaattacactatactccaacctcaccccacttctctcttttatttttttttcttctattctctattctaaaagaataaaaaaaaatggccaaactttcaactttgcttatcttatttcacatatcttttctaatatcagttacttcactatctcttgcttcaattcaagaccctgaacttgttgtacaagaagtacaccggtaatatattattaataattacattcataattatcttattttatttttataataatgtttgagagtttcacgttgataatatatatttattaatttttattattattaggagtatcaatgcttctagaagaaacttggggtatttatcatgtgggacaggaaaccccattgatgattgttggagatgtgatcctaactgggagaagaatcgccaacgcttagccgactgcgcaatagggttcggtaaagacgccattggaggcaaaaacggaagaatctacgtggttacagactcaggcaacgacgacccggtaaaccctagaccgggaacactcagacatgcggttatacaagacgagccgttgtggatcatattcaagagagacatggtgataaaactcgagaaagagctcgtgatgaactctttcaagacgatagacggccgtggagcgagcgtccacgtggccggcggtgcatgcataacgatccattacgtgtctaacgtgattattcatgggattcatatccatgattgtaaacctgggagtagtggtgatattagaaactctcctgaacattctgggtattggagagtttcggatggcgatggtgtttctatatttgattcacaacatgtttgggttgaccattgttcgctttcgaattgtaaagatgggcttattgatgctattcatggttcaactgctattacaatttcgaataattattttactcatcatgataaggttatgcttttgggacatagtgattcctatactcgtgataagaatatgcaggttactgttgcttttaatcattttggtgaaggccttgtccaaagaatgccaaggtacgtaaaatatatgcttataaattaagtttctatatatat

SEQ ID NO: 380976 - DNA, 3337 bp, Cannabis indica
ctaagtctttgagatgaagatttattttctcataggtggttttgaataaaatgttggacgaggctctgttgtcgatcattgttcaggccaccattttgtttgcgatttgcacctctagcaccaggggatcgttgtgtagatagctcactactttggaatcctcatcgttgaaattagttattctcggacctttttctgtgcatgcttgggtctcctttcttcaatgtccaagatttcttctccttgctcgtactaaagagtttgactgtaagtttctctcgcattcttagaatctcctacaatgtgcgggcctcctatgatgacttgcagatgtccatcaacaagttgtggcatcagtgggttttgattatcatcctacggggcgaccctttgcttcttggtcggtctttacatacctcctgatgtgcgaattatttttctgaataagaaatttaatcgcttccttcaaatttttgtactcattggtgtcatggccgaaatccttatgaaagcgtctatacttggaatggtccctcttgtctcgcatcattttttatgggtggtagatctcttgtatgacattaacgattatgttattgttatgatggttttttttttatcttcagtgagaatagttaaggacgtaaactttggagctttttcctgcaagtattggtttttagggttattaaattatcctttctttccattgccctgattgttcccaccatttgatctctttctgctgtggctgcccctgccttgcttgggactagagcacttagagacgtgctggtattttgcttttggttggtggaaaccatcctaggggctgcattccgtactacctcctccaacttaataaatccatctgccttatccaggaatttttccatggagttcattgtaagcctcttgatgtctttctacaaatcttctagtggcatagttcctccgagcacaacaacaagccttccttggtcaacccttttactctggtggcttcagtcatgaactaacttatgctgtctttaagtggttcgtttgggggttgctttactccgaccaagtcttcctagtgtacagggaattacctagaagatgagaattgtgcatggaactctgatataaggagtcccacgaatcaaactttcttggcgtgagtttgaaataccattgttgggtttcctttgccaatggctgggaatactctacaacatacatcatcgtacgcactgtaaatccatctgcaacttgaaattctttatatgggataatgggtcttcttttcccgtgtatgccttccaggtaggcattttcaacttggacggaagagggagtgcatttattcaagaagtaaatggtgaacctcttgcctggtcaagctcaaggttggtgaattttagcctggtcacacttttgactctgcttttaaggtgatccagttgggcttgcaccactggatcaacttgctttgattgttgactagcctgtgtcatttgtttccctcttagagctttgggcggtgcgtaagagtccacattaatgggttgtacttttggaagggttactctctgctccctccgttgattcaatgtgggcctgaggtcgacaggctgggttcctatcctcccgaaagcagatttcctcggaggccgtcatgcattctcagtgttggctggtggaacttctctccaagcacatcgatctctctccttttgagcataggttacactatctgctccatgatcgttgttacttgaaaatatttgactacgagcagttgtagtttggccctgccttaaagctatgtatggaatgtactgaaaatactgaacttggccatttttatcataaatggatataggatcttgaaaccccgcatttttgctggtcgggtgttcccacttggaggtgaaaattctaactattttttcctggtaattcatgatcgtttactattgggcccatatttacatgtgaccacaaattggacggtccgacatgcaagggttttgggtgtgggtcactagaacttccgacccgtggttattcctgggcaaaacatatgcttcttttccacgaacaagatccctaacgagaggaatttcttcctgcaatttttgcccggtgtactgattaaactgccttatcaactccatgatttcacgtgatcggtggttgatcgcctcttgctaggctctcaggctctctgcctgtttttccatctactcttggaaaagctttttttgttgcgcaaaggcttcgttcttggctactcgggtattaacctggtcgtgatgcaatgtgtttgtgtggctttgaatttgagccactgcctccctttaattttggagttttgcatcatcgttgatcatcacttgtgttctactcggtggtactctagaaccttgatcactctcccccacaccttcagtgccagggttttgggtgcttggattaaccacgagtggatttctctgattggtagaattttgggcattcaaatcagcagccattgggtatgcagagtcagtggcttgatttcttcgagtttgtacaaccattttcactctttgttgaacaaactaatcaaatcgtgttcttgagttcatctctcaatgagagcaccaaaatattaaccttgcttttggtcaacgacattgagtccttaaagcaacaagaaatttataagcttagagaaatataaatgacatatatagtaaaataaagaacaccagatgttataggttcaaccctaatgttttggtaatgacctattccccttcttattgtatttgacttgtgagaagaaaagcaaaatgactgctctctcttgaaagttttacaggaaattgagcagcgtatagactctctcaagaaataatttttagctctgtttccagtaaagttgatctactatttatagagaatattcaaaataggattcaagctcatcaagctctcattccactgatttagggaaccaactccttttcctaaaatcaaggaagtataatcgcgattccctttcaactcggtattaattacatgctaagatatgttattaattatatttaagacttgcgtcttctttttggccggcctacgtgaggttcatactattttcgtccgaccaggcctgcacatcttgaagatgtgcgacgaactcacactactacaaaacaagcctttagagtcgcttttttcagcataataattaataaccgacgccatagggttaaaaattttaagaagggaatttgacgccacttttggcgtcggttatttggaaataaccgacgccaagttaggtacgtgcccctactgcgtcggt

SEQ ID NO: 380977 - DNA, 2790 bp, Cannabis indica
agagagagagagagagaagggtacccctaggctatatatacttgttaaagctgttatctcttattttatcatatgcaaaggatatagtttttgtctggattttaataagatagggataacaagccaaatgaagttaaaattttctttttaacccatttctataagtaaaaataactttatatattcattacaaataagctctgaaagttcacaatgatgaaattctgtgcttcttgattttgatgaaactatatttatatatatgtatgtgtagtaccaactacccaagtatacaaaaagtcttactaaaaagtacacacatttttatgccacaatgaaaaaacaaaatggttatgaatgtaccaaatatgttatgatagtaagcctaggtagattttacaaagagaaatgcaaaagaggcacatgtgtagtaccttcacttattatatatttaaaaaatgactaattatttataggacatcatttgctaccataatcttttcttaaaatcttattttcaaggatgataagaaaatttcatcttttagtcacttgagtatctcatcatcattttctccacttctcaaaattcactaatttcaaatccaaagccaatatataatatcaagaaaattcttaaaaagtattagtaaaaagtattagtgtctaatactcttttatatgtcaatatcgttattggtccaattaaatatcagattctatatagtttaatataataatttttagaaagtatcgataactaattacaaaaccacatgtctaaaagtacttaaatatccattatcaaaatccactaattaattagtttgttaatttactctacaattcttatctagtaaatcaaatatattaactggtcttatctaatttattaaaatattgacctttttaataaattaccaatcttgatatttatgatggcaaattagtaaaaaaagaaaaatcttaatttaccaaacaatatgtaataatatgagaacataggaagaaaaccattattgattggattaaaaagaaacaatagtacaagtggggtaatttgctttgtttttctaaatttgtgtagaggagagaatatgaaaaaggataaagagaaaataaaaaaaaaaaaaaaaaaaaaaaaagtaatggcattatgaacacattttatgcattcactactcatcttaactttattatattccaattttgaatgtgagtactgattttgaattctgaaagtcaacaaaagtattttcattaaatgaaaaaagtaacattgaagttataaatgtataaaatgtttattataagacttacaattattattcattgctaaacagggcaagcaagaaataaatcagcctagtaagttttgatatatatgttgaaatggtttgaaccataatacatagaaaaataccatgttcaaattacaaaatgaaatgtaaaagcatgttgtttgttttttcatacacaacaagttgttttgttaggtactatttatataaattatttatctgtcttatcaaaaaattagacacatgaataattacaacatattcatatataatgtagaaaataccatatgatgatcacatgaagctactagagaaagatagagagagagaggctgattcatgatcaaaataagagaagagggaaatgtgtgtagaaaagactgacatagaaaactatttgggcaagtctttagaagttaaagcagggactatactactgcacatttgtatatatatattatttatgaaaactacaaaaatatatatatactaatatatatttttaaaggaaaagtatttttttaggctttgagatgggtgggctataagtggagcttaattcatttatctactttggtatctcaaagaattgtttgtagttatttaagatgtatcttgtaaattttttgagaaactatttagaaaaatataatataccgaaaaaagttcaaacattttattgcaagtgtaactgtattgtatgtactatatttttgggtgctaaatttttttcgaatttctcaatataacttaaataactatataacataaattaccataaaaaaattaaactaaaaaatttgttaaaatgctaatacatagtacaattttttaaccccttttaattgcattataaaatttttcaaaaatatataattgcgccacaaaattaaaggcaatgctgtcttgttgtataacattacatgtggccatatataattctctatctcttttcctttgtcataatttggatagagaaaacccactccctaaagggtacaaattaaataagtgaaaagaaagagggtattttatcctttcttttggccatatatctatctatctactactactatacaattccttttgggtgtagttgtgtttcatttcaatttataactatcaagattaagttctgtttttgtttcttttgtcattttccagtctctttggttggacaacgagtacatgtaaactaaaaatacatttattttacaataaaagtataggctaattatgatttttgccctctcaactttgatatataccaaatcatatctcctgaatttttaaggtcgttaaaaatacttattgaactattgagattgttgaatttaaggactttttctaattttagtaaaagagtctaacataaataaaagttcagggggcataatttagtacatgtcaaagttcgaggggcataattttggtagatatcaatatctggagagcatggattagtacataaacaatcactgaaatagta

SEQ ID NO: 380978 - DNA, 2745 bp, Cannabis indica
gaaaataaggcggcgccgaggaagaaaaacttcgatttatcaagcatttgccaatctatttctgccggtaaatgaatctcttgcgccgactcttcctccgccacactcaaattcattttcgccacttttgctaaaatacccagttactctttcaactaacttgatcccaaccaaaaccagaaccggaacctaaaattcctagttaaatttccctatcagttatcaccaaccttaatccaccacttcataaacagccaaactgtacaaaaagttcaccaaccgaactagaaaccctagatgtacggactatacaattaattaaagagaaaaatacaaaagaaataagtaacatgtataaatttcacataaacataaggattatccaacaagaaatatatccgatggattaacgctttttcctcctgtgaaaccaggatttggatcgaggatgagctacgacgaaccaatctaacatttctttttttttttttgttaagaatgcagaaccaaatatgatcaacctaaacttttctttaccggaaaaaaaggagcatgatcattgtcttcagccggagtattcagattttgccggagaaaactaagattacgatgtgtaacaaattaaagaaaagaaaaacaactatatatctactaacagtagagagggaattgaaagcttgaaaataaagttaaaggaaacaaaaagattggtaagagagaaagagaagtgtatatatatgtatatgaccggagatgggaggtgtattgtgaaggcaaaaaaagagctaacctgaggtaggaggtggggaactgacacgtgtcagttatagattagggtgtttttcttacagtttgttgtcgttggtacaaatccacagtacgtgtgagaatgtgacgtgtgaatcctatccatacgcgagacttacgggcaccgcttgtgattgtctacagacggtctcaccttttttgttatatatctcccacttgtactaatttctgtcctttaccttattaaaagaacttctcttaattaaattaactatataatcttttgattaaaaattcatgaatatcttaatttctttatgtagaaaatgaagaaaatataatattggttggtgaattattattaggtattatttaagatttttacgatttatataataatcccttaactatttatattgttattaattgactcttttgttaaatttttacactgataaataaaatgaaaaaaattctacagtgtatttgttaaaagagatatactaaaatgagaaaaattttacagtgtatttattaaaagagatatactgatacatctttatttgctttagtattcgaaataattttttaattaaatgtttaaaataaaaaaagagatgattgaaatgaagcagaagtactagtagattaatagattagtaaatttaattgtttgtattttgggtattgtgttgattaggcaaagtttaattagagaacaattaaaaaaggtatgtagatagccttggattggatattggatgaggtggaccatcttattagtacacgtcacacacttgagagagcgtccgaccaaagtcatgatctaaacatacacgttatccccaatttattattattaattatatttaataaatatttaaggacttttctttcatcaaatatttctctccatttccataaatattttattatttatatagagagaattatatatttatctgcaattcagtaatcttacacacacagtcagtatgcatttttcatatatattgaatttttatcataaataataattatgtataaaaataatattatggactgaatggattattaaataattaaaagttcgtttctgtcatttctcatgcatgctttgtttgtgtacagatcatgtttcttttacctccaaactattacgtacattacatatacatgtaaaatctttgttctctaataaattttttcttcaggcaatactgattatttgtctcataattagacaccatatttttggggaaaaaccaataataattatatataaaaaaacctattcaatcttggtacgtatatacatttatacgtttaaaattaattgggaaaataaaatgcccaagcgtaattacatgtgaataaggacgtttaagtgttattttcttgcgtactataagtttaattatttggcaacttaattatagtatctcggaaaggctaaagattttatgtggaggacgttatcaaagtgtcttccttcacgtcaaagtttgacaaataaacatgtgaatatggagcaaaattgtgccctatgtggagcgcttttcattggtttcatgcctatatgcttggtatgggagtattgcgagttttctggttttgcagcagtagggcgtgatttgggcattattatggactagtttcagaacgttatgaggagggtggacgtcgcagatggtttatatgtactggtgatttgctatggaaagctctaagtatggcatgaagccggggctcacgggctagctccgtacttagagcccacactattttggagtccaaaataaaaaattaagagtcccattaaacatttaagtaaaattatgttgaaatgctaaaaattaagcacctagcactttcagatgtgtcaatatcgctattggactaactaaatatcgggtcccatataatttaatataatagtttttaggaagtatgactagccaattgtaacgcaacatg

SEQ ID NO: 380979 - DNA, 886 bp, Cannabis indica
tgtatatgtttgtcaatatgatgagacaacttttcggggtgaatgggagtttggttgcttggagctacctctcacttttggaactttattagcgccatggcatgtaatactaagctttgcctgattctcagctttagatattttttaatgtagaaaatatgaacgcgttaaagtttctgttgaaatacctctttttgttcatttattttataatttcttgaggattttagagggtgattcttggatttctttttcgatttcatttcatgagctgtgtagttgtaaaaagcagaatgcatgagctcagcatccttgatttgtactccatgatgaattgcctgttagaaattaagaaatgtctggtcactgttctaaggctattctaatcagtgtgaaagaaactgtctacaaatcatttgtttttggtaactaggttggaactttatgttttagtttgtttttatttagttcagtttgatacgtgtttgttcaatttgtgcatatccaatcaaattgcagatttcagaggcctccaggagtaattccctcttcaatgctgggttttgaggcaattactggagctttggatgacttttgctttgaggattatctaaatggtaagttattcctaccaatttatcttcatttaaaagaaaatgcaagtcgtttgcctaatgaccaggatacttctaagtattctcctttctgttcaggtgttagtcttttttatattatgcccccttgataattaaagttagcacaaaacaaaaacgcctttggtgtttctgaagtgtgtaaccttctatttttttttttatcttcgaatgtcttctttttcactcactcatcttcagtccttcacattagacttcaaagtctttcaatt

SEQ ID NO: 380980 - DNA, 3146 bp, Cannabis indica
agaaccttcatcttatggattgtcaactggagtcactacctctatggtttccactgcaaatgtggatggatcagttctgttggctaatcaagagataccacatgttgttacatcctttaaaacagatgcatctgcattggggtcttatacaccacctgtttctgctgggagtggaaaaagaaggttctctgaaatgcctcttcctgtaggtcctggccaaaaggaacagtttcagacaacttatagagatcgtgctgctgagaggaggagcctctatggctcgtcactatctgtaggagataattcatccgaccttggtttaggggatgcgagtaaggtttcttgaacatcttgtttgtggatttgttcatttttttcaccatttagaatagcaagcttgtctgttacttgggttcgcttattaaactgaaatgcttagttctgtgatataaattttgcttgttctgtactggttctgcagtttgggatgtgtcattagttgtttgaaaagctagggtttccaagttaatgggtccatctgttttcttaatgctgttttaatttgtgagaaatcacgtgtttacaatcttgaactttcaagctcgagattttgttccaaggaagggttcattggatccaatgccttttcctcctggtgttggtggaggacgtcctgctggtgatgcaagcgtaagcagctatgaggtgatcacaacagaaaaagcaattgatgaaagtaatgtaggcaatcgaatgctccgcagcatgggatggcatgagggactggtaagagtgacttgctggtttcatttgtgtagctgtatgctcatctgcacttatatctgtttatttttgctttcagtatccttctgtgttttatgtctttgtttcaatgaaatgattgtagctttaatagttggttttaactggctacattatttaacgtcgttgttaatgaatggaaatatatttttgttcctttacattgggtgatgttttttgttttcttttacctcacttaatctccttgagtttgagaaaggtacatgatctccctcaatttttagataccatgccttcccttggtgaatttatgaagtttcattccgtacgtgtttgcctgttggttccttgagaatagagattttcaaccttgtgctgtacactagctaagtattggcatttctaatatgtcagagtgttggtatatttcttttgtcttcggatgttatatacaggggctagggaaagatgggagtggaatgaaagagccagtgcaggcacaagcggtggaaagtagagcaggacttgggagtagtaggcagaagaagttggatcctagccttgaggtgcaggctggggatagttacaaaactctcattcacaagaaagctctcgctaggttccgagagatgtcttagtctcttagatgacttttcttttttcgccactttttggcattatcactagaactgtttatttaagttaactgggcaataattgtatgtagaagggtcagtcaacgctgtagagttcctataaatttgtgattgaatttataaatttgctattgatattaagatggaatttgctaatgatatttgttcattctttgttgggaaatttgtggcaaggagacattatttatgtttgggttatttgcggtgagattcctgtagtatttgtgataattacaaatatgaccctaataaaaaagtaaataatataagccttctgatatgatattgttgtagcatgtttttttggttgttaaatgctacctaaccctgttaagtgccagttaggattctaaataatattttaaaaataaattacttaatttatagctcaaattaaaaaaatatgttagaattcttgaaaaaaaaattaaaaataaacaaacttttttttcttcggtggcacttgatcttcttttctcgaaaaatgaaattctaaaccctaaaatcctgaattccaatagctactcgcacaagccactcagcaccaattttaaaaatattgatatacttcccatttgttttgccaatagcttagtatgtttgaaaggagggagacatgagtggatagagaaggaaggagagagagaggtggtgggagagtcgaaatctatttgtttggcacggaagattgtgggagggagaagagaagtgaaaggattaaaaatccatatgggccaccattttgtatctctccacaaatgaaagatttttactcctttctaattcatttcaaaatatttatatatagataataaagtagtttcataaatatatagtaatttatcctttcacctctctatctctatttccaaacaattaagagattactactgtcattttcctcttttatactctctattcatattcaactctccatcctaccaaacataatattagtgttcatttttcccaagccagaatttcaaacccattaataacttgaatcccaaagctagctccggaccagaaactatatatataagaaactaacatatctacaaaaaaatgcataaacaattattcttttcatctcctatcccatgaattaaatcctaaaacataaactccatggaattaaaatccaaattattttgcaatcaaaatccgatttgaaactcaaaaaaataagtctaataaatcatagttgaataaaacaaaacctaataaaaacccataaataattaacctcatgtatgagcaaaatcatgaataataatgtggaaaaaaattcatcaaaatcagatacacaaacaaatccctaacaagcaaatctaccaaaaaccatatcatacaaaaagctctccgttcaagtacgattttgaaatcatttgttagaatagtttgtgaattattagaggtcattaaaccgcccacactgtacaaatcgcacgcaccgcaccacaacgcgtaaaaaatacagttcgaatttttttgcagtgcagttgtagtttgtatttttgccaaaccgcgtattgtgcggtttgcatttttgaatttaataaccccggttcaaactgcaccgcactatttattacaaagttactactttttacaatatgatttttattcttttgttccatataagaataaatatatgtaatatatgtgtatattacattatttttt

SEQ ID NO: 380981 - DNA, 2400 bp, Cannabis indica
gtatgaaacgcttgtaacacacgccatcaagagctgtctacatctttcgttgaatccattagctctgagtactctgtcaaggaagtcccattccattttgtcataagccttatgcatgtcaagcttcaaggccataagacccccacgaccccttttatgcagaatcttgtgaattatttcttgagtgagaatagatgactctgctatccaccttcctggaataaacgcagactgaaaagggtaaactaaatcgttcatgagcggacgcaatctattggataagatttttgcaattactttataagagaaattgcaaagacttatcggcctaaattggtctacactcatagaaaattccactttaggaatgagacacatgaaagtgttgttgagcttcgagtacattctgccacttgagaaaaattccttaactgtagtacatagattggctcctacaacatcccaatacttatggtagaaacaacctgaaaacccgtcaggccccggggcctttagaggatggagactgaaaactgcttctttaatctctgcatctgaggggatactggcaaacttttcatttgaaagagaatcaatcttattaacaaacaaaccttcaaacatctcatcaataactggttttgcagaggtgaacaattccatgaagtgtgagtagattacttccccaatatgcttcctatccttccagactttcccttccttatccttgagagaccatatactatttcttcttttcctgataattgttgcagcgtgaaaaaaactggtatttctatctcccaaggctagccaagtctcctttgacttttgtctccacatgctctctaatttggaccaggcagccgagagcagtgtttgaactctcaactcttcttctttaagtactgctgtaataggttggttttgaatccaaacaagtattccctctaagtctttaatttcaccatcatttatccccttaagattcttcttccaagcctgaagggcaatttttgattggtgaatgtttcggatgaaagtccaagtagcagttccacccgaagaggaccaggcagaagcaattacttgcttacaagaatcttcccacgacaaggcttcaaaaaaacgaaaaggtataaaacctctagcaatgaacacatgagtgtcaagaattataggagcatggtcagagattgagataggcaaattcctcacacccgctgaggcatactccaacaaccattctggagagcataaagctctatcaagacgctctctaatcagacctccagaaaatctattgttttgccatgtgaacttgtttccaataaactgcaaatccacactcccagtgttatccatgaagtctctaagccactttatatatgagaaggacacatttcgaccctcaactttctcctcttgactgcaaatacaattcaagtcccctgtcaatacccacgacatctgacaaggagagaactcagcttccatgcttttccaaaagacctattttgcatctatataaggggtcccataaaccacatataatttccaattcagttgaaggtgaacatcccacacagtagcttcaaagaaaccttcagcaaaataattaactaccaagtttatattattattccacatcagacaagaaccccctgccaaaccattagcaccaacacattctactcttgtaaaacccaacttccgagagactctctccatggtactcttacttactttagtttccatcaaaaagacacaatccaccttgtgtttattgacccaagctacaagagcttggggtgtcgggtctcttgcaaggccccgacaattccaggataggcacttcatggcgcttggggggcattataagggccgcctcctcgcccatagtaaaattttgggaactttcaacatgcacttcaaccagattgagagtatcaataagatttttctgggtaatattatcagcttctggttctaaattattgctttgattcttcttagtagctatagctttggatcgagaccccttccttctctgtttgtcaagtttcgtggaggaggaagaggctcctgagcccatcttaaactaagagttaggagctggagagaactctggtaggacagggacttcttcagagaattccatggtgttttcctctgtatgttgcacataaggaactaaggtgaggctagctttccttttcctcggctatgggcattgatggactaaattggatacatcaattgggtcatgaaatagggtaggcattggctcaaacttgtccacaggtaatgggcccataagttcctcagccaaaccaatctcttcagcatatacgggccaagtaaagtgggtgggcttaggatgcttatgttgggttttatgcc

SEQ ID NO: 380982 - DNA, 6447 bp, Cannabis indica
ttaaggagacagaaaaatgtcctttcaaatatgtgatgaggacacatatgtatgtatctattctatactgatcattgattgagactttaatctaatttacttgtgtcttttgaagcaggtatagggtcaaaaatataattctttctttttctttccctactcataataaaccctatttttcctttcattctacttattttttaattacaacaccattttatcaatttatttatcttcaattgaaatagatatattttatgtttatttatctatactaatatttttgagtgatgatttattgttaaaaattatatcaaccacacagagcagttataagttttgaacctgacaattctgtgttttgatataattttggaccactaataataatttggtattttcttcttctttttttccatttaaattgttttttagcagaaaataattctttgaaatttttgaaaaagaaatcaattgaatatgcggcgattggcaattagaattataccgtacatatatatttacgtatatgttatctaataattaatttcacaaattaacaatatataaacaatatgtgattgccattttcttttttcaaactattaatatctatcctattgtgaaaaaaaacaaatgcaaaaacatcgaattagataagagctataaacaaagctaattttcattgttttcttttttggaattattttcattaaattgttttacaagaaatgttttatagtagtgttgcccacaaatgatatgtttgacaagttttgaaaatttcaaatttgacagagcgttctaaaagcaggagtgcttcgaatattggagcctacttacaatctttttattgaaggtaaggatctgaaagagattgtgaattccacagtagcagtagttctagctatactcattaaaactttccaattttcattagcaagaggaactgttctaaaaaaattaagtttgaaccagagaagccgaaatcagtaacaagttaccctttatgaagggtaacatatagctcccactgacaaatctaagagaaactctgactacgagagctacctttcacttggattcattttctctggggattgttgaactctaattaggtcaaaaacacttcttgagatgcttctaacccaaaaaaaaataagacaggaatgtgtaagacccctacccgaaaagcatggagtaggtcaaaaaagttataaaattttgctatgggaaaaagctctttattgtggtaaaatcaataatctctatctaaccatgtcaaaaagaaaatccaattttcatggcttataatattaacaagtttgaagctcatagttaaaccaattctctcgtacaagtcatagtcatagtcatagatattatataatattacatatgcacatctacatatttcataagtcacaattcattttatatatataaactaaaaggttgtagcttctctcacttgtgtgctcctctcacttgtagttgtccttttgcaaagaaggacatcattagtttgtattttcaacatccacccctctcagagaatatacgttgcatctgcacccttgttgcatcagctgtagtatgatgcataacaaaaactgtattaccaaagcctgcaacaaaaagcatatatgtatctatatttttgtttttatgtacaattacagactaatatgtcgacaaatcgccaccgtcgaaaggcatagttaggatcaatatgccaaacggtgtcacaaaagcgagttccaatcagagcagactattgagattgtttcagccaaaggaaatattttttaggcccttattgaaagaaaatagggtaaatacctattctgcgttttacaaaaattaccgaataaaatctctattttattaaatgacatattgaaccttatatttttcaaaatagtaccgcgaactaattttttgtcaaaataaaagttaataataactcaatctaaagttgttatgataaaactgaatacattttctgcatctgttcgtgctaaaacttgtcttcaagttagttatattttaaaaaaaaattatcaaaaattaaaccgagaatactattttgtaccattttgaaaaatataagatccaatttgtcatttggcaaaacagagagtctaattaataacttttgcaaaacacacgatccaaatggtattaaaccaagcaaatatggtaattttgaaaaataccaaaaataatatgcatattttgcaaagggaagttttatttttgggcctctggattgtgtcggcctaaaccctagtctgccttagcccagaaccagccctagttgaaatgcaagagaagatgtccgatttataataaagttaataacttttttttttttgattagtgaaagtgccataggcacaataaagttaataactttgaagacctagtagaaggaacaacagaaataaagttgagagtaattggaaaaaaggagacctttattaatttttgtaatgttcctttgcaaaatagtctcttttgatcatagttatagtgtgtctggaagatcatttagtaaataattatagagaaaaatgctattttgcaaagtgatcatataaaaagactaatttgtgaagaaccccattaatgacaggaagacaaatttttatgtcatagtgcctcatctgagaaaaaattacacaaatatggtgagcaaagaaacaactttgtctaccaaagttgcagctactgtaagctgtttgcaaaaccaggaatcatattctatattatataaaaaatttgatattattaagctatataaattagtgttgcttaccatctatgctcgggttgtgttgttccatgtcgtcctgttcttgctcggttcgcatcaggtcagatgtttcgcattgagaagcatttcctattgacatggaaaatgaatcaggaacataaaatgaatttctactactggttgtctgcttctttgcagccgaagattcggctgtggagcacaagtcttcatcagctcttgagatcccttctttcaagagattctcaggattttcctcttgtatacttttaggcctcttcttattattagtattctttaagttttgaaaagatggaaccctttgatcattagatgaattagtataacatgaaggtggagctcttccctttaagaccaccttaggaattgccatggtttcaacacgatcagagttatcgaaaacttcttcatctgctgcagcatttgatcccgaaccccttgaagctgcttcaagttcccacatcttccttatagctttagtcaaatgttctctagccaagtcaatatcaatgattggttttggatagttcaaacccaactctactcctgaagctttgagcacagattcgggtgcatcccacggatgatgaatccactcaggggacaatcgtgctaactccggtagccaatgcctcacatattcgccttcagggtcaaattttgagccttgaacctggcatcaatgctcacaatttttagattgtgtaaatgctgttgaatatcagattgcaaatactattatgacactaaaaaataaactttctttcttccgaatttcgcttccttgaagcataccaaatataactctagataattttttaatgtcactatgcaaaatagccctcaaagaatatgtttttgacaagattatgcaaaaaaaattaacatggtgttgagtaagtctgcaatgtcattttgtaaagaactatccaaacaaagctattgagcaagatgcctagaaaaatataataaataaagggttaaatttttattaccgaacacccgaatattctatcaagattcatactctgtatttcaacctcagagttaaaaacaaaataatcttatatgctatcaaaagtacaacatatgacataatctgaaccacaatgaaatgattcagctctacagaaaatcccacatactgaaatgagtagtatggaagattgaccctccaaactatgatgaatcttagacacagctatgcaaaagttgtttcatgatgagcaaaacaaatagaagacacatccataaaacaaatatttcaattatgtgtaaaaatctcatgttcatgtagtgatatataagggaaacagaaaagcaaacctctggacaatccaaacgttcgagttcatggccatccggtatactccctgatatatactgccaaccaagaatatcactttccaagtctgcatccaaaagtgtgtcccagaagtacttcataccccatctccaaggaataagcaaaactttcacagcgaaacacgacacaatcactctaatcctgttgtgcatccacccagttgcccaaagctctctcattccagcatcaaccaaagggtagccagttcggccttgtctccatgccttaaaatgagcagcgttaggttgccatgggaaatatttcaagttatccagaagtgatctttcgtgtgtaaaaggaaaattaaaacaaagataacgtgagtattctcttaaaccgatagccctgatgaatgaagttacactctgttcgccaaccgagttcccttcattagtccatagtatctgcttcattcttgcatattggaaaacttttctcacacttaattccccgaaatgaaggtatggagacaacagtgatgtgttgttacctccaacacttaacctattgtttgaatagtcaagaagattctcctcaataaattcatttagagccttatcagcattgctccaccctggtgaccaagctcttcctagaagggcattgctagatttttctgaatcgtcctctagacccaattcgttgatcgaaaactttgtcattgttcctgtcaatgataacacaaactattgtctcatctgttcttacttcacatctgtttatttcttgaaaaattaagcattaaaaaatgagtatttgttgtattataagctttgaaatatacctgaagctggtagcaatttccatggaggaagaatcgaaacaggttcaagtggcatttgtaaacacttctcccaatatgcctcaaaggtagtaaatgcatttccactatcatcatacacttcccatggctcaaacaacaaatctccattgtagctctgcacagaaatgcctaactctaccagtttttctttgatgttatgatcacgaacaagagaaacgggatctgagtaaaggaaagcaatatgtttattgggttagctagagcaataatcccatctaagaattctgaaaagatctcaatttgatgaactagccaaaagcttcaaaatgacattgaacatatgaactagcaatacataattcaatttaacaaagtcaataacttaccataaagatggttaaacaccactttagtagctccaacggcattgatacactccaagagagcatccaaagtacttgatgttttaataagaacaagctcagccccaagtgagatcagagacttattcaaatgggcaagagattgtttcagccaccacctcgaaactcgacctggatagaactgtccttcctctttaggacaccatataaacacaggaaaaacactaccttccctagcagcagcagccaaagcaggattatcctcaatccttaggtcccttctgaaccaaactatagtcttgttcttgttactattactatccatattgcataataaacccaattcctaaaacaccttgaaatcttctctaaatcatattctcaaacactggaaatacaagatctaaacttttttcaatttaaagctttaccaacttaaaccccaccattaatccatcaaagaaagaaagctccaccacaactgcacccaaataagaatacagatagatcaaacactcatgtgactatgtgccatggatctgagtcaaacccagaacaataaaatcattaaagaacattatccttaaagacccagaaattagattatagataaataccaaaagaaagagaatataatcagacaaatcagccaattgaagttgaaaatgaaaactgatgattcaaagaagataacaaaacacccatttaagctaactaccaaccaaaataagacccatgtaaaaagatttatcttttagcaaccttattagatcatctctctctttgatgaggtagaaatcagacttttttttttcaccaaagaaaaaaatatcaagagctcagtgaatcaaagtgatgacttttccattgaagttggttttttttttttctcaaatttatgtcaaaatcatgaaagtgactttggtggggaaacacttctggtaccttcggttaaaaggaaaaattaataaaaatcctaactttgaagaagataagagcatattccttctccttttttcttttggtaccaagttgtagcaagtattggttagtaaattttttatattatttattaaatattaattaaaatttttat

SEQ ID NO: 380983 - DNA, 3083 bp, Cannabis indica
caaacataatagatttgtgttctttgtagatggatgagtagatttgtgggaaagttgggacaaaattttaattagagaaaataaaaactgtcgtaaagtgatagaggtaaaaatggtagaatgattaaaaaagagataaacataatacattttgaaagagatataaaaattaaagacatcaagttaaaataagtatgtagcataatttcttaaaaaaaaaaaagcgcaattttatatactgtgtaaatttcacttttttcctttgtatattttcgtgggactccgtttaggttggcctaaaccctcctttaccaccgagtactgaagctagttctgaaggcagcattgcctctttcactcttggaagagtccttttattcctttttctctcattaatacctagaaaagacaggtaatactacttaaatatactccatgaggctcagagtgaagtgttctttggacacaaatcttcttttgggatcacttagttaattatacatctacactcatttttatgagattagctctatttgaagagagatgaattttgcatatgtttttggaaaagttagaaaagtctttgtttgttagggaaggctagagtggatttaagatatcatcaccttcccgaactccaccatttgcattcgatatttccgccattaaaggaacaggctactctaacatgagagcctccgatacccttcgaattaacaactttgttcaatggaactcgtgagtgaaggttttgtattacttgacttgtacatcatgaaagaaattcatatcaagcattgatatcaaatagcaaacactaaaacattgctcctaaagattcatatagctctatacaatgaccttatttatcatcacttgtatcattttttcttttttaaaattgtaatctctattggcaatttaaaattagaacaaatacgttaaagtattaaatgtcattttataaaatgggaaagataatcaaaataactagcatcaacaaccaatccaagtttgaaaatccatgtaatgtaacacaagaacaagaaaaagcataagaccaagcaaaattgaattgtcggagagaatagatagtcgtttgcttttaattactactaaactcagcttaaaccctaaatcctctgctgttcctctttcctctagccttctcgaacttccttccctttgagcgaacgtacggcttagtgtgactgtgaggcacaccaggagctggtccaaagtgcttcactgcttcacgtgaattctttggacctcttagaagaacctacagagataacacaacaaaagattcttatcatataatgtgagtgatttggtgagttgggggttcgaaaatttctctgatataagagagaagtaaaaatgatgtgaagttaaataccgtgttctgcccaagaggtgctctcaaagcaagctgatcaaaggtgaggcactcccctcctgctttctcgattctggcacgtgcagtctcggtaaacctcaatgcagtgaccttcattgctggaacatcatgaacccgaatgtcatcggtgacagttccaacgagcacagcaaccttaccttcctataaataatgtagaggaacacatgattaatatacaataactaaatttctcactatacagataatgtagtacaaggcagctgagattagagttatcacctttccttgcatgtaacggatcagtctagaaagagaaagtggtgccttgttgaccttgctcataaaaagacgcttgagaataactgcattgaacttgcttccagttcttcgcacaagaaagcgatataactgtaatagaaaaaaccaacatctagtcagaccatgttcatatatacaaactaattgccacaaaatcatagaaaggagatattacataatgaagacactacagttgaaaaggcaaacattcttttgcatttgcccagaaacaacaaaatccattcgcatacataataaaattacacaaaattatggactgtagttctctcagagtattacagataagaaacttcatgaagtagtcagtatatattaccataaaaaaagaacaataaaatacaacatggcctagtcttataaaactaagaaacatacatttctagaccttaagatcccataatgagctgagatacacatttgccatcattgttatttcacaaatgaccaaacagactttcagaatattcacaacaacacttgagctgaatcagtgatacaactcaccacctaagatttacaaaccagattcataataaacctaacaaatctagggttagtactacaaaatcaatcaacatcacatttagcttcttaagttcttgcaagagattatcatattcaagtagatacaagcaaacccatataacacaaaaacaaacatttgcaattaaccctataattccacccaaaaaaacacaaaaaaaaatgggaaaaggtatagctaaaggaccttgacaagaagcttgagataaacatcatcggattttggtgcggtcctcttggtcttcttggacttacctcctgcaactagatcgataccctgttcgccaacatagccaaatcaaattgattcagttcaaagacagaatcttttacatgaaataagctcaaagaaggtgggagataagagatttggtaccatggtggtttaggtttatcgctgctctccctcgctcgccgcctggtgtaacccaaaatgaaagaagctagggtttaactctcaagccttttatgattattgtaagggtgcggggacagaccacttcttttgttttcataagaatccccaaaatatcttataattacaaaatctgccaaaccaaatgccaaatttaacatattatgcattttaatacactctatttgcaaaatatgccacaatttcaatattaaatggaaaatttcataaaccatgctttattttagatcccaaactaaaagggaaatttacatggtatactaacttttgttattttcttacaaaaatactgtcaggtggtattttttacttttttactgtgttttttataagtttcatactgcagtatactctgttaag

SEQ ID NO: 380984 - DNA, 2748 bp, Cannabis indica
atccaatattgttgtagtgaatattacatattacaaacacacactcacacgcacacaattagaaattaatacaattcaaattacatatcataaaaccaaatgagataataataataataattcaacaccaagccacgtacggtacataaggcctatagtcttgttcacacacctgaaatcattcaaaacacaattcaacaaaccaattttgcactatattacttaatattctatacaaaaatttgtgtaaaaattaattttttttgttgcacttaaatttctatataaattatttggtgaaaaaaattccaacattgtctttttcgttgcagttgatagttttttgaaaattcatgtataattcatttttgatgcaacatcaatcctgaagttggtaacaacaaaaaaattaatattgtagtaaaatgattgcctagctaagaatttttgggacatataaatttaattgcaacaaaataactctataaaaaattttgccacaaaaaattacagaaagatttgggcaacaaaataaataagactcgatattaaattttaccagtaataccttattaacagttaggaggagatggaatgttgcatttagcgggtagttgcatggcgagagtaggatcgatgccaaaagcactgagtaggaaagggctgctatttttgtaatcacagaagcactgtaaatcggcgctttttaaagcgtcgcaacaggtttgggtagggggaacggggttagatgcggtgacagccggtcgacaagtgttgaggccatcctcactcatgttgcatatgcctgcagcactagacacttcaaacatagatgacacaataagtactattgccataatcaccattgttgccattttcatctccatatcttaaaaaattatctcttctttattattaacttactcctttgatagtattgttcaattaatttgatgttagtgtatttatatatgtgtagtgtagggaggaaagagattggaaagattgtaaaccacaagtttgaaaacccgtgaatgagaattggcactattaggctagctaagggtcacgggaacttattctttttttgtgtgttaaattaatttattaataataatgagtgagtgagtttgaccttttgggatatggtgattgttatatacggttgtatagtattgtcttatgtttgtatacaactcatttaaaaacaaaaatacactaaaagtacgaaatcataccagtttggacctatatatataacttatcttttgttgttaataacagagttatatctatggagatgaacagagtaagacaagattaacttgtgataaactaattgacttagctagcgatttgagttccgaaaataaagtaaaagattaaacaaatactatctaaatatataactttcattagtgatcgattgatctttgattagtttggtaaacaagtaaataaaaacatatccaataagggcttgtttgacaactggattgtattttatagtattgtgtttggtattatattgtattaatagacgtgtaaattatattatctttcttgactataaactcgactccaatcccaatacctaaaccatgactttggactcggacccttgggtcgagtttagggttcagtccaggattagggtccaagtttggagttcgggtctggccgaatccagagtcgagggtcaggtttgaattttgaggttcgggactatggctaggctaagtctagagtctaggtccaaattcgaagttcgagtttaaatttgggtttgaaatttgggattcgaattctttttaaatattataatacaaactaatacatattatttgttaaatatttaataatacaattcacatgtattaaatttatagtcataagaatttatacaatataaaattttattcaaacataatattttttattatttaatacaatacgacatttatattaaataaattaaaatttgaagtcggcataactttataaatttaatgaaatcttcaaagtgtttattttagtagaattataactattttgggtgaatccctaattccccatacaaacgcattcttttatgttagtgtggcgtgcaggaccataaatttttacaagagtcaaaatttaaatgtataaaaaatatatatgatttaaaattattaaaattgtaatactatataatatataccaaagaaagtattaaaaaaaatataacaaataaaattaatgggaacccgtgtaagaatttatatttttctttttaaaaaaaaaaggattaagaactaagaatttatgatcaattgccccccatagtcattgaatatccacattatttagggcactctaaataaattttctatactattctttaaaatagattactaaaattttactttctctattagtctctaaattttattttctacatcaaataaaatattttatctttacatatttaattacttaaattaaaaaaaatagaaaaaatactaaaaaaagttaattagtaggagagagaaaaaaaaagattattaaaaaatatatgaagaagctttaaaatttctctctatatgtggagatgaattaaaaaatttctattttaaagagctgatgaagttattttttataccattttctttataattttaaaaaatgtaagagtttgaaagaattgttgggagctcttgttgagtaaactgctagcaaaataaaagaggaacgatattaccgaat

SEQ ID NO: 380985 - DNA, 2455 bp, Cannabis indica
acaggttgttttacagtcctaccaaattgtacattgacgtcaatctgaatgttaacctcttatagcaaagatcaggtgaaggttgtctcattttcaaaatgctgatatcaggccctaatatttatatcatattttagaaatttatgtaataaaaaatatcaaataccaattgtctttgaagatctcaccatgtgatagtcagcaagattgctggtataagcatccaaccgcttcagatcataaggtgataacacttctttaatcgaggttacaaacccgtctaaggtagacgtccctgaatctggctccatgaatttcatttttggttccaaaatgctgtgagattacaaagtatgagcaccttgaataataagcacgcaacttacagaaattaacttcaatactaacctcatagcaagcttgtactccattgaacgaaaagtctgactcaataatctactaaatcttagcctgaaatctgtgtaaccacaaagtatcacgctgagtaccaaaaataaacaactagagcaaattattaatcttttgaacaatagacaccttggtaaaatggtccaagaaagccaaattcatccgatcccttatcttcaatatcatcgttgttcaaaggtttcaagaccatacacgaatgctcaccagtcacagtactctattccattaaaagaaaatagcattttaaacctccataacaaatatattaatgacatacaaaaagaacatgtgaaagtctcctcttaactgggctgtggccaataaaaaacggaacaaacttatgttttctccaaaagcgaaaaagctccaatgtaagtccaaaggagacaccaatatagtgaagcttctctggttttctttcacgaagatgaactagcaaatgaggaaggcctttctttggttttatgttttcttctagcaatgaaacctgtatagggaaaacaaaaatcagaaatgtttctcagatatataacgaaaggaaacccttatgactaaggaaacactcaaaacacaaaccaataaggcatatttggtcatagaaaagctgggtcactttgctagaaaatattatcctcctttggaaaccagatatgactcataaaaccagcaccatgtttaagttttacaactttcctttcatggaatatttgtcctggcagttagggttattactggtgtacaccattgaatcagaaaatattatcctccctttgtaaaacttctgttaatatttcccactccaacgtataggtgtaaaagaaaattataaggtacatatgatatagctaactactaaaatacagaaacagccatgccgcctacaaaaataataattaccctatgagctaaaaacctcaaataaagtacccttgtacaaattatagaagagccattctgatttaacattagtataaaaaaaaacgtactttccagaaaatatatgagaacaagagaaactaattataggtgttggatctaacctgttttgcagcttctatgactctgacaggtgtgttctccacggcattttcagaatctatttcagaaataggtgcaaactgtccttcataatacctgaagaagaaaaatattttgctttaaactcaaaaggcatttctgacagatttgttattatttattatatatctgactatatcactgagactcttatcacaatatgttacaaaattaatgcaatagtagagacaaggcagctctgtacctcttttacaaatgacatttatacaaaaagaaaagaaacaatgtcccattatttctcagatcattctcatgcttaaaagcaaatgcaagtcaaaattaaaattaaacctaaaaagatgattctgtaactaatgtttgtagtaaacttacagtcaatgggtattgttacaagaactaaaaagttataaccaagcaactttaccaatgggtctaagtatgcagcagtccagagtgatcaaaaataacataccttgtcaaaagttcaactgcttgtgaaccatatcctagctgcaaataaaaaaggagaggaaaacccataaaaattaagaaacttttgatggaaaacaaaccacaaaaactctaagaactcagcacaacctttattgcacttggatgggtagcaatccggacaatccgggcacctgaaagagttggaaaaacagtgtcttggaattgttcgttaaatttccatggtatctggtctcctgcaggttgacgaccagtacttaagcttctcaaagcggacgcacgggaaatctgcccctcaagacagacctgtgaatatattacaaacagcactcttgaggcattgagcaaataaatgtatttatttacatatgacagcaatgttaaagaagttattcaagtacagtgtaaacattcaagttaaataacaaagaataattagcatatttgccccctgaactttcggcactacctagtt

SEQ ID NO: 380986 - DNA, 1830 bp, Cannabis indica
tatatttcttgaatttctaaggttgcctttaattaggaaataacttagacaatttattttccataactacaaggtcacctggtatggtgtcatccatggcaaatattttttgatatagctcttttgtaataattaaagaatattccaagatcaatctcaacatatcttgaattcctaatacgaaaaatatgggtatagtggcaggtaatgttttactaatatatgagactaggaacatatgtttactcccattgaacctgtgatatatacacaatcatcaaaagtttttatgtcataaccaaataagaatacttaatatcaattgtgttatcattgacgagaatcttacttgaatttttctaatctgtaaactatattatttgtatctttggatacaaaatttcttggttgaaccacataaattgtgtcataatatattgagaaatgacacttaataatctatttgatataacacaagaccaaaatgagtattcagtgccatgtttgtcctaaaattgtctttcaattaaaccaaatagaagtctatttaaattaaatgtcttttttatgagcatattccttagccacaagacataacgtgcacatctccatattgcaatttgcatttctcttggttataaaaatccatttataacaaattagttttgcactttttaacaataggaaaaatattcaaactttattgtctcacatcaatttgtactccttatttatgacataaattcaaatttaaaaaataaaacattcatgacatgattaaagtaattggatatattatctcattctgatttttcattatgccctttttctcatgaatctctttaatggcactttgaggttgttaactttgctttctaagaaaattaccttatcttgaatgagaagttgttcgatattttcttgtcaatgttctgggttcacttcttgatcaatggaagttatagaaacctaaacactataaaaagtgatagtaggaattgagtttaatgtcaatttttcctccaaaacaatatctctaataatcttgtttctactcaaactcaatatattaactttttctcgtctcaaacatagaccttagagtgtgatcagaaaatttgtaaatctttatataaattactattgtatattgtaaagtatagtttcttactattttggagactaaattctctttatgtacttataagatattgccttagttggacatctacacaaatgcaatatatccttatgttaagattattagtctaaataaatgcatgtttatgaagagttttaactaatacttgaatcccaacagtttaaagatttacgttgcaatattaagtttctctccccaaaatgatttgatgaagaagaatggcttatcaaacttcttaccatatatacttagataaatgttcatgacgtctctcaaatacccttgaattaagtttgtttgacattttgtattgcaagatgaaattatattttctttggtaattgtgcaaaataattttagatgttcatctgatttgtcatacctcccatgagagtattaaccaccatagttgatttaaatgacattaattttcttgcctaactaatttgtcagttgtggttttaaaaatttagaagtacttttattgtgggaataattacttccaccgaggatagagtacatgatctgttatatataaatatatgggcgagtattcaatggttacaataaaaatgtaaatatgatcgatggttgcatttttttatgacttactataacaggtcattgacggataaaatttctatttttaaacttaaattaattatata

SEQ ID NO: 380987 - DNA, 5383 bp, Cannabis indica
atcatcatcatcatcatcacgaagatctaatcagtaaattacctgatgatattctggttttggtactcaatttcttatctttaagagactcaacaagaacaagcttactttctcggcgatggaagaatctctggaccctaatttcaggaacattggaattcgatgcgagcaagacaatggaggatatgagatggttaaggaagagcgaagcttcgagagaccaaggtatgcgaattgggtcaatcgagttatgggaaagcataggtctttgaagctcgaggaattgaaaatttgtttcgatcttgataatagttactgtttggatattaacaaatgggttgaatttgctgctgtaaaagaggtaaagaagcttgatttagggtttccaggtcgatggggaggaatgttgagaaacccttattgtttgcatatttcagttttgtgcaataaaatttggggaaaacttagaagtgatgctttttgttcattgactgatctgaatctgagttttgttgatgtcaatgatgatgttgttgagtatttcttggataaatgtcacaatcttgtgaatttatgcatcaagggttctaattctttgatcaaagttgaagtttctgaatgtgaaggtttcaatttgaagagcttaaagattttagagtgtccactcataaaagttgttaagatctcaacaccaaatcttgtttcatttgggtatgatggaccattgattgatatgccattcaataaagttccaaatctatctgaggtgtattttggaggaaataatacaatttccttggctaatcgatctaaagagcttttcgggtatttttctatgttgaagatactcaagttggacatgtctagttcggttagtatttgaaagaaatgaaagaaactcctttaccttaaaaacaactacttttgtactttcacttatttctcatatgttgttgtgttcttctttaatgttaattaggtctataacttcaatcatgtggccagagcttttgatactcaagttcctgaattaagtaatcttgagcaattggaactgtctataatggcttactgtgatcaatgtatcatttggccttgtttgatgataaaggctgctcctctcttgcataggttttcaatgaaggttagttactaccatgtccttccttgttgcttaagcaaactcatgaacaactaaaagcttatgcttttctcttaaaatgtagacatttcaatcattttaaggtttgacaatggttcttaacatcataacatattatatttgttctgtcttataatagtccataagttcgaccccgtttggcttagttctataagttcttttttagcttttaggattactaaagtcgtgtttggatctagcttcacccgaaataacttcaaaagaacttttctttagttacccaaacagaagaaataagctaaaactataagtagaagcttacctaaacgggattctgttttccatgactgatcataatcttgtgacagatgatgttcaagtgtacagatcaagacttatatgatagagatgatcaggtaataaagaaaacatttttaagtatatgcttctactgtctgagcttaacaattatgatgttaatttaatttgttatacatgtgatagttgttgttaaatgaagatcagataagaaaattaagagaagcagtgttgtttactcatcaaagtgttaaggaggtggagttgtatggtttttctgaccatagaaatatacatatggctgagctttggctaaggttggttgatattgcagtgtcacttgaaaaggttactattgatgttagacatccatgtttgaaggaaagtccatggctaaatgtcaaaacacaggagttagacaaagccagagagagagttaggttatttgttcaaaaacattccaaacccattgatatccttgtactgtagatttaaaaatctggtttcttttgtatgtaatcttaaagagtaatttctaagcggtataaactcaatgtttatttttagcggcataagtatccaatagttataaaactgtaattttcctttgtcagtacagactctgttttgaatttattaaaagaatattttggaagtaattgatacttcatatttttgcttagacccaatgatctagaatttggcctctatatgggtcatgtttaagacaataacaaagtctgtactgataaaattagagaaaaattacatttttacaaacattaggtacttatgtcgttaaaaatagatattgagtttatgtcacttactttaggtacttatgtcgctatttactatttttatatacttaattctctaatgttttttttttttggtggcaatagtactccattaatttcacttctgttttcaaatttgaggtatttgttcaatttaactgttatatgtcaaatgagatcgctattgtgtacatgacgcctaatttgggtggcagtagtactctcttaattttacttttgatacgggagtattgccatagtaaacttggtagccctagttgacatttaaggtaaaatttaacttgcgctcaaatttgcaaactggaatataaagttaaaagtattgtcactaaaaaaagagcagggcttaagtgtataaaaattgaaacatgaagggatttgatcgcaaaatacttgatcatacaaaaaaaaaattgtgcatgtttcatcaagcaagagctcttcttttagggggttagtagtagttttgacctttcattgctttttggtggcaataggaatatgagatctttagtgttcactattgtaagatcaatttttgttttcacataggttttaacaatgataaggtagtacaatgaaatctacctcagataaattagtataatatgtgtttttgttatcatgtgttcttcgataatgatcattggataaattccaattgtaatgtgaagaatcaatatagcatagaatttgagtttaaaattaaacatagtataccaaatcagtatattcttgtgaataataaaattatgatttattctaatttttagattagtagataccctaatgactatttttccatgcctaataatcatttttgggaacatggtataagagtattttgttaaaactcatatagcaaatgtgtattttgtttggtctgtctatccgatttaatttaattagtaattgtatttagaaaattatcattcaatccaattgaactttaaaacaaaattaataataacataaaacctaaacattggcaatcattcaagttaaatattaccaaaggttattaactttacaattttttattttgttaagaatacaatattgtattacaactgtgctcgagtagagttacaaaagagagaaacttctttcaagaaagttcattatttaattaaaaagtatgctaagtcaatacataaatcgcaacattacattgcgactaatatcagaaagagatacccaaaaatttaaacaacactttaatgttagaaaaaataactccttacttattatattagagttattcaacactaaaagcatcgacaatgaatttgaaaaaaaacctttaacatacaaaccaaatgtacaagcacaattcaataccatccaaagagattaaaaatgtctcaaaatattcaacacaacaattaatactatgatatatttttttaaaagtttctctaaataagtgtggaagagtgtaagaggaactaatgagatccaatatccaatgaaaatagaacataaatatatttattatttttaatatatactacatgtaaatgggattttgattggagttagacaacccatcttgccatctaatccaattataattggatatttattttttttaattaaattgatttggtataattagattgaattagataatgctcactataaataaatgtgctatataaaatttaattaataaacaaattaaaatatccctaactgtataaagattatatttcacgtatgaaatcacaatatctctagcaaaaatatttttataattcaaaaatcatgtaattatcttttattttatttttttgcaattattatcttttatatattaaaaattcatagtttggtcattatccaaatatttcaattcataatatttctttttcttttcaaagttcaatttaagtaatttattaaatagaatcaaattcttattatactagaaaaaaaaaatgaaaagggaaactaatgattttcccccccgcaaaattagtcaatattaattacaaatatataaaatatctacaaataaataagggaaaccaaacagaaattatttataccaatttaaatttaatttatgcctacacgtcttttatataatactaatcaaattacttagattagcaaacctataaaataaaaataaacatccaagaacacatagtgaagagattaaatcatcaattggtgatattttaagcaaccatggctgatgaacctaatctttgtgttaaagggtgtggattttatggaagagccgagaatcgaaacatgtgttctaagtgctacaatgagtttcttaagaatgaaataatttccaaatctatatctgaaattcacagtgacgagaatgatgatgcgattagtgagtctctttgtgatcaattaaaggatttgaaaattacgacaaatcgatgcaaggattgcaataagaaagttggattgacagggttttcatgtcgttgtggcaatgtttattgtagtcgtcatcgtttgcccgaacaacatgcttgtacctatgatttcaagggcgctgctcggaaaaacctcaaattgcctcttatttgtggtgaaaaattggagaagatactttaattttaagcattaattttttttgtacccaactatattattagtattttaatgaaaattttatctagattttatcaaataaagtgcaaaaagtgatatctattttatagaattttctaaaacatatggcaaaactaataggctgtgattttctcagccggttttgtcttggtgggtgttaagttactttttgattaatatggcaaaattattatttttttctttcacaaaaatctttagatgattaatgagccttggttttatagctttaaaatgaaaagttaagaatagtataatatggttggagcaaattttttactacaactaggtgaaatttgttatataaaacgctctgttctctcgcctaaagcttatggttaggattggggatgtactgcgagatctaaaactgcaaaaattacattgcaaaaatgtagtgtgttacgctgcgatttgaacagtttacactatcattattatcaaacattataataaaaaattcaaaaatcaatctaat

SEQ ID NO: 380988 - DNA, 3278 bp, Cannabis indica
ttttactttgtgtttttttcttttcttttagttccaaggttttagttgaattgcagctaaaaaattccatctgtgagccttgcttcatcactatattgtataaacttttaggtcctaaccaatagctgaatacttttgagaatgatgaagctggtcctggcataccaatattatagtatttttctggtttttttttttttacttttcaattttttcttgaaagatttattttcttctggtgttcactctttacaatttacagcaaaacagtgttcttggtttttttaccttgtattattgctattttcctttagcagtttagtttatccatgaaaagaaaaagataaatttgacactcaaaagtccccagcttgcaaattggcttgttgatacaatttttttctgtttaaaaatgttactagtttgtttttctctggattttaacactgtactctcactaatctttgtaaaacaaaataaacaaatgcaaagaatttagctttaaataaaaataagtcacaactaaatcagtactttaggtggttatgaaaaaagatatgcaattcattccaaacaagaaaccattacaaataattcaactaaggtatatttctttttcagtcattctaataaaccttgcttcagcaaaaccgaaaacctggtgatgtcagctgctgctagtccaagaaatgattgattaacttgaaagaggcaccatgattacaggtttgttctaatggactgagatctgttgtacctgttgttcttgtggcgattaaatcgtatagaagaaatctttcgagaaactgcctcccatatcatatctacagcatctccagactgggatggatactgatattcgaagaaatgtactatttccttcaatctttcccacatcttggtccacttctcttcattgattccccgaagaagattcagcaggtatcccttcttaatcgaatcaggtgcagaaacaaatatgcaaaactttgagtagtccaagacatcttcaaagggtagctcaatttcgtcactaattatcacaggaacacaatgactagcaatagcatcaaacagcctattcgaagaaggggtgtcaccagcaatatgtaagcaaaacttcgaggtggccatttcctgccctgcctggttgacaccattccctttaatgttaccaaaactgaattgcacatcaggctcatctttaagaagataaaatagttcttggcgaataactcctccctgaagatttacacacgaaaagatctttaataattgaaataacttaacatatattctcatacttataacataagacaaattcaatgatatcttgaattactgggtaaaaatacacaagagatctctggaaagtgctccttccaaggaacaaaaggttcagtaatgatgatacataaattagtaagcatataaatattataaaagagttagaggttgtcttgtcaaaatatgaaaaaataagttctcaaacgttgttatgtttgctccacattcaagtttgtgggaataaagcaaaatcacttcattttgtttcccgagattttaaatttattccaaggtattaaaagttaatttcaaaatgctttcttgttaccaagcacctcacacttgaccccaacatcaagtccagggtcagctaatcacactaaatctcacgatacatttacattgttaccagtccatttcacaaagttcaaaatgttgagtctacttggccatggcctatgttaagcaaaaaaccagattttcatttgaatagcaaaagcacttgaaaagatcacaatgcaatagaaaatgagagaaactcacatcttttctgtaaatagctccccgaaaatgagctaatgtaggacgttccgaaaaggaggctgattcattgatgggaacagttcccaccagatgcctgtaaggagcaattatatccttgtcaagatttgctatttcaaccgggtatctgccaaaatctgcaagcacaaacatagcagaacctaacttccttcttgcatctaacatgctatttgggtggtgagcaactattaggtgattcttcccactctgccgtttccattcatcacgactcatcaaaaactgaaccagcttctcctgcaactgcttgttgacactaactttttccttcccatgaagcttggaatgccggttgtaactcagagatgagaagaatgggacaaagataacatctgcttgacttgatttcttcactctgattgcagtgcaaggcctgaccattgttccaacattagatgataaaagatcaagagtaagccagtactctatgctgtgctgtagattcagcccaccgggatatgcggggattcgacttgggttttggacatcaggccaagtttgattccccatccctttccaatccaataaacgaaagtgaaactcaggaggcaagtcatacatatacactctcaggcgtgcctgagctgggtcacacaccaccttttcatgtcttttgaaagaagtagttttgttgttagaatttgaaactgggcagggtggctctttcctcatgatgggacttctggcatcaacttgtgatagctcagaggaaactaaaggaacttcaaactcttctcttatctcattgggctttaagtaaaatgaggtactattaacaagaattagcttaaaaactgacctgggtgtgaaagaagaattgctaaattgaagaagaaagatagaggaaaaaattaaaaggaacatggatatggttattaaataaaaaataaaccttgatggcaacctgctcttttccgacattgattaaataagataaataaataaaaactctttgcagattgtggcaccacctataagggctataagtagtaaaaagatagcaatatttccttctatagacacaggagcatcgtaaagcccataaacttcagaataaaagcttcacttcagtactcatggaaagttgaacagagaaacaccaatttatcttcaaatgtgtagggcaagacccaatttttatcttaaaaccccttcagggtttagaaaaaaatatgaatgtacagttgatacagtgtcaagccccaattatttccaattaccattccagggaaagcatttcgtacaaatacccctgatgttccagcaaaccaactaaataaaggtcacttctttatgagttaaaccccaaatcaatttgcaaaatctgtaccagaaagaagcacagaacaaatggaataaaaaccaaaaaaaaaaaaaaaaaactactacta

SEQ ID NO: 380989 - DNA, 4975 bp, Cannabis indica
attcaatacggtcataagccttaatagtatggtttgtttctctagtttctttgtttgtgggtgcgtcttccagtggtgtttacaacttttaggtagaagaggaagagtttgagggagtgacagtgggaggagacggggtggaagaggggattgatgataggtggtgcttagtggggaggtttccatctaataggatgatcgactttgataagatgcggaatatattggcttcgctatggcagccgggaatggaaatgtttgttaaaaagcttgagaacaatcgatttttgtttcaattctatcatgaaatagatattgatcaacgtgtcatcaatggcagcccgtggacttatgagagaatgcaattgattattcaacgattgcctgtgggaggagatccgtatgatgttcgtttaaacaaccttgatatttgggttcagattcatgatgtaaaactgggatgtatgacggaagggacagtccgtggagttggtaatgctttgggaaagttcttagaatcagattcgaaaaacttcattggagtctggagaaattatctcagaattagagtgacgattgatattgcaaaacctttaagaaggcgtatgaaactgacaaaagaagatggtagctggttttgggttcatttctaatatgaaaggatgtcgactttttgtttcatatgtggtgtcattggtcattccaaaaaaatttgcaaccgtctgtttcatcaatcgacagaccaaattacgaaaccgtacggtgatttcatgggagtgctgccacagaagaaccacaagaacattggagcgcagtggctttgtgtcccaaagggtggaagtcggaggtggctgacggcaacaatgaacctggacatgtaagctcctttcaaccgaatatggaaagaaggtctgacgttcatttagccaagaatcaatgaggagtgaatcaccataatatagtaaataaaattagtaatatgattggcaatcaagataatggtggacgtgttggcaatggggctgaagttaatgaggatatgtttggaaagaataaggaaaaggaaataatgagtgatgaaaatgttgggctgataatttaagataataaaaaaagaaaggttggggagggaggtagtatgggtcacatggagctggtggtagtggacttcaaaaaacactcatcattggcgggccttggcaatggggctcgccagacattatgaaaatgttgagttggaactgtcgtggtctggggcctacacgaaatgttcagttccttaaagagcttgttgctcaagaaaggcctaaggtaatattttgtgtgaaactttatgtaataaggagaaacttgaattattatgtagaagtttggagtatgaaggttgttttgttgttgaagctaatggtaggagtgagggactggcgttgttttggaagaatgaagaggaggttaatgttgattctttctttacaaatcacattgatagcttggttcagtttgaagggtatgggaagtttcgttttactgggttgtatggtgagcccaatcgtagcttaaggaggaatacttggaaacttttatggactttatatgctcgatcaaaagaggtttggtgtatcatgggtgattttaataatgttctccacaatagtgaaaagattgggggtaatccttatccaacttggctaattgaaggcttcaaagaggtgactcaacaatgtggtttaattgatcttgaaatgaatggccatccatttacatgggaaaagagtagagatactccccaatggattgaagcgaagcttgatcgtacaatggttaatcatgactggttaattaagtttcctgacgccaagttattcaacacggaggtttctccctctgatcatagccctttatttttggatatggagcatcaagtggctgttgaaagggtgagacattttcgtttcgaaaactgctgggtgagatttcaagagtgtgaagctattattcaggacagttggagtaatggtcttcttatgcaccagaatcagttgtgtggtcaggcacttcaagattggggcactcatgtttagggtaacttctcagctcgtatcaagaattgcaatagagagttaaagcaactgaagagccgtcgtgatgctgaagggaagcagcaatatgttgataccaaccaatagcttttcgaaatcttgaactagagagagatgttttggcggcaacaatctaaacaattgtggcttcaaaatggtgatcaaaatagtaaattttttcactctaaagcttcctcgcgtcgtcgtaataacaatattatcagtttaaaagatgttatggggaatccaaaaaaatgggataatggtcttggaaatgtgataaaggattatttttctcaaatttttactgctaaacatggggattgggatgaggttttgaattgtgtaaatcctatagtcaaggaggagcacaatagaaatttgcttaggccaattcaagatcaagaagttaaagatgccttgatcacggttgatcgaggttttgaaccaaagtgcttttattccgggaaggttgatcacggttaatatcatgctttcatttgaaatccttcattatcttaagagaaagaaagttgggaaggatggttatatggtgttaaagcttgatcttagtaaagcatatgatcgagttgattggctttttctatgtgctattttatctcggttgggttttgatgacaaatgggtttggcttatttttggctgcctttcttcggttcaatttcatgtggtgagtagtgggtatactcttgggccaatcactcctagtataggacttagacaaggcgatccaatctcaccttatctttttctcaaatgtgcagaaggattttcgacattaatcagaagctttgaggatagaaaattaatccatgggtgtaaagtggcaaatggtgctcctattgtgtctcatatgctctttgcgaatgatagctttttgtattgtaaagctacggaacaagaagttgcaaacatacaacagatgcttgatgtttttgctaaagcatcgggccaacaggtcaattttactaagtcatctgtgttctttagcaccaatacgacgagtatgcgacaaactatttgtaatagaatgggcattcgtgaggctgatgagaagagcaaatatctgggtcttccaagtactattggtagaaataaaattgctacttttagctatgtggtggataaagtacataagagggttcaaacttgggacaataagttcttatcgaaggctgggaaggaagtgcttattaaatctgttattcaagctctccctgcctataccatgaatgtgtttcttcttcccgtcagtattagtactgatgtcgtggaaatttggtggagaagcaaataaaaacaaatgtatccattggttgagttgggacaagctttcttctcataagttgaatggaggtatggggttttgggacttcagggatttcaatttgtcattattggcaaagcaaggttggcttctcacttgtgaggatagtttggttacaaatatattcaaagcaagatactttgctcatggtaactttcttaccgcatctttagaagcaatcctagttatatttagaggagtatattggagtctcaagggttggtgattgttggtgcgagaagtctggttggggatggcatgtgggttagtattcttaaggatccatggcttaaggatgatgtgaatccttttattgaatcatctcacctgagccttgttaacaaaatggtgaattctttgatggaagtgaataagcttgagtgggataatgagatactttcaaaagtcttcaatgatagagaccaaagattaatttggcagattcctttgtctactgggagtgaaggtgatagctggtattggtggaaagagaacgatggtttttccacagttaaaagtgcctacggtttgctacagcagctcttttctaggcctggttctgcttcatcatctgatttttggaggaagctgtggaagcttaaacttcccccagaggtgcagaattttttatggcgtgtgtgtgtgtcaatagccttccaacaaggttccaattagccactaaacatgtgcttgttacgacatgttgcccgatctgttctgctgcaccaaaaacagcacttcatatgcttgttcaatgcacctttgctagtgcttgctgaaggaaaacgaaggtgactgttgtagcacctgctgctatgttattcacaagctggtttgaggaaggtttgaatatttggagtgaacccgagagtgttgaagccgtcacgattctatggtccatttggaatactagaaatgatgtggtatggaatgataaacttcctatggtgggtgaggtaattcagaatgcaaaaatcaattatgtggactggtttaatgcttaacaagccgataaggactcacacagggaccatcatgaggttcggtcttataaatggaagccctctgagtttctaatcatcaaagtaaatgtggatggagcaatttttttcattagagaatcggtttggagtgggattggtggctcggtctgcatctggtgtggttgtccaggccaaaactgtgtgtaaagttggtgcacttcagccacatgaagttaaggcaatggaaatgaaagaagccttgtgatcgtggagtcagattttcttcaagtaatttcagatttacaaaataataaaattatagcttctccttatggctatattatttttgattgtaaggcgttgattgtcgttatggacaaagttttgttatgtgttgttaagcgatctgctaatagggtagcgcattgtctggcccgatcctctcttgttgaggctgattgtatttttagtagtcactctttgcatactataattgcatccttagttttggatgatttattttgatgaatttttcatttttattc

SEQ ID NO: 380990 - DNA, 4167 bp, Cannabis indica
accatacatttaagcttagtaaatctcaactctcagttttgcagattcattgaaaggggttcctccatacccattatacaagcgtctagcgtttgctttgcaacacacgattatgtctggaaccttctataggacttataatgaaatgccaatgcttggtgtagaatgttccttgagccacaaagaacaagcatgggggctgctgatttcacgaaagggatctgacttaattgatgtgagttattagttggtagtttcattctactatacctttctttctctttttttttttaattttttttaatttttattttgtcactcatttatgtccaacagacctttcactaagtaccaacaaatcttgtaattaattcattcatcaggtgctgaagactgttgactttgaacttcatgtacgggagcctttcttttcacaactagcaggtataaattgctaacactgaaaacttttgtgtttctcatataaatggttattgatcgatcctactggacattattcacagatggagtgaaaagaattgagggcaggtgtgctgctggtaaatgcagtaggtattaccaatttaccattccatttttatatttattagcagttgacatctatgtttatagttatttgtttgaaatagttttcttttgggttctgctatttttatcatccccgagtatatcctttgatataaggagcccatttgtgatcttgatagaaaatgagttgttttatttgaatctttatctttcttatagagagccggtagaattttcagcaaattgaggctatctttatctttcttatttatcttgcaaagaattatcgaaagattaaaatgtaaattgattttttgatttttttttttattttaaaaaaaaggccatttggccaattattaaaagtacaaaaattacaaggtatagaaagagaaagtatcctcaagagaagtaaaagtacaaacattagttagcaaattgtatttcctgccaagagtgattaaagaaagcttatgtcaccaaagcccaaaaagaagctgcctttctttattttctttttccatgaaagaagccatatccatctgttttccttcgaagtcatttcatgccctcccctttttattttgttggcagcattggatcaggaaatttgattcttttcaatgaatgtcttctatttaaagttcaggtaccaattttttgtgttgatttgtacacctttgtatcatttgaacttattttggtgagtaagatattaatgaatttgcaggatgtccgctggtatgcttcattctctgacatgttggaggcagagagccttgctgaagtgttacctggagttaagtccattaaagaaggtaatttattagtctctgattctctgtgacctagtagaccaatgagtgtactaccaacgaattacttaactaactttctaggacccagaagaagatggttaaatacactaatttatgcacgtgtatgtgtgtgcgtgtgcgtgtcgtgtttgtgtaagtagaaaagggagggacgtaacgtaatctttttgcttagctctgtcttaaaataatagatgggcctacgatgaaatgtttctatatctcttggagtttatattaagcatttgtttgcttacaaagttccattaaataaaataatagcaatttatcgtgacttttaatgaagtatctgatttttgcaagtagtttgtacctaatgaccattattcaggtgtgcaaatctacagaaagttttactcagaagaggaagaatattctagtggtgtccttgcgatttgcatttcaagagttgctctacagccttatttttatttagcaagtatactctcggttagtttacttattagctgcttcttagttcttacgattatgcatacaatagcatgaagaaattgactttgataaacatgattttctgtctagtactgttagtttgctggtaacacaagcctgaggattaagaatctcagaaattgatgttcttcctcctcttgctgatgctttgtggattttttatttcaaataggaatggtaatgaaaattcttatgaatatgattgtaatttgtgatattattaaaccaaaattacttaggatatacgtgaataatttagatgccattaatgtaaagtgaacaatgtaacacttaaattcagtgattattataaatcttttatgttatggctagataacaagcatgttctgctggtcttgattctatgatattaggtttcagtcataaatgataacaacttcggtggcaggtggcaaaatgacaggaggaatgcttaagttgtttcaaatgattttaagctcacctaatatatttggccatttaaaatagaaatttgtattactcaccaagtattaattgtgaagaaatttagtcattatgacttattaaaattataagttcatctgttttatgttatttgagcttcttcaattatatatagaccaataagaaatttgacgaagcaccatagttcaacttgtgcatttttgtggactggtattttaatgttatcattgttaccgcactgtagatatctatactgttttgtggaatggtttatcatccttgataaccaaggacaagataatgtgttttcccctccttttctgacagggttttctttgttcaccaggaactgagttatagtggtattcgaggaattttaggccttacaaatacaaaagggacaactgaacatgcactaccaccaccacgatctgctcttctatcatcatttacgatgccttacaataaaaatgtgagataattatggaatgtcttgcataaagaagaatctttacatagattttagatgctccactatatcaaatagtttttgaacggattaaaacaatttatttacactgtaaacgagacacgttatatgcctgcacatcacctttcctctgtaagttactacattgctattaggagaaaacaacacaatagtgcatttaacatgaaggcagcaccactgattttgtgttgataaactttcattatatctttaaagtgatggttgatggtttagcatccctaaattgggaatctataacaaactactttaggtaaattggatatttctgattataaagtttatctcttgtaattataggttaaaggtagtacattgacccatggagcccgtgctttggccaaacatgctcataggagtaacaataaattttggggcattttggatggaagtggtgagtttgtgtttaaaattttgctttgcagttttctttctcttttttagctcttgattaatgttcaagttgccttttaaaatgtcatctacaatacttatttcccaaataagtgcattaagcgataagaattgacttctggttataaaatatcatcattaatatttgtttcttctggttttgaacaaactagatttccacagaagtctacattccatttccaacattaaaaaatatttgtactttcgatactcctactattttctcaatatgtttattgtaaatttacgattcccacctagcatatctgagaaatagtgctctcgtattattgattgttgaaatgttaattcatctaacaacaatgattagtgatcaacaagctaaaccagaaagttaatcaaaatgaacataaaggaaaacaataaacgaagcagagaaaaagaataagaacaccagatttttatcttggttcagaaccaaattttgaccctgcatccagctgatcatcaaaatccactatgatcaatctgaacttgtacagaatcctccatgaaagaaaatctcaagctcacaacactcaaaataaaaagaacaatcactcagctcacttccctttacccgtgtacaaccaagttcgtaatctcaaagaatttgtctttctagctctcgaattctcttactctctcttactcttgattaaacagtacaagttacaaatgaaagaaatgggactgttgctatttatagaacatagcaacataacaagctaacataactgcctaactgtttcaactaacttgagtaaagaataagttagttagattagttgatctctaagaggtttaactttcataaagtccaccttgatcctctaaagattaactgtcgcatgattgatctttgatgatgat

SEQ ID NO: 380991 - DNA, 2933 bp, Cannabis indica
gatccccggcaacggcgatttttttttacttttccaattcaattcgatcccacattttcctttttttctcatctcattcactgcttttgcgtatagatgtttcaggtgtattttttttttcttaaagctctctaacaaagaaacactataaataatcttttacttagtgaagaaaaaaaaaggtctcttagccacataatttttttttgttttttggatgaagggatctcttacttaattcaaaattacaaatgttctttttcattccttgaagaaaatgaaaatcattattcaacaaagaactatattgaatgaagaggcaagggatgtagcagatgaaagaaatctatgaaaaaagtgttcatatcataactcacaaattatatttttaagaagtcaaaagctaattaacatgttccttatttggtgaatcttgagtcaagtgctaattccagaaaaccaaaatataacagatttaactagttgctgcaacttttgagtaagaatattaatgacacatgggaaagaaacttaattatgaagtagaaaaaaaaattgataatcaacaagcaaactatttttaataaaaatagctgttaaagctcatgtgtattacttgtgccaattatttgaagacttgttttacatgggttttcttcttctatttattattttctggagatgaatagaaaacaaagaaaacatgaactcatgtcttacatattgaatgcgtgaacaaatggttaaaaatcaactcatcatatcctctatgtaaagcagaagttactgagctcatctcagcttcactggtggcaactggcaagagattctccaagctagcaattgggaggaaaagatggcctatggctcagctgcggtttacacatacgaaaaaagcatggatattagtcacttaactctcaatctctataagaactgcagttcagggatttggtacaactacaacaactaatgaaatttccccagaaatccctgttgctgtattgcagagataatgcagttagatagataagaaaagccatctatgatactaagcttgggccgagaataaaaaggcgatatgcagaacagaacactttacacatgttgctatctttccactgctatatcataaacctgccatggttggatgaactttgatccctgtaagttgtaagagtacgatataatatgttactatgcagttagctgccattccctcttgttcaactccagtttggccattttatttagtatcttccaatccatgcaggtagtcaatctttaatcaatgtacattgttttacacccattctctgaatggaccaaaacatcttctatgagagtataggtgtgtagaccaaagtattatcaattcaatcctacccacctcttaaaaattaaagcttcctccctctttctgtgttggccttcagtttggaattttggagttttacccctgtaaagtgttttgtggtacttcaagaagagagtcctgtatttgtacttgtccacaaaaattttacctttctccatcatctccactacttcatttgctcggctgaaaaatccgcccctcacaaaagtgtaaagcacagaatccaagagttcctgatcaaacttcattggggttgcagaagcaagagatttcatctccccccacagttctgtcacttctgtatagtttcccccaatagctgcatatgcagttatcatagaatggaacgtctgagcatttggggtatgcccaagactcctcattttctttagagccttctcagcatcttgcatcaatctcttcctagagaaaaagtgaatgacattgttccaatcatgaaccccagaatctactctttgcccttcctcgatttcgtgcaacaactttcccattaacttggcttcacttccctcttcacatcccttaaccaacttctcaaattcttgatgagcgggtttcaatatctttgccattttcatctctttgaatagatggagggctccttgtgtatcttcttgcaccactttggactgaaacaatgcctgataagagctagaatctagctggatttctgctctacgagcatcgcgaagaagtgctgcaacatctcctggtcgatttgcatgacaatatgcttttaagagagaggaatatggggaagatgaaacactgaaaccagccaatactatctcatctagaaggtcatgagcctggtctaaccaaccaagtactatgcatgaatttatgacatgtaccatcattgaatcatcactggaaactggaaaatcttctctctctaccttgatgagaaactctgccaaatctttggtctttccagcttctagataggccttgactaattgcaccaaaattttctcagttggtaggatgataccttgttcacttgttaatagttcaacttgagtctgcagcttaactaacatggtatttagcacctcctttgcttcactgtcgagtttcacaaaattttgatctcttaaataatcctcataagatagtatagtgattttagctgctccatcatattccaaacctctagattcttcatggcttgaagttgacccggaaccaagaacacaagaggatttaccaccgtttttaattgcatcaattaccatcgatgctgcagcagaagaggacctagctgctttggctttttgaagcatttccaaaaccatcttcgatgcagaactaagatcgcccagtttcaaatggcatgaaagcaagcaattgtagaactgccgcaattgaacatcccttagattgtgtgcatcatttatgtacctttggagtttcctaagttcttctcttcgtccatttcgctcgtatatatgtgccatgactatcagtaagtcagaatcaagtttcacaccaactcgaggcatcatgtcaaggagctgctctgctttcctat

SEQ ID NO: 380992 - DNA, 1574 bp, Cannabis indica
ctattagttctacacaaaatttaattatagaagaattcgaaagtcaattttgttaatacttattatatatatatatatatatataataagtaatagtaattttgtgtataaattttaaaccttttatgataatgaatttatcaactcattatacaattattttttttttttttttttaaaaaaaagatggttctttgaaagaaaaacaaattttaacatcgtacattttttatacaaacgattaaattacaaataaacaaaaatttagaataaaaaatcattaaactttttacccttttttttaatctaatatcactttcgcttacaacactttgttaatttgtcattaatttaagaggcttaatttaattcgagttatataatttaatatctaaaaactttaacaaatattcattttatcttaaaatagtacagttttggagaaaaatgaagaataataacagataaaactttatacgtgtcatgtataattgaggggacgggtggtattttaccaatcaaattgatgagacccaatactaatttttgagaaatgctaaagagcactagtggtgcctagcactcttctatgtgtcagtatcgctattggtccaactaagtatcggatcccatataatttaatataataatttttagggagtattgctaactaatcgcaacgtgacatgtcgagaaggtgctaggcaccactggtgccttatagcaatgctcctaattatttgaaggtaaggatattgagcttttattttaggtttgaaaataggtagcggtacatttatgaggagttgctttaagttggctaaggcttctgcaacttggtgttgttatggtcttttctcacctttcgaggatgaagctcttgcgattcatgcaagtttgagtttatgtcttcgtttggagtatatggtcatgtgattgtggaattggattgcctcaatatcattaatgccattaacaagcctattattgatcactattatatagtatgcattgttaaagatattattgggtgttcactactacaattatgggctttagaggcagttttttttaactcattttataaaaagagaagctaaaaggtgtaaaaataccccctagtttggaattgacatttacaggcggttttttggtaaacatcgtaggtatagaatttaattatatctatgtcgtcggttggggttggggtaaaattaagggtttttgattaaccttatgacgtcggttattcggtattaactgacgccatatggcacctatggcgtcggttaatactaaataaccgacgccatagggttatatatcagatgcccatgcttcgtcttccttatttcaccatcttcttcagcacgaagaacaaccaccatagcagccccaaacccacgaaaaaaccctcgccaaccaccacgaaaatagcctcaatcttcctcatttcttcaccattttattctatttttgtcttaaaatcttttattttcaatacctaaacctacactgtaaaaaaagtttggttttttcccctctatatatcaaaccgaacctattataaaaaa

SEQ ID NO: 380993 - DNA, 4593 bp, Cannabis indica
cgaatatctaaaaattttcttttcattttatatggaaaaatcacatctaggttttcggtcatagaagcaaaaattcaggtaaccaataattactactagtaccttttgttggtattgagaagcttgggcgtctgcatgcaacatgagttcagtgatatactccttgtattggttgatcttcaaatagttacaacaaattgttaaaataaagcaaatcaacaaataaacagttggtaacaaacactacataacaagatggtacctctttatcttgttcatctctttcctcttcaagaagctttattcgactttgagcttggtgaagttccaaggctttattatgcagttgcctgcattaaaactagcttattagacctacaaaaaataaagtatttatttaattaagatataagggcatacttctaacctatatatctgattttcagaatgttcaacattcaagttttctgaatccaaatcttctgttaagttttccactgttagcaatctctgctttagagctttgagttccaattccaatgagtctctgctcaaccgatgctgttctacctcatcatccatctcaaacacctaaaaccacagataaatgctagttttaattttctatgataaaggttttatcatttaacaagtagaccatgtgaaatgttcaacaaacacgtttttttgtatgtgtcgatgattacatgtcagaagtaatttatattagttcatatataaatacatatgtatgataaaacatgaattgtctaggaagagattaactaagaactcaaataaaaatgtagcataccttcttttcaagtacatttatggtagactcaagctcctcaatagaacgttctaaaattttaacctcgtcttccttctgttcagcatatatcttacatgcttcagacacctaaaaagactttagtttgtaagaggtgcaatctaccttcaaggatgtcttcgaaaaaagaaagaaacagaattgttgaaatgtttacctggcgggcttcaactattatagcttctttttcatcaactaatgcataggccatctctagtttatcattcaaggattgaacttcgtcttgaagttggtctttctcactagtgacccttcttagattatcttcaattcttctgtctattgaagaagtgagctgaagcagctcctcttccaaactactaactatctctttctgttcttccagttgtccttcaacctcggattttttgagataaagttcttttagaatcatcttcaactcagcattttgatccgataagatatcaattgtgccattagcgtcagcaagattagaatccgacaaaacaagagcctcttcagtatcaatgagacgaccttcaagttttttatgttgcactaacaactcattgagttgtcttgacttagcctctagctcaagttgaacttgacttaaagaacaaacaattttctcagattcttccttgatatcctttttgtctgatgttaattcctgcaacaaactaaaatcaaatagcaaaccctccagtacaacttctttccgttccaattctttcttgagtgctaaattctcatttatcatataatcattagatgagcacatatcatagccttccatgctgctctttacttctttctgagtcccttcagcaacaagcttattactagtaattatagtcttatcgccatcattggaacaaatactttgcagcttgttcactaccgcattgctttcttcgtgagtgaatcggccagtatcagtttctacatttaaagaacggattttgctgattagccctccaacagaacattggtataggataaaagcagcaaaattcttccccacaatctcaaggcatatatcttctagaaatgatcttgagttgcttatgaactgtagcatttccattcccatagaaaatacatctgagtatgttgctgttagtttctcctcatcatttttcaattgcatataacattcttcaagcgaagacaatgaacttgcaatctctaccaaactacaattcgcttcatcatgaagtaatttgttctcgttttctttcacaagtattgtagatttcaaatgttcaacttcttttatcaaatttgctcgctctatcatcaattcctcacctgtgtgtttccaaacaccagtcaactgcattgcattctcattagcctccaccaaagcattcaacataaaatcagcttcctttattgtagcatgggcttcctcgaatttggtcacgaatcttgtagcatgctcagttttctcatcagccgacacctgcatgcagagaatgtcaccagagtataaattcctgtaatcttttgtttgtttataataaataggtgatgtcaaacaaatactgttttcccctaatgaaatatagttggtcatgcacaagagtaagttgacaattattttacctttctagtataatcataatatacattagctttctccaatgttgaatctgatgaaggaatcaactgtttcaaatctgccatacatcatgagatgcttagtgaacgtggttgaaaaatataattattatttcgagttttaaggaaatatgtaccttcttggtcagcagaaactccaaactccaaaccattaaatagtttgattacacgaatatgtagcagggcaaaagcatcaattagcacctttagttcttttttaaggtgtaaatttgttgcttcattaaattccaaaggcatatttgaactttctgaatgttgatgactagatggaggcgttgagacttcagttttcaacatcatttgctcagtttgtttattgggtgacgtggacgagcagataggtgaagaaacatctgataagtttccggaagccacactttcaattgaaaaatcagagcttgatgaagaacaatcagaactccatacatctgcatgtactatgtcgtcattattcgcagagcattcaaatacatttacttcagcatgaacaaactcttcaattactttaagtctgcaatttgctttggtaagttcatctcttatttgatgcagcatatggcactgatttttgaagttctgattattgaatgctttaactgattgtgtatcacctgtacaatggtccaaattcttgcattgatctttgagttccaacatagatttttagactcaaatatttctatcccggtcaatcagcttcagccataacatcttccactacaaaagcctttgagatttcgagattggccattttcgcaggagagtcaatacatttcgcttcatttttgagggcaaccttttgattttcaaagagccaactcattacaatggacgcaagagtagcacatttttctgcttcaacaacctgagcctccatgaaattgagtttttcctctaacttaaccatgttgatcttatcattcaacaacatgctaacatgttcgtcagagattgcatgattatctgactctgggaattcagttaaagccaacgttgcaccttttaaggaacttagcttttgcaccatgtccgttactgtgttttgtgcatcttccaagctcttcttgagctgcagaattgattcttccttctcaacataaattctagcagctctctggacatgttcgctaatccaaagattagcttgaggaaatgaatgagcaatgctttctatttggttggagacatttttcagggatttagagccatcagctaggaagcctgttagctctaaggttgccttttcccactctgtatttactgccttaatttcttcttctttagctgcaataatgttttgtagctttgtattttcttgagtcataacaaataatctctcatcaagtttgcactgaactgcatcaacctcttcttgtaattgaagaattgtccttgctgtctccatctcaacttgttcacgaactagttcggctgattggttgcaagaaaactccaatgttttctcctcttgaaaatggctattgagtagccttacctcttctaggtccttagtcattctatccaacttggcttgcaagaccattctttcaatatctttgttgctttcttctaccagaccattgttttctctatctaaatcatggagtcccaataattcattttgcaaagccttgtcatttgtttggatataagatgccatctcattcatgtcactttgcataaatatactctcaacctgtggaaaagataatttaacaatcaattggagtactccaatcaataaatcttttctccatttagtaaactagagtagtaaagtttcatggctaagccattttgggatcaatttcttaaatagtttgtaaagtatccttacagaatcagaggcagcttgattgcaattcagatgatttcttaattctgtttgtagttcttcaacatctctacagacataaataataaacatggataaaaagtagttaaactaaattaatcaattctaactataggcaaatgatagttgcccaaaaattgatatcattattatctaggaaagtcaattgtgatctgcattactgcaattgttttttttttaaatatatatacatatatatatatatttatctata

SEQ ID NO: 380994 - DNA, 4067 bp, Cannabis indica
aaccatcaaaacaacatattattaaattggtgactttaggatcccaataaggaaaatatgtatactatttacagtagtacaatatatttaatacatgggtattaacttagtattattagttttcttatttataatgaatgcttgaactagccccaatggttgtgtcgtttttgcttatcaaccaaaagcaacttcttatgtcttccaacagctaaataaaatgtgaaattgatgcttgtatctcttctaaagttcttcctttagtttctggcactagctttgcaatgaaaattacagttatgccgccaatggccgcgaagatgaaaaatgttcctgtgaaaggtggcagattagttggtaagatattgaacaaaagaaaagaaactaaacaactatagtagtttagtagttgaacctgaggagctccactccattatggaattgaagttgtatgtaactatccaagaacatgaccaacatgccaaagtcacaaggcttccagctgaacccttgacatttataggaaatatctgaaatagaaaaactcattgagtttactatcaaatttttctcataaagaaaagaaaaaagagaaataagtactttacctctgacattataacccaaggtagtcctgccaaccccattacaaatgatacagtaaaaccctgagcagaagaacaattctaatttggtcataaaacatttcaaaaaaataaaaataaaggattactctgactgtttcatgtgtatgtattgcaactgaatgtaccattatagcaacgtacaccaatgtaggagtgagatgctgcaactgttggactccctacacatataataaaactggatcacataatattttattaaggcatataagtatgtaggtttggtttgtggatattgaccagaaataagaatgacaagccaagcagaaagctgttaaaacatgttcctgctgctgaaatctgcatacattggtaaatttgactatcaacacattgtatataatattaggtagcatatatagtaaaagtttaaaagaaactttagtagtattttcaccattagaagtggtcttctacccaatttatctgtcagtagcacactcaatgcaacagcaggtatctacaattcaaaaatatttatattaagaatatgtaaacacacacacacacacacacaccaccagtcagatgaaacaattgtaaagtaacgtacttggataatggccactgatacagttccaactctgcttgaaaatcctgcatacgatagagatttaacttctctgatgttttgtgtgttttatgcttaaattatttcagaaacattgaaagcattttatttacctgcatctctaaaaatagagctagagtagaaaagaattgctgtgttccccccaaattgtgtcagtaccattaacccaactccggcctaaacaaattatgtgcagaaaatacttcataaaaaggcaccaacatatctcttttctttcatatttatttgggttaaggcagcttacaataagtgcatgtgcatatcgccattggaacaagtccagaattctttccgagtgctgctgaaaggcttctgtataatcctgccacaacaagaggcagcatgttccttagtttgcttctgtatcgataaattgtttatgcttggtaatcgacacaaacgagtatgtgtgcgaaactgctctcctaagaatattaagttgaaggatttactctaatatcagctacttcctcagagacatcagcatttctccccctcagactctgcagagcagtttcaagctctttgtatttaccaattttcgcctacaaatcattcttcaaccgagtcatttaaagattcatatctgaacttcccttttctgaacttacccttttcctatgtcacatgcatggtttctatgggaagttcagagtacttaaaataaagtcaaatagcaggagagatggaggaaaggaaaatgcttcttccatttatttgctgtgttattgaactcaccagatatctaggtgactcaggaataaagaacaatcctaaaatatgtaagagagatggaatggcacctgaaaataaatcaatttatataaaacttaattcttattatcttttcttctgaagcttagaagaagagctaaaacatagtttaccaattagagccagggtgcgccagctaacagtatttccaatgaagtacattaatgaaatcccgcaacacagcaacaactattcacttgaacaaaaatcaggtttatttcacatacacacaaataaagggaagaataatgagttgggttcttgctctcatgttcaccagatctaattggtacctgatatgcagaagtaaatcttccacgaatactcttgggagatatttcagcaatgtatacgggtacctgtctatcatacaagagtcaataactgtatatgtgaatgtgatttaaagattggtcaaaagattatcaaaattcagggaaattaccgtgtaacaaataagcccgtctgcaaatccaagtaacagtcttccaaagtccagccacctaacattctacaagcaagaaaattaaccaaaacaggagaaaaagaaagaacaaacctgattaaggaactcaagcccgagtaccaccaaaccaacaatgtttactacaatggtcaatctaaaattggctgcttgtcaacagtaagtttgtaatttagaactaataaggttcaattgcattatttaatcttgtttcccatttaagtgccaacatgcataaaatctaacatcttcgcactctgttagaatttagggataagttgaatagggttctatctcaaaatcgagaggagtagctacattaaaaaaaagagccgaacatttgaaagaatcccacaagaccaaatattgggaaaaagggagagggatcacaaccgatcacaaccatgttagaatttggggataaaataaatgggattccatctcaaaagcaatggacaatgaaaagagtagctcattcatcgtatatatcacaatttatttctacatattagtaggactaactctaatacattcaaacaaatgaactccaatcattacttgggagattaaagtgatacctttccaaatgctatagccagccaacctgtagtgcttagtgcttcagataaccacattgtctgacacaagaattacaaacagtacaaaatagataatcaaattctagacaagaccaactaaaattgaaaggatcgtaggtaggtactacaaaaacttacagctctacgacctgtaagatcagccagcttcccattcaatactccacctatcattcctccaattgtcaccatcgaaccgaaaactgagaactgcatattaggaaagaagagggttgtcaaccaatcatcaaatcagttcaagttttttgaagaaaatgaattactacatacatccaagctaggaagctaggaagctaggaagactatggtggccagtctccttaatctttatatatttataaggccatcttctaaaattaaaaaaataataaagttgtatactcatattgaagttctttcgacctctatatagtaatcatgactcgatctcttacatctttaacagagatgtccaagtcttccatgattccggattgagcaggtgaagagtatccaacctggaaaaggaacagttacttttgacttgtgagtgaacatgaaaattgttacttcatagaatacaagatcaatatacccaattgaacaaagcttaaacaatgaagaacacattcaaatatccaaattacattttagatgttgatcatgattattgagtgttgttacttacaatgcaaccagcacagagagcgccacatagagcaaccaaagtgctaaaaacaacgacgggtgttgctgatgagctttcatcctcataattgggtttcgacccatcatcctcatcaagcaaaggccttctctctcctcctcctccctccatggtttgcttctttctctaggtagacgactttcttatggattttttaatttatttttttttttctaagtaaaacaaa

SEQ ID NO: 380995 - DNA, 2415 bp, Cannabis indica
aaaaaattactcattagcctaaattccaatcacagattcaatttcgagaagaccaacatcccaccctgccccacaaaagagagagagagagagatcacttgtctaatgtgtcaagaattagatttcttatgagtacaaggtattcactgaaactcaaacagaagaaaaaaagagaaacacctatatgtatatatatttatatgtaagacatagagattgaaagaaggaaaacagcagcaataacctaactgaccagtgagaaacattataaaagttataaaagattacctgcaaatccaaaatattgtaagcattccctgaatcatcacagatccatggcaagtctggagcacacctcaaatagccatcaactataaacaggtaatgatattcacctggtgggagtgtctttacaacaaagaaaccatttcctgtaccctgcaaaatctctctgaaaagtggtacatttttcaaataaaattaatctaagagagggaaaaaacaaaacaaaacaaaaggaacttggtcaatgaattaaacccacttctacaatcttatgtacctggtttgccagttgtcccacgatcccattacagctacttgcttggcaccacaactccaagatagcttcacgcgagtcaaatttccattggaaataacatgactagacattaaatgttgaagaaaagctccattctgaggaaggatatgctggccaggcatttgatggggttctaaagggttctgaaatacagatgtaaagtaaataagaggagcttttgaggcaaacagacataaccaatggcaataggactgcagttaatataatgaatagtcaccactcaccctttcaaattccctctatatcatgtaatttagaagtaacatctaagtactttattcaaaagggtcattgactttcaccaccacatgtcaagatgcatgccagaaatagcagataagaaagggatgtaaacagatgtaaacaaacacagatttgatggaactttcttattttctttctaaaattcattcacaattgaaaagtgtcccatatatactcacaattctaatgagaacatcaaaaaaattaagcttagccatctgacagaaaatgggtttctcaatcttggtctagtcttccaaaaaataaaacagtacaacaaaaccatgatgaatctgaaaagctgcgaaattggtataaaagaaaggcaataatattatatttcaaccctcaacagaagaaagaactcacaggacgatgactgaacaagacataagggtggaacccactttggttgtgagaagttgagccagccatggccatggaatctgagaacaccccatctggttcagattctaatacatcagcatcttcaaagcttttagttctcgatggaccttctccatcttttccacctctggcattacccatcactggaaaagtaaaataaaggcatcatcactttcattgaaggaaacgatactaacaagaacaaagtaaccaaatcaacgcaacatagtggaaaaaaaaaaccatttaacagtaaaggcgaaaaaaaaacatttaagttgggatattttattttattttatttttgtcgttttcattgtttacccatgaaagcaagcaggtaacttgaactggacaatatacccatgtgtataagcaaattgggaagacacaagaaacccaacaagagattgaccaaagggagtgtataagcattgtcttctcagctttacaggcttcacaagagaatgaccaaatagaaagtgcaatttgttctctctctctcttaactcttcctattacaaagggaactgcataaaattaaatgaacagggaattgattctccaatgaattgggaagatccctcgatgggctaaataatgttgcttttcaatgtttgtgtcagcacagcacaactccatgtttcctttttactatacaacttaaccaatcattgtcagccacctcatcgctcattgttgaaattactcaagtgcccatttgtcgacaagctgaagccgcccaaaattaaaaaatttacccaaagcaaaaaggcaggacaaagtagcagttttgggaacttaattatgacataacaatttgtgaaaagacaatccatttgaaatgaaattattattgattaatggtacaaatttgaaaggatttaggtaagagggtctaatgattttacatattacacatattgtattcttgtatatataagaactgtatttatgtgtggcagtggcatatatatattcatgaatgtaaccatatatgtttacatatactttttttttatacaaatatgtttacatatacttgaacctcaagtagaagaagttgaacctttgttccataaaaaaacagaacaaaaagtagaagaagttgggcaacagta

SEQ ID NO: 380996 - DNA, 3687 bp, Cannabis indica
ggctaactgctggatttccttttacatatgagtgaagttctccacgatgttcacgaccacggtttcttcagcttcgaccaagaaatcttataacttcaccgagtccacaccatgtctacccccacttcaaccggataaaaatcttcaaagaaggggcctttgaatcttgccactttagaagaagtaatgaagggcccggtggtctataagaagttcactgttgttccaacgactgggaggcaaatgaattgcactcgccctggcttgcgcccatcaattagagaagatcattactgttgctgggatcaaccttccactaccagggttttccatcgccttccaagggatgaagaaatgcccaatcataactataacggcttcggggcatggagctagacccacctgatgtccggagccatgatcccactccaagactattttatagatttttcagtttttgttggccttgcgccttatcagcttattccccaagcctaccgcctactcttaggcttgtacattttctacgttgccaagaactaggccccgcttaatctggctgagattttatatttttatgaactcttgtcgatccttaaaaagggggacaagtttaaagatggtttttacaaagtcaaggcccaccatgccaatgagggtctggtgccttttaattttcagaaaaatgtaaaggaatatcgtcaccaagttttcttctcctccggtttcaaagccttcgagcatccagatctgctcattgaatgggtcaaggttccacccatgcaccgtaccgcccccacccaactcttcttaaaccatgcaaaactatttcctggttataacaaggatgatttgaacatggggtatctggtcacaatcgttaactgtcagagggcaaaattgatctcggagagccaatgggtggatgacttcaatttttttaaaggttctttgccctcatatctgaaatcttgagatcgagaggcgctccgaggggacatcatctcttatgtagaagacaaataaaataagaacaaattcaagaagaagtaggagctggcctataccaatgcgcaagccgcctcgaggaggatccttcagaggaagctgggaaggagcgaaaccccattcgccctaagtttcctttcccggtttccaactctggggctcttggtgccagcactttcagaacctgtaagtccgcattgattattcaccatgtcccttctgttcaagattatgctggcctaaggccagtgcaatttaatagtcggttgcataggtttcggatgccccattcacggtggggttataatgccaaaagtttttatttttcaaaccttagccatttttggggccggtcacggatgggtattagtccccctgcaccatttcacttggaccattcttcatacctgacttcaagttggtttcttccctcggatagctttctaggggatgacgacaccaaccttttaatatatacctttgttagggaaaaattagaccatcagggtaagactaatttcactgtgttattcttgcatgcatggttttttacaatattctgaatcctttgtttatttttgaacagcaaaaccaatggatgaactcctagatgcccttgctcaaatacgtagtcctaaagccaatttgcctgagccacacaatgtgattatgactccgagaggaccttctgttgaacccctcgaaaacaaagttgtcttgattgacgaggaagaagaagaaaagataaatcattcctccctttgaccgcaagcgtaaaggtatgatgattgagccggagccttttaagaagccaaggagggcagatactcctagtcccagcattgattcgagaattccttcaaaggtggacgagtatcctgcacgtccaggtattgttttaactccctttcttcccgacgagaaaagggttcagctccgcatcaccaaacacaattatgccttgggggagcttaccaagggggatgctgaggcggaggctctgaagaagtggctcaaggacgctcaggatgggccttttcgaggtgagtatgctcaggatgtctgggatttgaatttagatcctttgacagactgatttaagtgcttcgtggggcctaacctagctccttttgcctcggagatgatgagccattttgccactgatctaacccaacttcccaccaagagatatggagcttgcacttctgccaactccgtgtaccgaattcaggacatgagtgtggcccttactgcactaagttctcaccttttaaagtccttatgcctttttttttttatgcaaggttctaatttttttctgttggctgctagattgctgcagaggccagtcgtctttcaaagactttgatcaaccatgggtttaccatgtctaagtttggtggcacagaggaggtgatgaagagtcttcgggagtcaaaggagtagaagaaggaggtcttcatggagaaaaaccatcgggaggtgttgacggccaaggacaagattatagctgcaactaggagggatctttgagattccagggaagaagtccaagaactcactgctaagttaagatctttagaggagttgcaccaaactgacttagacacaacagctaatttaactgttgaagtgaaaaagctccttgagctcagggaataggcccgtaaggaggcggctaagggaaaaagggatgttcttctggcccccatcacttttcaacacagcgcgaagcgttttggcgatggagtgttcatgtgctggaaggccaataattttgaaccccgtcttcctttctaccccaagcctaaggaagctctggcccgattctgggagaaaaataaaaagcttgatgctgtattggatgaatgcaggggtcctcgtcttcctccccaggttgattaagtgatttttatttttcttttatttcatccttcccctacctattagacaattatgctttctttaaggggactttttatggcccgaccccaggccttcttactatttatcttttaaacaacttgtatgactattaagtttattttgcattttactttcttatattcgcctggtttttatgatatgccttaatacccccctaagtgacatgaaaagaaattttttaggtcacttatcttgaaacttgcataggatatcgcatatatttgtccgacacaggttattttacagaatataaacgtttttccttaactattgatagtatttgcagaggtggtcgacattccaagccctaggtactgtgcatccatccattctttttagcttgtaggtcccggagcctatttcattatcgatttcgtatgacacttcccaatttggcccaagtacccccactactggctcttgggtggctggaagacccttcgtaggactagctcaccaatggtgaattttctatctttgaccttgatgttgaagtattttgccacctttctttggtaagctaccatccgtatctgggactcatcccggagctcgtctatttgatccagcgcttcttgtgataaggctttgttcgttgtcggatcgtatgttgtccttctatgggatgggagaaaggtttatactgttgggttttatgccctaaataaaactcatttcaatataatcagatttacatattaatatagattaaaaataacatttaatgttgca

SEQ ID NO: 380997 - DNA, 1355 bp, Cannabis indica
tccaaaaaaagtgcagcaccgactaatactaaacaactgtcttattaatgttccaatatttttcaatacaaaatggaagtatgtgtgtatttttctcttgaagaaaagaaaagaaaagaaaagaaaaagaagatgtgattaacacatgtgcatataaagaatgttagaaaagacttttactattgacatagatagataagagaagagaactactttacttggttctccaacttgtaaacaaacccatgttctttctattttatgattattggtttctttgtttgggatgaaaatgccacatttctttgctctattattactcttccattaattaatgcatatatagtatataatacaagataagtctacaatgcacttttctaaaataaaagtttagtaaattttttatttgttagtaaaactttttaatttatttttttataactgtatatgttataattatttaagacttgtaaaattttagaaaattttaagtgatttacaatatcgtaaataaaatttacatatcttgttgtatacgtaacttgttttttttttttaactgtttaaactttttttttcaacaaaactattcggattgcataaaaaaattagactatttttttttttttgtgctgaaatagataaaaaacctattagaacgacccttactctctaaagttgaccaccgttagccaataaattaaataccttagcattttcaagacctggatgacctgagatgacaaaggggttatcattattaggtaaccaaggctcccccgacacattgatatttcttccatccccaatactccactgtacccttttacgcaccactttttgagcttccaagacacttcgccatactaaatttgggttattacccaattgagcggtaaggtaattatctttaacaaaatatcttgcacgaaaaatcttatatgccaaagagtgtccgagtgagcaactgccagtcttgcttgtctaaaaggacgagattaaaatctcttaagttatgaaagtccatacctcccacatttttgtgatgagtcatcttagcccaagatagccaatgaatcctgaacccttttctttcgatgtttttcaccaaaacttggccatatgctgctccatatctcggcttatgttaaggggaagtagaaaaacgctcatagcataattgggaagtgcttgtgtaacagttttaatcaaaatctcctttcatgcctttgagaggtacttggaagctttgaactaggggtgttcattggatcacatccaatggatttggacccatccgatccaatccaattatttattggatattgaatttttccatctgatccaatcca

SEQ ID NO: 380998 - DNA, 2891 bp, Cannabis indica
gtgcatattccaatttgccacttagttttgaagtaatgaatttggaaacaaaagcaagtccatttccaattgaggaaggaagtgttaagttaggaacagagaagttaacagctccaaaatcaacttcaagtgcattttcatcattggccctgtttaataaattattggtcaaaatatttaacttagttaaatgaaattaagagaagagaagagaagagaatatattatatatattaataccatttgtcatcatataacatctctttgaactttaagtagtctgtggtagtaatggcctcaacagagagatcctcagagctgactttaacaaattcccagaaaccaggatttggtcttatggcaaaagaaacataaggaggtattaccactgcttcctgcataattaatttcatataattaacactcattcatcagagaagttagtaaatgatatatgatacatattttaacaaaggttctctttaatagatagttattttcatcataaatattttgtccctcttaaatttacatcaaaatttgaattattatgttgctcatacatgtatgacatttgttctatatataacaaattatattaaggggaagatatattattaaggaatattagtgccataaatagttattcacttaattttatgttttaaaaactaaaagttgggtactcaagtgcaataattataagtttaagtattttacagcaccattattcttaactaaataatggtttcaacaaaaacttaaaactaattatttatgctgttaatgttaaaagtaaatatttaaaatgtgtagatataaaagagagagtacttattatatattgtacctgagttgagcatagtatgtagccaagaacaccttccaatacacgagttctttcaagtttgtcatcaataacagtctccatttcatccattaaatggtgaagtttcattactctttttcctttctcaatgtacttagcaaaacaccttttcatgtgataccggctctgtcgcaaagcatccggcatgctatccgcaatcgactcagatctcttcactcctcctcctgctgctgttgcactcgccataataatatttattataaacaaaaaaaaaatatacaaaatatttttttcgtttttttttggtaacactttgaaatggaaacttatgcttattaaattttctatattgctcaagtatttatagagacagaagtaagcaaagcattttattattattgtcttgttgttgcatgatgattttaagtttcgtgtagcatttaggaattaggattctaataattttgttttattatttgacatgggccctctaagaaggtggagacagaggagaaagaacattcctaatattgattaatttaaaagaaagataaaagaatctagctatatatgtcaagaaaggaaggacaataatatattcttgtttaggaagaaagaaagaaaaaagaatccatgtctaatgcacatgaaaattgctaaattaagaagaaacaatttttattttggaaatttattattttatttttactaaaaaatatgaaatcatatataaatatcatcaatctaacacaaatatttattacaatttatttgttgttcagaaaaattgatagcaacgattaacataaatcaagaatatatatgaacatatagtgatcataaaaaatttgtaagagaaataaaaactaatatatacagcaaatagtgtttatctttgaattattcttttttgttatatgtatgtgtatgaattgataaaaagttattaattcaaataaaaataataaaaaaaattaaatctaagctaatttaatgatcatatcttttaaagagagaaaatttctttcaaattcaaatttagacttatattaaaatatctaccatattctttttatgtatattaacaataattctctattaacaataattctcttaaacaattgtatgagttatatttcaataaataaaataaagaattttacttaaatattttaagcaaaataaataataaatttgttcaaaaaaataataattatttaatctacgtagtactattatttttaattgttaactttgagagaaaaaataacaaaatccattataacaatagttttcattagaataagacgaaaaattaatttctcgttaaataatcacactttatatatagtattaattctctttataattgtattctaatataattaataaattaatttttttaaaaaaatagttaatgaaaatattataattaaataatatatattaaatataaatgtatttgggtcaaactaatttaaacatcaacaaaataatttaatttttattaaaaatattacataaaaattttatcttattccatgaaataatttgatctatgtcttttaaattaacataaataaataacaaaaaaattaataaaaaaatactatcatcatggtgtaaatggagattattatattttgtatcaaatttgatatatattctagtatgtgctaaacttaaacttagccaatattttgcttcataattattagaaaaaaaaaatactcgatttttttttgtagtactctttttgtgattctttaatatgtataggctcaataatatttaataataaatactgtaaataaaaaatactataaaaatagtggtgaaattatatataattgaagaagtatatatatattaggagacgtttggttgggaggaataaaaatataggaatagaaataggaatagtaatagtaatggaatggaataaaatttaaaatgcataaaaaaattgaataaaaaaattattaaattttttttcttgttacattagaatggtcatttctttctttttaaaatggaatag

SEQ ID NO: 380999 - DNA, 1644 bp, Cannabis indica
tttatagttaatttatagttatcgtgacttcgtgaggttgatttctatgtatttttataattttaaaattgtacaagcatatacgtaattttgtaattaatatttttaggccttaaaattataaataaaacatgaaagaaaaatatttttaaagattcccttaataaaatgtatatttaattcttttcattttaataaataaagaaacaacttaatctcttgtccattaattgctgcattttaagttacccaaacatacaattcaattaaaagactaatttaattcaatgattgaattggatttaatttttaggtataattggattggatgggatgataatttttcaaatccaattactgattaaattggattagattaaaagaaaaatgtttgattgaactgggtgtccaatcctaatatacactcattacaaaaaatcctagattgaacaaaacttgtaactaaaagtaaaaaaaattgtgactaataattataaattattatttttatatggtgactaaaagattcgtaactaaaagtattagttacaaaaattacaatttattgtgagtaaatatgtttttagtcacaatacttgttgtgattaaatttaaattagtcacaacttgtatattaaatactatatatgttttagtcacaaaataattaatttttttgttgtgactaaaagtcacatttagtgataaaaaaatttatattgtgactataaaattattactaaatgtaagtaattttagtagtgaatatattaatgtgtcactttataattaattaattaattaattaatagtttctcattatattaattaaatcaaaatatcttatttaatatgcaccaataatattataggaaaatgcttaggtatagtcattataagttaatgataaccattctaaacctaggaaaaaattccaaaaattgcccttccaacttaagtaatctataggtctagggataaaatggtccaagatcataaccccccctaaacccatccaaatattgcatatgtttgtcccactaaataaaaggttcgaaactcacccatgtgactctaatggttatccgtcgtattttccattgtcgccgagtaaaaatcataaaaattataaatttcacaagtaacttacgtgcttcttttgtaagaaacttgggcatgtgaagaagtaatgtcccaagtacatctcatggcgtatgaagaaaggtagactttttacctttgtttgttataaagttagtttgacttttgtacctggtaatacatggtgggtagatataggtgctactactcacacaagtatttctatgtaggcttacatttgaagccgactgccaaataatggtaaaagaggccaacacaattttagttgaagcaattaccaccattactagaaaattgggttttagtgacacacattgagtaactctaaaagtgtatagtgacacttcaacgcacgtcactaatgaggctgactagaaaagcagtttttagtgacactccacacgtgtcactgaaaccttttgcattcactcattgcgcgtcactgtaagcatttagagtcagacttaaaacttaacatcaacccacaaaaagtgtcactaaatcttttttttttcctttttc

SEQ ID NO: 381000 - DNA, 3133 bp, Cannabis indica
acttgaattcgtataacatcaatttatgaatctcaatatacaaatagtcacatttcatttcataatagaaagagctgatatatttacaaactgaattataccctattgatccaaccaaaccaaacttaaatcacatcaaaaatgccaaacacattcccctatatatataaaggagaccttgccagccttgtcttgctctacaaaaattcatttgcaatgtttacattccttaacatcaagttcaacctgcatttcaatataatatgattactaatttgtttatagttcttcctttatgtttaattaagtttcagttagtattattctaagctagttgaaagggctggcattaaactttcatagattaccttaacatgaatgttcgattgaggtgatcggcaacaggagcagttagcggaggaaaaaccaaggcgattggaaagctttcgaagtataactcttaggtaattgtagatgctgcacatacacaaccaacaatatgcaatttcttagatgagagtctatatggtatttacttcaagtatctgaaagcacaatttggccacacaggttaccttagtctatgcctattgcaggatgcaacgaatgcagatagaacgcttataatacttcggatagagcgaaatacctacacatcacatcaatgcagaatcaaagagagaaccatttatccaaaaaagagtttatcaatagaagatgcatcaaagagaggaacctttgagaatagatctttccaaagagaatgccaaagtgagaactcagacggctgaggctttatacgaacaacatttatgagctgagtcatggtgtttacaaccaccatgaaggaactctcaataacttcatatatttcacaaaatagagcacccaagtaacttgccaatgtaagaaaactttgtatagaaaagaggcataaatcccacaaggactttaagattgggtgaactagtgtggctgcagacaaaggatacaatcagataaaaggaaaattctgatataagctagagaaaattctgtgtaatgtttgtacctgaactcaatacatatgaatagagatcttccaagggtgtgatcaaatcctcgactaagagaccaacttcgctattcaagaactcaattgtaaccaatccagtattgtacaatgcttccgttgtatcagctgcaaatctccatagtggcagtaagaaatcagccattacttcaattgggtacatcagaaaatctgagacttccgaaactagcagtttaactcctcgtgttgtcataagaaacatcttcacagccttctcgaaattctggaggaacaacattgtccccagatatttgactctagaaagcatctcccatgattcaatccagttgaaaaaaggaccacaaaggtgagagatagtagcctttaatagggggacattcttatagagatcataaaatccaattatcactgttacaagtgagattagtatatagatagttctaaacaaaggtctcatccagggacgataaagtgcacaaaatagtggatatgactgaagaaagataacccaagtggggagacctgactcaagtaatgtaagaagcttcaaatctgaggtgattacttgctttagtttaaatggaagatctttatttttgaacctgcatagcaaaagaatgtcctcatataccattggttctctgccactattgctataacaatccacttccccattttgttctgtgtttcctgacggtttcggttcttgtagctgctgctgatccatatccattgtgtcgttttcatcaagagcagagtcactggcatcgaagaatatgtcttcagaaaagacctcatcagcctgtgatgcaactttcttcgtcgaatgatgaggaaattttccttgcaaaagaattagattgttcctcaatatctgtgtttcgggttgagtccctgagaaccatgatgagatacaactcaatgcttgatcaatgctgttaaattcccatttagtcaacgattttacttcgaaagccatggatccatctgtctgttatggcaacacattgtataattaaacaagccaaacacaatcgataacaatttaagactattttaccttctttcaagataatatgtaactggtttattcaaagatcatgtttactaactcaattacagttgagatgatcatgtcaaggattcaactttccttaactaatttaataattacatgaggactgttgtttcctttgtatcttaaatcacagtaaccattgtcaaagtaactttctcaatagacttgtttatacctgaagctgattcaaataattgattcccctaacatcttcccatgaaacttcaaacacaataaaaccatgcaattccttatacaaatttttgatggaaaatggagtcttgtctctccaactagcaatgtcaaaagtgggaaaccacttaaacaagcgattcgtttcatggccagaagagcttgaatggaaacttgagctccttagtaatggtctagtatttctaaatggtgaagttctgtactgtaattaaggaaaaagttcaagttaaatgattttaattaacatgatagtgaaaatatcacaatcaaacattaacacaattgtcctaaaacctcactttggtggtcaccaacgccttgaggcgggttgatgttgaatgcttggccttcctccatgattgattatcaacaaggataaaaaacttatgactaacagaggcgaaatacaagaattcccttgaaagatttgtattgatatccctaaaggcaaaagaaacaatgtgagaaaaatgccttgaggtgtggtttcaagaccagaaatcattttacaaacacgagctcatgtggtccaaaatatgatttgacaccacaaacaacaagtaaggacaaagaagttgtctttggcatatttcataaaatatcttccgggcaactagtattttggtgatcaaagtgttagaaaccaaaattcaacatcacgaatcgaattccccactacccacaaaaacaaaaagaaagaaattgacatttctgttccaaaacataattgactcgtttagataaggttaattaagattttttctttctaatttgatatgtactaaatc

SEQ ID NO: 381001 - DNA, 2743 bp, Cannabis indica
ttttttttttcttttttactttagccacagattttttttcttcaaaaatattatattttttttcaaaaatactgtgtaagttttataccgtatactgtgttaagttttctcgattgttctattattgttttttcattgttctattttttttgttttacggttgttttataaaaggacagtatttttataaaaaagtccatgtagcagtaaaattgtaaaattttgctcaaatatagtatttttgtaaaaactttctttgtagaattatagtgtgggctttagcccaccctaagtgtgaattgggtccacttatagttgaaggtacacaatttgatatggtttatattcataataagcttgttatgcctatatatttgattgacctaacaatttatacatcttatttcttaaaaaaataagtaaataactaattaaacttgtaaagtatgaaatagaaattataaaagcggaaaccaagttcaaaaactaagtttgaaggaaggggaaaaaaaaaaatttaaggtaattagtatattcttacgtttagttagattttataatgtaattactatctcattataaataaaatgatataagaaaacaaatgtttgttgacatggaaaagaatataaaaatgaaaatactattaatacatagataaataaggcatatcattttatcattgaccaaaggtggagggttgtattgcacggataacgtggtgcttgtggtggtgagacaaagatacaatcacaatcgatgtgtgcaagaattgtatatgataaaaggacaattgagaccctaccaaactcaccatatgcaaatccaatccaaaatgtttcctaaattttgaggcctgcatttgatgtcttttagcatcttgcaaaagcctcttttttctacgatacaatgaaagacatgctattttcattttttgttttatttaaaactaatattttggctttctctgctaattttctttctccacaaaatcaaacttggatcataacttcttgcacaatttcaagaaattctatgctagcactaagtagaacagttctctctattttacttgtgatcttggctctaatttttttttttggtcagtcatcttggctcacattgattaatgtttagtttggttaaattttacccagcattcctccttaaccttatttctttttatttatttcttctgaaaataatcaaaattggcactgattttctcaaatgggtgacagaaaaacaaaaactttccaacaaaatcacattcttctgtgatcaaagcaacattatgtcatttcacaaaagaacataagaattgagacccattatttagggtaagtctatataacattttcggtggacccggaagaaatttttttagtttattttttttaacggtcgtatacggtatagttgatagaaatacttgtaaatttttaaaattttttaaataatttatagttgtctgtttaaatattttattctaccagtaactattttttaaaaaaagtataataaataattgattaaatcttattctttttttttctataaactatttaaaaatttttaaaaatttaaaaataattttaaataactaggcaattatataaaaaaaatagattgtaaaacttttctagatacttaaaacaaatagaggtctatccaaacatcattacttaggagagtatcctacaaaaattttgtgagaattgataatttaaatttgaattgaattgtgataatttataattaatatttggattgaaattcagaaattgatactagtattttgataagtaatactagtattcatttatatcatatttgaaaatcaaactataattgaacttggaacaatgtaaaagttaaattgttcggtaacaatttaaaaattagttctttgattaattaatcaaaaattaagaacaaactacaaaattttgttaaattaaactaagaaaacaaaatttatttttcatttcttaccatatatatttcttaatgcctcactgtcacaggtcgttttctggtttgtgctccacactccaaaagtgcccaccaaaaaaaaagacacagctttacaaattaagccacttcacttcacaaaaacccaaaagaagaacaatcacacaagggtctttctccttcctcgaatgatgggggtgacgtggaatcgtggattcttaggtagcttggtgtagccttttaaggtgggttagcatacatgagattgagaatcttttctggtcctctcgagccaaaatctggtacatctcggactagaatacgtttttggacaactttcattatcaaaactccacctccatcgtagggtcgcagctactactacctctttttaaaatttattctcaataattcatttatgctgacaacgcacattatgatgtagaggatgatatcatggttcatatgatattttattttattggattaatttcacttgatatataaatgtaaaatgcttgtcaatccaatggaaatttatagaggacttggtgttgattggtttgtgactgataaatagagttttctataaaagggattttgaaacaaaaattttgaattttgaatgtgaaaaattatttttaaaaagctaattagttatttttttctctgaactttgacatatactaaattgtgcctctgaacttttttggccattaaaaatttcccaactattgaaattgttaaatttaatgacttttgtctaatt

SEQ ID NO: 381002 - DNA, 3161 bp, Cannabis indica
aggcaattattcaaaaaaaattagagagcgtgaaactgttgccagcacgagattgctcttgtgcagttaaaaagtgtggtctatctgacacaatcaagatgtatgtgcagccaacttcatttgcctccagcatgttcacttctgatcttgtgatgacttggagaaccgagccctacttatgatataatgtatctgctgaaatgctgggaaaggatgaacaggttttgttttcatctgatatctcaggaaagaatgggtgcttttgcagaaggaaaacttgatgatttggatagtttaaacgtagcagcaataccttcagtgccgcagaatgagtttgtaagtagtaaactgacagaaaaactagaacagcagatgcgtgaccgaatggctgtgtctgttggtggtatgccttcatggtgcagtcagataatggcctcatgtccctttctgtttagttttgaggcaagatgcatgtactttcgtttgggagcatttggtcagtcgccgctatctcatagtgatgcagccaccgcaattgacaggcgagtaagatctggtggcctgtctcgtaaaaagtttttggtttcccgtgatagcattctggaatctgctaaacaaatgatggaacagcatgcccgccataaaggactacttgaggtagtgtttaatgatgaagttggcaccggtattggtccaacattggaattctttaccttggtcagccatgaatttcagaagactggactgggcatgtggagagatgatcatggatctgcttctgatactagttggcagcttgagaataaagagtttgtgatgtgccccttgggtctatttcctcgcccatggtcatcttctaccgatgtatctgatgggactcaatttagtggcgtaatgaaaaactttgaactcctgggacaaattttagcaaaggctcttcataatgggcgagttttggatcttcacttctcaaaagctttctataagcttattcttggacaggtagtgagctagttttcttttagcctaccagttcattttttttttgcttctgtttcgtaatttaccttctagtgaatgcttatgtttattgttctgtaggaacttggtttgtttgatatcatgtcatttgatcctgagcttggaaggacattgctagagttcaaagctcttgcagatagaaaactctttctggattccactggtggagttgtttccacttctaatattgatacatgcttccggaataccagaatcgaggatctttccctcgattttacacttcctgggtatcctgatttttgtcttgcttctgggcctgattatgacactgtaagtttccacttagtatgagctcacttttttttcccctcttttagctagactgactgtaatctttacttttgtctatgttgtaagtttcgacttagtatgagttcactctttttattccttttagctacgctgactgaaatcctcacctttgtctatgttctcttaggtaactatgagaaacttggaaaattatgtttcacttgttgtagatgcaactttaaatggtggaatttcaagacaaatggaagcttttaaattaggctttaatcaggtatgtgcaatctctcactttaccagagtagggtgaacgttaatacgtttgttccttacctggtgtactggccaaatctgaaacagaacttcccttcattgtagcatataaaccctggcatggaatatgtgtttggatttttctttttctcaagttctttttcttcttctgttagagaagtctattaccatatcttttcaggaaaatttaaatgatcgttgattcttcaggttttccctatagagcaacttcagatctttactgaagaggaattagaacgcttactatgcggagaacacaattcttgggctgtatgttatttatttcactttcattcatcaaattagacaatgagaatttatatgaacgagcctccctaagtttatttttattattttactttggcaataggctgacgagcttgttgatcaagtgaagtttgatcatggatacactgctagcagtcctcctgtggttaatgttagtatttgttgcgcctttctgtctattttatttaattacattgcatgccttccagctatcaaaattttcatgttgaaattttcagttgttagagataatacaagagttcaacaagaaacaacagcgagctttcttgcaatttgtgactggagcaccccgtttacctccaggaggtttggcatctcttaatccgaagttgactattgttcgaaaggtacgtacattatagtgttatcattattcatttataaccgctcctctgtggattttctcccatcacacttaatcgtctcaccatcttttcttatgtaatctgcagcattgtaacggctatgtagatgcagacctcccaagcgtcatgacgtgtgccaactatcttaaactgccaccctactcgtcaaaagtaacaactacttaactctattctttgttctgtgttgaccaacactaattatctctgtttttctttgttcaggagaggatgaaagagaagctattgtatgcgataacagaaggacaaggatccttccatctttcgtaggcgacaacttgctcagcttagaactgtgaatttgtaagtattagagtaggaggggcagatgtgattgctggtttgatgtagataaagaaatggtggccggtgatgactgaagaagataggatctttttctttactgactataactggttgaggttggttaatagttggtgttgaatgtggatagtttaatttagttttatagagaaaacttgtgtatagatggtttgaagtttcagaagcatttggtttacaaacctgtacagaagagatgtttgatctcataacatcaaaagcagtttcctttcaaacaaaatttgctgttttcatttgctattattggctcgaggaaaatgaccttttctttagtttaaatctgagactcactgaataaattttctctaaatttccttctacattctttaattatttattttcggagacactggttaatatctaagggctcgtttggaacgtcgtattaaatcgtattgtattgtgttgtattatattgaattggattatatatcatat

SEQ ID NO: 381003 - DNA, 2829 bp, Cannabis indica
agagagagagagattaaatcaaatgggagtgatttagaacgttttggagaataattcacaaaagctgaaaaaaactagtaactactaactagtaccatattttcagctttatttttggagcatttttgaatgtttttacaacaactttcataactcttaaatcacctatttaagttcatttacactcaatgaagagctcataataaccacgaggtataagatatgtgtgaatttcacagtatgtgctcttaaacactataactaggtgcttaaggtaattatttggacaactagttttctatatcaaccaaacacttaatagaaaatatatggcttgataattttcaaaactatttccatgagagtttttttaatacttaaaagtaaagaaaataagttttcagacaaatgtgtaaaacctacttgttattttgatgattcttactaatcgacacactcaatgttgtaaatatgtgttctttattatacttttactttgtgttgtaacattctcttattcttctctatttctataagttatgtgcaacttttgttatagagttgtaatttatttaatctcttttgtttgtctttctaatcataaataatttacttttagtacaattgagttgtaagtcttggttttcaatttattttaataatagctctaacacatatgatgtaaagatttctaaaaaaacatatgataaaaagatcataagcacattttattaaaagggtggaaattaaacacaaacctttattaaaaaaactaaaattaataggaaaaaacaatcacaattttataaaggtgatagaaaatatagaattgaatagagagtgatatagtaaatatggggaactacacaacggttgcatcggtcatctttgtagggagtttgaatgaataggagggagagattgcatgaacagccttgttgtcactcactcgaattattctgtaagcgccagagcccaacaacgttcctattactgggcccactatatacacccaaatccctttgtattgcccactcgctattgctgggcctagcgttcttgctgggttcattgatccacctgatatgggcctgcatgttgtaaaaccccagcccagtaaatttcaatttaaaatcaaacaaattaattagaactcaattgtcctatactgtttaaaatttatttgtactcgaatactaataaataaataaataaaattttggtactgtatttaattagttaagtattccctcgtgttattaattactattgatgttatatctatgtactagtaacatgggatatactaaaaattattttagtgaagataaaatttgtgattaattataaataataagttttatgttgggattaaaaaatctgtgactaattgtattaattaccaaaatcacaatatattatgactaaatttatctttttagtcataataattgtcgtgactaaaactaaattagtgacaatgtgtatataaacactatattttagtcataagtaattttttattatgaataaagtcacatttagtcattaaaaaaaattatgttgtgactaaaatattgtcactaaagataattttttttggagtggttgctattacttaattattaatttaaataataataatacaattaaatctagttttaaatttctttataagaataaatatttaactaattttattaaacaataaaatagtaaataagttatttaaaatattttactattaagtaaataataattaaagttattttattaattatttaagttatatcttaataatatattaaatttagatatttaatattattttaacaaaaaataattaattaactaattaatttaatagtattagttttaaataaataaaaaatttactaaactaacaatttcacatttaatatataatttttgtattataaaatatttttgggcatgtgataaatatttatgttgaatactgtggtttaattacccggcaaacattgatgctatgcagactgatgaacccactgcaataccagctagctctccaacctgcccatattcagaaaattaataataaatattattgaaggaaaagagatagaaattagaaattaataataacatacagctttagtatctgttgcgacagcagaagtgacaaacatcataacaaaggtaacaactatctccatgatcaaggcttgagcatctgtcccagatggtgttgtggtcccaagttgttgtattgggttaagcacttcacgtagcgtaattgcacctaaaattccacctgttacttgagctactgcatagaatggaacctacatatatacaacgaccaattattcatcatataatttgagttaggcctcgatcggctaataattatatgtgagtaataataatataatatgtacctgtttccatggaaaatgtcgaaaagttgcaaaagctagagtgacagcagggttcatgtgtgcaccggagatgtgaccgacggagtagatcatgacggtgacaatgaggccgccgacgatggatgctccgagctttgggagtctatgctcatcatttgcactaatggcagctgcaccacatgtcacaaataccaacagaaacgttgctatgatctctgccacaacctgcttccatataaacataaaattgattatattatgtctaaaaaatataaatgaggatttaatttggtttagaggttaatacttaattaatttgtcagtgtttttttttttcataaaaagtgttggtaatttaaagttaattttgacaaacaatacacataactgaataataataataata

SEQ ID NO: 381004 - DNA, 9032 bp, Cannabis indica
aaaaattaataatgattttgagaagtgcatggcttatttagattttttctttaccaatccaagtttataataactttttgagaactgtaagaatttttgagatttttcctataccaatctaagtttcaagtttaattatctttatttttatgtatcattttggcaaatcacagttggtgtaaattacatattgtatatgtatattatatattattttttttttttttattattttcagaaaccagaggatttgtggtcgattcattctcaacctgtcctcccaagacctcataaaagggatactccttcttggctagcaatacaaaaggtagaaatttaaaattatttaaagataaagctagtacttcatagaaatataattctgtattcattctctgttgtttggatccaatgacagatcactgcacgaggtgaaacaattggcctgcatcattttaagcccataaaacccttgggttgtggagatactggcaggtaatttcatctactcatccctgttgccatattagtcagtaaggtagtgtagtaaataatggttatagcattaataaaacaagaaaatacccatttgataccccttgttttattgaaatactaacttggtaccttatgttgtttgtaatgctcatttggtaccctttaatatgaaattatacatatttggtatcaagttatcttcacttaattaagtaattaaatttgaatttgaaacctagataacaatttggtcatgtcttaaaacacagggtaccaaatgaaacacaaggtactaaatgagtatttacccttaataaaactatccaatattgcgatttttgtaaatttccctacttgtaactgattttcatgaattaataaaaatatatgattttgattgtactcaggaaggttaggggttgactgtgttaggtttatgattttctcttaaaagtcagttggccttctcacagggacagttttgtaatggggattatgggactgtctaatttaacctaatatattttttcttggaaattgttattatgaagagccagcatcttttagttccctatctatccaacataaatattttgtattaggtgcttggtctgctttaattaaaactgttcttgtgcagtgttcatttggtggaattacaaggtacaggccaactgtatgctatgaaggcaatggagaagtcaacaatgctcaatcgtaacaaggttctgatcggttttctctgtaacatcacatgaactctattttaaatatggtgcatatgaaactgtgcaatttggtgcatgaattaaattctaattttgtgtatctatctttacatataacgttgctgtgggtcattttgattggcattgatgtacaggttcatcgagcatgcattgaaagagaaatcatttcatttttggaccacccttttcttccaacactttacacttcatttcaggttattcatcgtcttagctgcaaatatatgacttgagattaagaaatctgaatccacatttgtttttgttatccatgctaagtacatacaaagagaatcatgtacttattggggtagagaaaatttctgactccatctttctatttcttcagacttctacacatgtttgtttgataacagacttttattctggtggagagttatttgcattgcttgacaagcagcctatgaaaaattttaaggaggattctgcaaggtactctcttatatgttttactacttcttatcttacaagtgccaaagaaaaaatatatatcacctgaattttgtgattttaaagctaaaattggttcttgctgattttggttagttttgtaattcagactaagtagtaacgaaaattgggttcgttttaaagttggaatgaacttaaatgtcgcatgattttttttgtttatttctttggtaaactggccacgttgtagcttgacaattcaagtgttgataattgatatttgaactcatatccaggttttatgcagcagaagttgtgattggcttggaatatcttcactgcttaggtatttcgattgtataaaattaagttatatttcttcaactatgtcatagtttatcatagttatacgtttcttctctcatttctgcttaaatcctaagaagaatgactacacaaagaaaacttggccaatttttctcattttaaataaaaataataataaaagaaaaagaggaaattcactgggctaatgtgatatacatatatatactctctgctacaaggagaatgaaggaaaattctaaattctttgctttttttctttccccgcattaatatttgatacaggaataatttaccgagacttgaagcctgaaaacatcttaatgcaaaaggatgggcatattgtactagcagattttgatttatcatttgtgacatcctgtaaaccccaggtacgtgcattactcccgtagtttctattttcttcagtcttgagaggctcctgctataactgttcttactttttaacatatctaatgtgtgtcacaggtgattaaacatgcacaacctaatagaaggagatctaggagtcaaccacctccaatatttgttgcagaaccagttagtcaatcaaattctttcgttggaacagaagagtacattgctcctgtatggtgattcgtcgatttatgttttgatattttggtatttgtttcccgttgaccaaattgattagcagttagtaccgaagcatgttgatatgttatgatgttggaatcacattgtcagaccttatattattatgaccataactttggatgaatgtactgtttgtgatttcttaaagattgagtgttgaaaattttgaaatgagtatctattgtgagatattaaataacataattgtatgtagttcaatattctgtgggtaaagtgtaaacttacatctgcttcatttcaggaaattattacgggagcaggacacagtagtgccattgactggtgggctcttggtaagtgtgtaataccatttcggtttgtgtttgtgtgtatatatttactatgtaatcgtctatctatccttttatctgtctatgcatcccgaccctttcaccaagtctcctctgctgctactggattgttcttcatatagtcttctaaatgtttttctcttgaaaaagaaaatcactatgcatcctttgtaacattctgtaattcaggtattctgctgtatgaaatgctctacggtcggacccccttcaggggaaaaaatagacagaagacattcacaaacattttgcacaaagaccttactttccctagcagcgttcaggtacagtatgtttgtactgagctatatataaccttggtaaccaagtttttagtgtgcttaacgggtgttgtttagttagtcattctatataatttactggtatcacaaaatatattcgaattgagctaaaatttgacaagaacctttacaatgttagggagttaagaaactcttgaaaattggtcggtaaagcgcgatggaaataggcctgatcactttactcaatgttaggaagcattgattctaaatcattgttggactgtaaaagccaatttactgactagatttgtagtaacgagaaaatgttcaaatcttctgaactgataaagctctccttcctaattttaccaggttagtcttgcagccaggcagttgatcaatgcattgttacaaagagacccagcaacacgtttaggatcaaataccggctccaatgaaatcaaagaacatccttttttcaaaggaattaattggcctctcatccgctgcatggtaaatcataaatccttcttttttattatctattttctctgtagtcgagggtagatgtgttgttatcctcgtaaagaggacgagtacttgtgaacacttgtctccattcgttttgcagagcccgccaccattggagacacctattacattgattgaaaaagatctcaatgccaaggatgtaagttgggatgacgatggagtacttgacaatccaatggatttggaaatgttctaaaaagtggttatttgtaagatcagagtcttgtgcctttgctgctgtacatctccattcacactacatttttcattaggccgtggctaacgggtcaacggccatcacacacactctgcttgctctttcgggttccccgcaaatgaggtatctctcgtgtatgtataaatggaattttctcctttggaaagaagaaataaaagttacttgctttgtcttggatatgaggctagctaccctaaaattgaaagacagatgaatgaatggatactagcacgtacaggttttactgaggttatttgtaattttatgtaaagggaagagagtttgtattataataagaagaattaactagagatgttgctctttgatagccagtgtattttttaacttattgtcattcgtgaataaattacttctcggcgatattatgtttagattttatttattctattttaatttagaatgtttaatttgttgcaagtgtcacttggattctcttatttttttttaaggcttttcacttcttttggcatcttatttgctactaaaatcaccatacttattttaagaggaattaggataactattaactaataatcatctacggctaataaatcatctaatatttttcaatgtaaattttatactgaattggtaatgcagtcattaaatttttattgagaatatggtaagagaaaaatactatttaaatgaattaatacaatgttaaaaaaacccttacaaagtaataaacttttaatattgaggagtactaattataattttttaataaatatgggagtattatttctttaaaattttaaaaaattctaattaatttacagtgtcaaaaatagacttaaattattttgaacacgcttagaaatctgaaatgtcataaactttattgtttatacttaaactatttagaactttcaaaaatttacaaagataatattgtatataataaatttcaccgttaaaaaatctagcacgtgtctttggatggaaaggttgagaaaagaggttataataataggaggtaattaacacaatttttagcatattctaaatttgtcacaccttttacaatactatgaaaattatatttttatgaaatgtgctcaaatttagcaatagagatgctcttggtgtggacaatttagaattatataattgaaaacattaggttccattgtatctttcaatcaaaccctttgtatgccttgtacacttgtatggtttaataataccatttatcaagttgagctttacaaacctcaaccaaaatggaggaaattcaggccgaaaaagaaaattaaataaaattgggggttaatttttaagtgggaaaacattgaaataataatgcttgctcatttacaaatagtaataaaaatatactgcccaaagaagtagactggttaaagcacaaaaatgcagatgagtagaagagaaaaatagacctatgcaagtatgcaacacaaaactttaacagccatataaccaataaccgtatctcggttgtctttagaaaccaaaaaggaaaatagtacaattatggcgcctcatattgaaccggtacaacaagcatatcgtttacttggtggcttgagcgattatattgcttatagaactggcttcttctttagcagtctccaccaaagaatcctaaaacaaaatttacatttgcaatcagcaaccaataaaaatctccaccaaatagtgttgaaactctttaagagaaactgtacctgtgcagcgatcaaccgtgcaacagttttcttgctcgattcttggagttcaccagcaattagaagctcatccaaaatataataggcctacaaatttttaacaacagtaacagtgaagtgaaacagccaactttgaaatccatgaaaatataagcaacaacgtccgaaccctgaggctacacctattctactgctgaaaggtaataccctttgccttaagattttctttcttatttttgttttacctggccttagcctttagccttttaccaaacatttctggatttccttggattaattaaggtaatatgtgattttttcactaatactataaacctaaggaacattagttagatatactatcccaacatttatgtagaatgctagacatcctctgaatctaaagaccattttaccagaatttaatgtgcaagcatcatatttccccagattttcacttatttgaaaagtgtgtaaagaaacaaaacataccttatgaaaattgaagatcaagtctagttcacagacctggaaaaaagaaagaatacagtgtcaataccattttatcactcatagttatgttaatactcttgaatatgatgaagaatactgtttactcacactgccaaaataccgatccagaatctcaacataatgatgaattatttcaaggacctctaattcattatcttcttgatcaatgcacatgcagaaatagagactagcatatctgtattgaacattcattgaataaattagatcacaacatagttttaaatacaaaagttcactctaattacaaattaagtctcattatccagcattacctcttgtaaacaactttgtatcctctccactccacaaaattacacagcttgggtcctcgtgtaagaatgactccgctgagttcccgtaacacctgctccaaccataaacaatgcgctcatcaacaatttgaagtacaaatacaatgaacagttcagttagaagcatcaaataatcagtagtctattgtaagctagattaccttagttctctccttctgtgagtaaggtgaataccattttgtcaatctcactttcccttgtctactaataagaagcacaaaatgaatctggaaatacaagcaaaaacataaaatattacagccaatgaaatgaaaaccttctgttaaatcatatcaaattactgaataagaaaaagcaacagctgccaaacagaatccatcatgaagtaatttccatataaattcaaaccaaatcatacattttcagcattcccactatctcaattctcaatcacacatatatgtctagatccccaattccacccaaaattaaaaaacaagaaaatccacatattttcaacaacatagtaataattcacatacaataagtaaatcattctataataatttcaaatcaataactaagaaacacaggtgtgagggtggtgatcatatcagaaaattctaaaccaaaattctctcgggtatgattttggtaaaacagaccacagcgaatggggaactagatctatataaactttctaagctacccaattaagtcaattacagaatgaaaaccaaaaatcagcaaaatctaatagtttcgaatcaaaacaaaacagctacgaaatattgcatcaagtacatacagtagcaaagagaaagaggaaatgaaggatttcaaggcttattcattaccatttcttcaaggttttgaagggatcttggtgaagatgaaggctttcccctgcgatttctttggtctgattatgtgaacggtactctcttctcagctatggttttccccttttcttcacctgaactcggacgagtcactcactgatgttgaatcagatctaaatttgttgttgggctcacatgaaaaatctatgttgggcctggcccatatgatgtgaattattattgggcccagactatgagcccaactatttcataaatacctcgacaagacaaaactcttacaaaaatacgcatctacagtgttttttagggattattttttaaaaatacacaaaagcaacaaaaaattataaaaatacggttgtatgggattttaaatatttttacggtttttaaaattttatttatataaaatacgatcttttaatgtattttatattgtgttcttgttgttttgttgtttttgttatttgtatatgttttttaatgttatttttctattattttcatgtagttttttattatttttgtattatttttataaatattgtaaaaatatttttttacaaaaatacgaacagtgtttttttactttatttttacaataactatgttgctttcatgttattttttattgtttacatgttacttttacgagcatctgcaaaaatgtaatgaagaaaaaaaatccaatttattttcttattagtttttatctgtattctatacaactttttaatttagattagatgatgtggtaaattacaaattctatgaaaaaattaagaaaataactaaaataatgttatttaatttatttttgatttcttgtagttctcccattattgttattagctagtattggatgcttcttcttgataacatgattaagatcaatgtgaatgtttttgtaattagtaggaataataattttagggttggttggttagcgcttaataatagtagtaatgtcattgaggccgagtcgaaattattacctagttggatttagccaagtattgttgaagctatagatatcaaggaagttcttagttggattaaaaaacatacacataaggaagatgaaactagtaaagttgaggtgggacaactaatatatacatacatacacataaggatatatacatacacataaactatatattagttgtgatatatattagttcttgccatacatacacataaactaatatattagttgtatatacacttagttgaggtgtatatattagttgagatgtatatattagttatacacttaataaaccctaatcttattatttattagttttattagagccgaaattttaatattaaaacagaacttctaaaatatttaaaacagtcatatgttagacttttatttgggcttacattaaattttattggttttattaaaacttgggttgattggatagttctttgctgtgttagcccatattgttggtgatcagttgttaatgggcttagtatctgtgtataaagtctaggtgaagcataagtgtgg

SEQ ID NO: 381005 - DNA, 3014 bp, Cannabis indica
tcctttagagaagctgaactgcagcgattgccggaattttttccctcaatttctgtgtaacagcaactcttacagtcatcactcctgccgctggacctgtaatccgaatttttactatcggctcctctattgtcacgagctcaagagatcccccagcttctccaactaggtatggccttatttcttcgagtacctgaaaaaatgactctgcaaattagtgagacagccaataattttaactatgagttctatgcagatacagttcaacccgaacaacagttggactatgctaacttagcgaaaaatgttttgttcattgactagggaaaaaaagcagctttgtcatatttctttagttgtatccctaatagaatcaacctagctcatatttctagtcaaaccataaaggaataaggaaattttattgcttcaaagaaaccgaacttccaacactcaaccatgactccaaagccacgagagaatcagagagcttagtcgagcctcgtggtacagccaacctcatcaagttactaaccttcttattcttaaactacctgagttataagttactaaccttctctatattttcttcattcaactccaagccagtttcttcatctggaactggttccactgcaactatttcagggattttttccatcaaacgacgctcaatccccattttcattgtcataacagcacttggacaagaaccacaagctccctgtaacttcaaccgtaccacatttccatcgatttcatgcaatgctacattcccaccatctgcaatgagatatggtcgaacttcatccaatacagtttcgacgttctcttcagttagtggtaattccactgctgaatctggagtagcaacagcctttacaactgtacatttatgaaaaaacattagagatacaacaaagagataaactagttggaaggaataaaaacacaattaggaataaggatggaatataatttaaaacgcataaaggaaattattatcattttccaccaaaatgccagaaagatcatatcatttgcaatgacattagtatattttaaaatgcaactaaataaaagaaaggaacagaattgattcatttccattccattccatttcattacctccaacggaacgccacctaaattcactttttttcttttgaaactaagcttctcacctaaactaacatttacaagccaataaattatagtaattgctaatcaagtagtcaaaagagattcgaatctccgatcttgttggagcaaacctcacacctcaccattagagctacccaggtcgaaattcacttatttttagtgctgaagtgcacaagattgcgaaacatatttctacactggttccaaatcttcctctttctctggatttttagactattctctgtcactattaagactacaaggtctatgttgagtatgagtgatgtatgttttagtaataatctccaaattagctagtaaaaatctaaaactttactagtcctagctcatcaaagataacaaagaatcaaatattcctaattacccaagaaagaaaactataaatatctctagctaaaaaaaataacaaaattcttaccctaagaaatatggtcaaaaatcaaattataataatttagcctttggtattgaatataaatagttcaaagcaaacaataacacaaagtactttcatttaaattcaaggctaattaggatttttttctcacaaacttaaacatataccaaatcatgcctcttttttaactattgagattattaagagcctaagcgatttggtacatcgacaatcgccgggttagtaaaattacttgtcagtgtttggagaaaaaaaatccaaattagactaaattcaacacagtaatcaatatttcaaaccaaaaatataactttataagaaaaaactaacctaacccttttgaagctgaaggcaatcgaatcctaagggagctacaagagcctctgctaaacgaaacatggccacctgagcctctgaacgagttccaactctgccaaacacgtccgaaatattacaaactattctacaaaatttaatcttcagagagaaaaaaatgaattcagacctttgaaaccgatggttgaatggtttgttgggctgtgcagattggcagtggtggattcaacaccacggcttgcatctcgaattgatgattatttatgttgcaaataacaaataggattggaaaagaagagaaaaaatttgaacttttcctttttcttgcgttttctttctgaatttctcgggaaccaaacaaaacgacggcgaactttctcgttcttctctctctttcgttctgtagtgtttgccactgtctttttatttggaccatatattttggcctatttgatattgtaggtccctatgttactatggttcttgccatttggtccctagtttattagtttttgcaattaaactaactaattattattatatttgcgaaaatgttcaaaactaattggtaagtagctatgtttggttggaggaatgaactggaattgaatagaaagaaaccactttattttattcttttgtttagttttatttgaaagtattagattgtaatttttttctagttatgttttcattcatttcaatcaaacgtcacctaatagcgtgtttttttttttgaataaataagatgttcgttatgtaagtttgagttggagagagaaagagttagagggaatataaaatccataagtttgaggggattaacattaatatcattttgatttaaaaatgagacctacttagaaacacaaatcccattcaaatttaatataaattttacattttcattctcattaagtctaaacctcataccaaacgctccataaaaggtatgttttggtaagaaaaaaaaagagtagaattgatggagagcaggccgactctagacatagacgggctagacccgcgcctaaagctcactcattttaggggcccaaataaagaaaatacattt

SEQ ID NO: 381006 - DNA, 7256 bp, Cannabis indica
tttaaaaatgacattaaaaactattatcatacatttgtaatggtcttttctttctattttataatggaatggtcattctaccaaaaattgaaaaagtcattctatttcaatatgtaactaaataaaagaattggaataaatttttttttttttattacattctatttcattacctctaaccaagcactgctataatgtaagagataaaagaaatagagatttaaagtttaaatttaaattgtgttattttaaaaagaacgttatatagtcatatttaatataatattatataattatatcaaaaaaatctctaaaaatttataattatgtatggggggactatatatattttagaaaaaaaaaataatttttaagagtatttgtaatgtgttatgtttggcaagaagaagagaatgagagagaggagagatggaggaatacattctcccatcaaactttaaaatttttaattttcaaattttggtaggattgtagaaaaagacaatcaaatttgttaatacaataatgagaaattatcctatataccactttttaattttttctttatttttctttttttttttaatttttattttaatgatttgggatgctctgttaattgtgatctgaattattgcgtgggttgcgatgtggattgcagtttgaattggattgcgatttaagttgcaccgtatattatgtaaaaatgcccaaaaaaatactttaaaatataaatgaaaaaactcctacaataattaccctttaaaaggtaataaatatttatattcaaaaggaaaattttgtaattttactaattaatttctctttatcattctaacaccacacctaataccaaataacacgaaggagatcaattatcctctctcttgacgttgaaaagtggctaacaccagcttgctagattgacaaaatgaataatgagtttaagtaaaaaaattagagagacacacaatatatagtaattcacttcccatatcgcgatgctaatggagctacgcctacttcgaatttttatttctcacgagagatgataattgcaaaaaaaggctaagtgtttaagctctgatttttagagagagaaaatagagagacatgctctgaccttgtgggtagttttctggatataaaaaaatgagctaaagaacctctccatttataggtgaaggagatccttgcaaataagaaaaaaataattcaaaatatgaatatatatatatataaattggctaattttgaaagtacggtcaaaactaacttctgaggttgatagtcaattttttgagctcgggtcgcatcagtaagacctgctccgggtaagccagagcttattttcgtaattctcttggaggttaaattttagatcgataacttcaaaattgtgattgaagtgtgagacatgacttgatagagcattgaaatagtttcgaaacgcaagttgaatcgtgtcaatcagatcaatattgagtgagttatggtcgtttataacccaacgcctaagttgacatccagcgtccaggttgacatcccagctcctaggttgacatatgatatgtcaacctgtgcgctgggtaagtaagaaaacgtcctagggatgtactttttgatgctaaatgatattttgacatcacttagtttgtttttgtgttttggcgaaactggtcaccgattctcagggatgttgttctaaagaaatgagagactcaaactcttcatttccgagcgattttcccatgttggaaatgagaaatgtgaagttgtgaatttgaattctttgacttcatggctctcaattattgtgaaaaactagatgaacggtcgagacggaatcataatcgaataagcagaacccaatgtaccaggccatttattaacttggtcgttgggtgcttatttcggagcttccagaatgtcattttgatactttcaaggttctagaacttgaggatgaggtctcctaccccatttttggtcattcagcagagaatgcttggatcagattcgacatttgaatgatcaaaaccagcgtactaggtcaacctaggcattggactctgtttccaagtcctcgagtttgtggttttctccccaaatttacttgaatcttcattatctctgatgacggaaaaaatgcccagaacactttttcaagaaactgattggaaacagcccaagttgacaatatgtcaacctgagtgttaggcccagtgttaagtgtcaacatgggcgctgggtcctagttttgacccttagaagttccatttggtccccgaaaacagttgaatcttaatctttactgaaaacggagaatattctcggaagagttctcagaaaacatctttagaattagcccgggttgacaaaatgtcaacctgggcgtcgagttgacaaaatgtcaacctgggcgctgggccaatcccaggtatcaacttgggcgttgggccttgcttctggcacacagggagtgttgtctatacagtaaaagtacctatttctccatttttgatgaagacgaagaagatgcacgactagaattgttgatctaatacttgaaagttgcccagattgacaaattgtcaacctcggtgttgggtgcccggacaccgagtgctttgggtgctcaaaaatgaactttctttgaatctaattctgatgcctgaaatatgtttgtggtatgtctagttcatgtcccaatgcaaagtttgacctatttactttgatctttggttgttgtcttatcattgaatctcttgtcacattgtgtgtttatgtgaatataaatgtagtctttgtattttcttaggttgtagccttgaaaatctttagcattccatcggctatgtttcaacaaaggtggtcttattcatctcctcgatttgatagtagaggaagccttcgtcaactctttagctttatagtgtaggaggccttcaacataccctcagctttacagcggaggaaaccttcaacatcccctcgactttgcagcagaggaggtcttcgtgatctcctcggcttcagagcggagaagtcttcatcatctcctcaactttacagcggatgaggtcttcttgacgactgtcaacaatgtattgtagcaatcgctggctgttcattggtcaattgaacatgcgaccaactcccaaattaatatacccaagatgggggtaatgtcttccccgtctcgggtgcaccttagagtgattttaggtgcagtctccattttatccttggtcttaaccttagaggtcttcgtcgtcccttctgttgtattcacaatagaagaggccttcttcgccccttggttgtctcgacagcaaaggaggtcttctacttcccctcagctgctagcacagtagaggtcttcctcatcccctcgattgttatcacaacgaatgaggtcttattggtgaatatcaatgatgtgttgtaacattcacatgctactctttggttgctaaggatacggtcgataccaactgctgttgagaacttgacaaacatgtggtagatagttgagatggctcggaggtcgttgggtgttgaccttccaaggagatatggtgtcgattactatgaaggtggtcatagttatgtttgccacggggcagtttcgactgtgagtggtaatacgatttttccaaaaggagcaacattggctcacctaaaaccatacatgagctgcttgcattgcaccagatctcttaaggagtaacccactcttttcagggtctgttctgattaaaatattagtgatgcttgatcattaaccatcacctttgtcacaattatgtttgaaattttattaacattgtctgaacttgactgctcttgccctcggcatttatctcttagtaactggggtgaaaagctttaaagtttgtatgttgaagctatctattgtcagcaagatagaccgatgttgaggtgtaataagttattgcttgtgtgcttggtgctgaagcatgagttcactttatgatcacaagtgagatgaatcactgtcgaagagtaatgcaaaaaaatctatcagatgttatgtacaagggcaaaatcacaggttgttgaagaacctttgcttgatgatttcaactcatagaactttgttaaagaaaaactccaagggaggaaaaataaaaagacaaattggattaaactcgtactaagtatagtgtctcatacttaggaggagctgaatcacttaaagaataccacaactgaggcagcgtcccactcccatagggtttttttcaataaattagaaaatctcttctggacgcaatgtcatacttctagagagctttctacaattgatgatgcttttcttttctttttgatttttatgatccaagaaggaacacttgcactagtaatttagatttataaactcagttggtatattcttgtgtgacctcaagtgtttttatcataacagcgcttaactctggattgcaaatagtctgtatgtgcgattgttcaacttaattaacttaccagtactcgcactagtacttcaggattaagaaacttggttactagagataacatcaacatttcattaaatcatagaaatactaactcaggtgtgcaaaattcctaaatgccactgcaatccctggctccatataacaggataacacttggctcccgtctaccaaagtgtatgtgacatacatggctctcgcgtaccatgatttcctatgaatgctcatgtaacgtgcatagctcccgtatactatgtcttatttgccatccgagtgatcgaaaaaatgatttcattggtcacttgtgtgaaaacttaatagcttaataccatttataagaataagaacgtgaaatggactactccatttataactaatgattttgttaattttgaaatagaacccccacatttttatatctagcagtgaatctaaccctaagaattcactcttaagaatcgtttggtgatggttttcggttgattggacaaagctaattctcctaactaatagtaaaagatacacatgatacgacaccaagtaagcaaacctaaggcttacataacatttcagtaaccaaaagaagacaagcaacttaagttttcccacaaaatagaaaaaaaaaataatcaaaactcttcattgatcaagtttgtacttttttccacagaccatgaatcacatacttacatgtcaagctgttcggtaaaaatcctactttctgcattctatcctgcaaatccaacaacctggccacatctccatgctcgctgaaaaccttggcaactgcgttataactctgcgtgtcgaaaacttggaactccttggcaaggaattcaagaagtgattctgctttagcagcattagtttcttggcaatatccatttactaatgccctacacatctcagggtctggtgataaaccagattcagccatttctttcagtaaggattcaccttctgcagttctatctattctacacaagcattccacaagagctttgtatgtaacaaagttgggattaatgttgatatgtaacatgttatccttcaaaactagtgcctcagttacataatcacatctgcatagagactcaataagctcattatagattatagcatcaggcacataaccatcatgagaaattctttccaaaagactcttagcagcaaatgggtgatttgctcgacataaagcaaccataagatagtcatagataccatgagacacattgacttcaaatcttttaagttcttcaaccaaattcaaagctgagagcaacttaccttctttctgatatccatcaacaagtaccctacaagtgaaactgtctggcaggatgccattcccaatcatctcatgcaataatgacctgcattcttgtatctttccctcattgcaataaccatgaataagagtattatatgatacaatgtctggattcaagcctctatggaccattctatggaaaagctgatgagcctccctcactcttccctgtcgacagagcccgttcatcaaggctgtataggaaaccaaatctggaatcacattccttctatacatgattctgtacaagtaaaatgcatcccctagtctaccttttctgcagtagctattgattaaagtgttatatgtaacaacatcagggtcaaaaccttcttcttccatcttttctataaaagcattcactttatctacatcctcatctttacacaagacatgagtcaaaatattaaacgtatagccatttgggtgtactccaattctccccatttcttcataaacatgccaacactgctcaacataattcattcttgccaacccattcaaaagacaattacaagaaatcacactgggaataaaacctacatctaccatcttttcaaaagcaccaaaaccttctcgaaccatacctgtttttacataagcctttatgagcatatcaaagataaccggatcccagttacattcttgggtacacaagaccaacgtttggaaaatgtcctcctttggcgaaacatctttaaccatccctatcagctcagataacaatttcatggctggcgaaaaatttcgagaccaagccaaaatatggagaacaaggcaatagttctgagtggaaggtttgagacccagatcatttttaacccagttaaagaatataagcgctgaagagtaatcaacttggcatctcaacaaaacccttgaaatttcatgggtacccagatgaggaagaaggccttttatgctattttggagaagggaaagactcgtgttgtcttgtctgaggcttgagcatatgatattgacaatattggcagggttttggttcgggggaagaagatggtaaagagggtttaaaccagatttggagtctatatcaggggctgccagttgggaagaagaagaagaggaaatggtggaagggatatccgagtttagtgaattgagcttagagagtgaatctgaagagaaatatgtgcgacctaagttgttttgtatgttacgaattcggctaatgtaatgggttgctgaagctcgactcatcagagcaagcaagtatcgaaaaatcaaagagtaaaacgagaaccaacagaaaacggggtttagtttaaagttttccttgaacaacatgtcgcttgttgttcaggcactttgttgccctttaacatgaaattcacatttttatttagaggtggtaactgatgttcatgttttattattattattatttttgaaataaataaagt

SEQ ID NO: 381007 - DNA, 1778 bp, Cannabis indica
attaatattctctcaagataggtttgttagagagatatgtggctaagatgattttttaatttaaaaagagattattaatatttaaaagattgtttaattttttggatttaattattgggtttatttgttaacgggagagcaaactaatcgttaaatttaacagaatattcttttatttttaagtatattaaattttctaactttttttatttttttttttcagtggggtgaaatttttgtcaaaaaaataatgtgtattgtgttcagttttcactgttattttaaggttatttttttattataaaaatacagtatttttaaaaaaattctgtgtaacagtatttttgtaaaaattttaacttaataattcaagtatttttttttttagtaagtttcccaaataagattagtaaattattatgatgcaagttgatttttttttcttagaggaatttctttatgaaattagatattcattttaaacacaagtttattagcatcatgatcaaaatgtaaaatttgtaaaataatcacattcccttgatacatgtgtgcactacaatagttattataattaccaacaaaattttattaaaattaaataaatataattgaacacataacaatattatctcaaaaaaaaaaatgcataaaaaccaaaatatagtaatatgcgatagatgcaatgcacaatgaaacaatatatgtgtattgacatatattcatacatatatatgaggtagtatatatttagtaaaatgaacctggcaagaagacaagaagagtgtcagaagtctcctccttgacccattccaagggtggttcgaattcttcatacgatttattctgattaacagatgcagtacctggcctgattgtttccatattaataatactatatctaattaaaaaatctcactcttgtaatgtaaaaaagctttcttaaattaacttgaaagagagattggtatttctccaaataaatatttagtgatgagtatataaaaggaagactttggtggccttggatttatagtatttgatagctagtattaatttggaaatcaagaatgaatgagggttcaaatttatgtgttttcttttggatatggttattccttgtttttttgttattttttctcataattcgtaggtagcttccttttgggttttggtctaagtttgtttcttttggttgattaaaggcttcaaactagatatactttaattgcatatggcttccatgcatatggaaatcttgtccattcggcaaactaaattaaagcaaaaggttcttttgtctctttcatattcttccttcttgtctctcaagacaaaataattttagttttaagttatatatggatggaatatttgttagacacatagagtagggtagtacaaacttggaattggtaccaagatataagtattatgattatttttccaataaaattaaaagattgcggggttatatgttttggtgtttagataaaaattctaattattttaataaaaattatagaaaattaaataatgagacagcatttgtgtatcttatttgattcatttcaaacttatgccacacacaatgtcacatctataatctttttaaggggtctcatggctctcatctatatttctttttatagttattattgcacacgtgtcatctagattggaaactaaataataataaatgggtaaatggtggcaaaaccctcaaaacttttattttagtttcacttaaccccgaaattcaaatttgggcggtaaaa

SEQ ID NO: 381008 - DNA, 3662 bp, Cannabis indica
agagtaataaaaagatagtctataagtggggtgattctataatatatgttacatctcagcaacgtttaaagttttttacttaacaaattacttctcattttatagcttctagtgtataatttatttggtacggtgtcactaatataataaattaatggtccatatatagcacccttcgaaaatagtagttctttcttacaaaaaaaaaaaaatagttgatatttttaattaatgaactttccctttcttaattaaggtttttttgtatcttaagctaaaaaacaactatattcttacatttatttcttaatcaaaatatgaaattcgtataagaggcattaaccaagctacaatttttcaattgtgaagtatttaccaaattatataatcagctagcattctgacatattaatactttaaatggaaacattcaaatataaataggagaaaagcatgaaacgatatgtgtatcaattacatataatgcattgtaagcttaaacgtcacttttgtctcgttcaaagccaattttcatagatatagtgcttaaacttgcttgtgtggtttaatattattaattagagctacttatttaatattttataattatatatatgtttaatatgtttgtcatcccctttcaaaaaaaaaaaaataaaaaatatttgtcctcccaacacttatgtttacaattattgattatgtaactaaaatgtggttgtagaactcaataaagagcaacaataaaaaaccgccgcagagaccaaaacttgggcaacattgggcatcggcggcagggcatggaatgcgagccatttttctagattctgcccaaaaatcatgtattggtactggtgttttccttccccaaataccccacaacaataaaaagccaggtattaatattatatataccttactatatataattaaagacaccataataaaatgtattgtatatctaattataaagtcaaattttttaattttttatgcattcgaaaaaaaaaaataaaagaataaagtgtatatgataaatctatcgtataatatatttagatcaattttacattgttaaaacttaaaagtttagaaatttatttgttaaaacttaataggtagattggtaaaagaagaaaagattaggtgcctaaaattgtgaaatgataaaaagcttattatataaattatgtttaaaattccatatgtagatgcaaatttttagtgtgcaaaaattcttatgttatgtttggtttatacatttgaactcctaataaaaaagagattactattccaacaaaaaagttacatatatagtgatttttactgttaaaattcttttttagaaatttaaatgcaagaacaattatatgaaagatttttacatttacataaaaaatttaagtgcatgtatgtgtaactaaataaattatttatgctattaaatttaaatatgtaaacattaattttttttgaaagaaaatatgtaaacaaatttttctctctttaaaatttaatgctataaaaactagtgtaatttaacaattattcacatagtacttaaatccaatactctctgttactattcataaaaaaaaaatattatgaactagtttgaaaaaagtattataaaaccaattaattatatgcaaactgatgatattaatataagtttttctttttaaaataaatattgatatagtttaattatattatatatgatgcagcatgtgctcctgttctcctaccttcacgtgtggtccaagctctcaacctcaacgtccaagctttaggtttacaaatttcacctcgacaaggtttttatttgatttcttttctaatagaaattaaaattattttgattctatatctatatctatatatatatcttcctatataaattaaattgcttatttttaattttagtaaatatttttgttctttagctgatcctaaagcaaaccgaaagagtggaagccataacaacaacacaaattcaggcaaacatagtaaaaaaacaaaggaggtgacgataccttcgtcacaatgtggtgttatttctcaaaaaaggaattcttctccagaattgtttcttccaaaggaatggacttattaaaaaaattgctttagcttccaaaaagtgaagattatgatttttaaaccataaataatccccatttattattatttttttaaaaaaaggctaaaagctctgattcaatagtttgtttgtgctgttatttatgtcctatcatgtattttgatttaaataaataatagcagccaaaaatttctgctttcatttcactttctatgacaatatggttttattatatatactgtcgtttatacatggatgtataatgtataaaaaccatcgtatatccttgcaaataaataattaaatctattgtattctttacgaacagccactcaaattacatgaactttttataagcaatgatgtacatacagtaacatattgcacttttgcttccaagaagaaagggaattctataacggtacataagttctacattgcataccaatgttataaaatttcactattattttttttttcttagtaatcatttatgttatagagtgtccagatctaaatttcatttcatcatttcataaagtacctaatccaatccaaattataatatgccggtatctatataatccgtgcttaattacaagaatacataattgatcaaaccattctatcatgatactttagtttccttgggacaaaggcaaggacccactcattcaaccaatatttgtttaagttcttatttttcttttagaaatgagcgacgacagcctcaggatccggcatgaaagttaggcaaggttcaaacttgtttgatttttcaacacatgaagactccgtctttgaagcgttttgcacaatgcttacaagtcacaagagtcaacagggcatctcttgtggctttcacaacctccttcttggcttggtcctggaactcacgtagctccttaagctccactgacatatttgtcgcgatttgaatgttagctttatgcaagtccttaagggtcttgagcttggacgccagtccttgtacctcttctcagacattcaacaaatctgtctctgcctaggtcagcttggcttgggtagaggaaatgatttcatctttggcctttaaagtctcctggtcctgctccctgagagctctctctacagtgtgtcattctgaagagtctccatttggcttttagcttccctgagcttctttaacaccccatccatgccagcctgcttcgagacaataaatccttgatcgatcaaagtcttggaaaggcagcctggttctgcagcaatctggtaataacaaataataatagggattagtaaggctacgaaagtaagcaaaaaactcaaagagtgttaaagtataaaatcacggaggtaagggccacacgcatgtcttgaattttgtagactgaattggaagaagcagagaccgtgaaccttatacgggaagctaagttaggtcagtaacaaaataactcaccatctttgaggtgaagtgtaacgccctaaataattaggcacgctacccaaaatgattatgaaaccctaatcccctaaccgggattactaattaaaaatagcgcagaatttaaac

SEQ ID NO: 381009 - DNA, 2844 bp, Cannabis indica
gtgctgcactcttcatgtaagtacaaaattcctctagcaactcccatagctatttcgattctttggttccaacttggtctcatgtcaccaaaaagaaaccccgctagagctccattgctcatgaactcataaaccaatagtctttgctctccctcttcacaaaatccaaccaatctaacaagattcttatgatgtgtatgaccgatcacattcacttcagctttgaactccttttcgctgtcttgaaaagctcgatcgagcttcttaactgcaacttgctcattagtgtctttcaaagttcctctatagacaatgccaaaagagcctcttcctagctcttccttgaactcatctgttgcgtcgatgagatctttgtaagtgaaacaccttaagttgagacgagaaacttctttgtcatcttgagacctaataacccttttcttgtaaatgaaaaagaatcccatactaattcccccaaccaacaaaaagttaacaaacaaagaagtacctaagaggaccgagcctacaattatcaaaacatttcggttccttgtcattgaagaagaagaaggattctcaagaggaaaatcagatttcctaactttaatgaaagcccttgcctcaatattgtcatccactctcccatttgtcaaaggtagcttctttttccaacaagtattgttcctaaaaatagcaaccgcgcacatacaatcattcaaacatgtctctttacatttctctgtatcataaggttgaagcacctcataatcaccagttggccaatcaatatctttaatctcttgaaatgtgtaaacactctcaactaaactctttgaatcctcttcacaactttgaagaaaattcggtttacaacctctatactcatcattaacatcaagtaaagaaaaccctcttggacattcacaaactggtctcttatcaacattcaatctacaaattctgttataaccacaagccccactacttccaaacacaaaactctgtacacaaatattatctggtatagaccaaacaacagaccaactatttcccttagtgggattctttggataactataaacaccaaaaacaccatcaaaattaagagtagccctataaaaataatctgaactagaaccattctctccactactcaacataaaaatctcattgttctcactcaacacatacaaactacctaattcattaaacactaactgcttacctgtattattagtactccttgtgtagtaattatcattagtaaattcagatggtaagtttatactattaagaacaaagttaccatctttccccaaagaaagttgaaaccttcctttagaaaagttagtacttaatgatgcccttgaagaaaccacatctcctttttccaatacttgagttggtaacaaagtatcagttgggtgactaaaactttcccaaatcttctcagagtttttattgacaagaacaaagttaccactatcattaaaaagagccatatttacctgacttataatggggttagaattccaaagctcttgattttgagggtcagttagtaataggcctctgtctgtagtgagctctagtttggacccttttggggttggattgttgggagtgtcagcataccatacaactgttttttcgggtaatttgttgaaccatatggctagcaagaacagatctttgttgttgttgggaagttgttgaaatccaaaggcaaagtcacctgaagaagaaagccatgatgagaagagtttgtcaccagatttgagagttgcaccaatattgatagtgccattaatattgttttgagccatagctaaagaacatgaaggaattgaaaaggttattatgatgaggtagtgaagaaaggaaaacatttttgaagattttagttacttggaatttgatacattgttataattagttatatcaaaatgtatatatagtggtggattcagagtttaaatttgtgagcgtatcttttcttataatttattaaaaattgatataaatttatatttttatagtattaaatgttacaatatgtatttagcattcttattatttgtataaatctttagtcaatatttgttacattattttaacaatcatttagctaatttgtagcctaattttatgcttgtaccttgtatatattactctgattggtaatgcaatactcatcgaatgaattttcttcatggtatcagcaaatggcttcaataattaatacaagtcttatcgataaaggtaatatatatatatatacatatatatgtttttatagagattttttaactcataacttctattatattggtaagataacttaacaattatactaaaatttttataaatatcatttctaattataaatatatgttataattaagaaaggtagatgaatttggccctatttacatatgtattttatataaatattgtctgcaatatttgacttgtttttggcttatattattgttttgactatatgtggcaaagtatagaaggaaagtggtaatgtttaatagtggaaaaatgaaaaggattggtttatgacttgaaagagtggttgttgttgttgtattctatttgtatttgattgctttttcttgtgaaacatgttattacattttgaccttatcaaaaaatatgactttgcctaacaaaacacatgtactatacttgtttagaactaaccataatgaaaagaccacgtatggttgaaatgaaattagatgtatttgggattaataaaagaaattgttattaaatatcactcacacattttatatgtatcgtctatcttacaattagttaataatatttttt

SEQ ID NO: 381010 - DNA, 1606 bp, Cannabis indica
tatatatatatatgtcaaatataatagttgactactgtgtaaaatcacaaggaatttcagccaatatacgatcatcatcatagtattcatcatggcgagaaacaagggcgacttttggcaaactcaaaagaaaaaaaaggatggaaaactcgtgaggattgatgatggtggtggtgcatcaatggacggtatttgtgacgatttacttttggaaatcctattacgactctctgatcagcggttggcaatccaatgcagcgtcgtctgcaaacgctggcgtatgctgatttggagtccccaatttgttggcgccttcaaaggaaaaaggcccacaacgcttgtgatgcaggtgggggaatgcatgaggatcatgctttgcggaagaaagtattgtcgtcctactgataatgttgtttaccaaaaacaactctcctcctttactagttatttgaatttcattcctgaggatggattaatgaatataaaagcctgtttcaacgatttgctgcttgtggaaagatttagagatgaacgcagaaaattatatatctgcaacccatttactcgacaatggttccttcttcctaatcttaatctcaatcccgtatcttattatggcgaaaagtttggattgtcgtgcgaggaggtgccagacagtggtaataaattattattcaaatacagggtttcgattgtttatgatcatatcaaggtggccaattttcgttggaaaactagaaaatggagcatatcatatattggagaagggctttctccgttagatggtaccgacaaccttgtttccttgaacgggaatttttactgtattatgaattgttccaaaaccaaaaccattattgtcgttgtctttgatcctggtcgtaacaaatttgttgggcgtatcgaactccccaaaagtgaccgatttccaccctacgtgagtacaccacctttagacctatcgtaccccaaattttcgctgggagtgagtgagggtcgtctacggttggctatggtaagaccagcaaatccagaaaaggaggaagaggaggagcaaaactacatgtggaaggtttgggaaaacaataatgggtcatggagtttagtgtacaacagggcttgcttccctacatggcaagacaaaccgcagataatttacccagataagatttggtttcatccggagaatggtgaagttatgttctccatctcagaaatatttcaacgtgtcctttgtcacaacatgagagaaggaacggtagaagaaatattggaaatactcaaaagatatgatattgttaattttcgtggacgaagtgataatcagataacctcaatacaagtcaccttatctgcaactggattacctcctttccctttccaccttactcgtctcatcccccaactccagctcctaattaacctttccttagtatcataattactgtttaatattggttcatgtttatgtttttttgataaataattgtttagcttagtttctatcaacattgggtgagtgatgttgtcatttttatttttaaattgcaagacatgactgttaggttatttttagtattaattttagattaagtttagtatattt

SEQ ID NO: 381011 - DNA, 5245 bp, Cannabis indica
tgtataacctctaatccaattggtttaacacagttacaaggatattgaagatccagcagtaaaggttttgcataactacagtggtgaattcataaatgtaaattaaattcaagcttggttaaaaattaagatgatgctcaaagcctcaaacatctaaaagtgatacagaaatgttattcttgttaagtacttgtttcctttggatgtcagaataatctttcttcttattcaacaatggaatggttcagaatcaataagagatatatatagctcaattagaacaaagaactacccggatctaattctcttctgactagtttttccatctgatttataagtaccagccgattcgccttcggatgaagcatccaccgacttggtgaaagaagttgagagatcagcatagagatctaccacccttctgatgttgttgttaagttctctgattagtcccacattccggttcaagttgtctggtatctttgactcatggttctggttaatctcactaattagcaaccggttctggtccaaaatgtcctgaacttgaacaaagttcttctgaaatgtctgcaaaaccttcccatctacttgggtcccgtttcctatcgcctctatagactaccaccctccatttcaatgtactttcaatcagaagcactctttaacctgtgtatcagaaacaccttaaaattatgaaaaaaaatataaccatatatgaaaaagctttaccaaggctgaaaactaaatatacccatctatttctctatccctaactttaccaaagaatatgaagatgtaacatggagaaacaaaacaatacccaattagggaaaaaaatatgtgtgagaaaagaagattttaccaacactttcatatgcacaaggaattatacctttatactcaattcttgtatattttatcaaaataggggtaacttttttctattatctttctcttttattttcttttcctttcctttacccgtattctcagcaaccaaacaatagggtgtgcaccagagacaatgtacaaggaggaaaaaagaagattaagggtactgctatgacgtcaaagcagactccttttggcttttaccttgaaaagaggacctttagtttgggttgggttctcagaatttgcaactccagaatttgaatttgagagtaaaaggaatctcaacaacgggagttgcctcgcgtcgcctctaaaaccaggtcaaagcccaaaacaaaaccctattttgtggcagaagatttgattttgactagagggaaggaaatgttaaaagaaggaaaatattttattttattttgttttcacactcaaacaagaaataaagcaaaaattaagaataaagatgacagatttttgatagttaagatacatatacagttacaattatggaacaaataaatacagaacacagtgcatcgaggtagaaacaatcaaactaatttaatataaattactcagcatttgggtttgtcttaccttgaatatacagaacatggtgggaggaagagtcaaaagcaattatgaagagaattttctcaggaaaaacatgaatttttctcgagaaagtatgggaagtagagatataaaagaagaaaaagggaatctaaaaatatgtttctgggtgggactgagaggcccagaaatcatgaaggacagatggagcagagagaagaagaaagagagagagagagtgtgtaagatttgattgacagcggagacaacactctttcctctttctctttctatttgtatgtgtatactgtatttttctctctctatctctctatatatatatttgtttgttacccaagtgtaggccgtgtagttgtcctcgtttacttcgcctactattactactacctacaaactttttgatttcataataattaaaacaccattcatactacacaataataataaaaaaaaagaacagcattgatacggggcaccatcaaaattcctattgagagttgataatcttgataatactttaatgttagttagccacattctttaaagttttttttttttttaagttatataaaatttactacttaatcgtactactaatagttatattatactaaagaggatgttagacatcaataactttgtttaataatttctaatttatattgagctgagatatttatgatacttagtactacaataaagtgtcgccacgtaacttgttagtgattttgtataatatttattaaagtaaaataagtaggacctgagttacatcaataataatattacacttcacaagagtcttaagcactataagtaccttttagtatttcttattcgtataattatattagagtatctcttaccgttctatttaaatatactttttagctacaatattgagtggctcctgcttttttactgaatttttctaatagtttttaataaaaatattattactttttattattttataaaattaatttatatttaataaatttaaattataaaatattattagcataatcaaatactaactatatataataaaacgtatggttggagcaactataataacaatagttttattttaattttttaattaaaaataaataaatagtaccattgaaaatgctcacacctttttttctctttagccatgaaataactttcattaaaaaagaatcataatctcatacaacttcgagtatcaagaaattaatcttatcaaactatataagttctctatctactcaaagagaatatcaagctaatctatgtgtaatctcattagtcgttcgacgtacatgaattaaggacacatcaaaaaattagacatcaaacttgctaaatcctctaacaaatgaccaaattcattaaggaaggaagagcgcttagaaaacagattgacaaccactaaacaatcagactcaattacaaaatgtaaaaaaagatcaacaataagaactcaatccaatactaccaataaaactacacattctgcctaaataactaactcgtatataatataatttatactatattctttgagtactcacatgtttattatagaatattcaaactcacacaaatttgatgttgtctaaattcttccaacaacactcttttcttttttttttaattgaaaaaaataaagtaaataaagttatacaatttataactaaaacaaacaatatatttataatagcattctcaaaaagtgttatactatatgaaagtgtttttaaaagtaagaatataaaaaatttagaaaaaacatatatatttttaaatgaaattgaggattttaaacctttaaataatgctactatatattaaagatactcttaaacattttttcttaccattcttactcactccaataaacattcatttaaaaatatctctgtatcatcaaatagtgtttatagcaactcttaaggaaaatttgattaattatgcatttagtgggattgatggtccttataattttaacttttattgtgacacgatgggctcaacgtagggtctgataggttcaatattgtcttgttgatattggacctatcaggctccatatcagacccatcgtttcacaataaaaattattatcggactatctcctttaaccttaaatccctctaatattaacctaccattgagcctacatcgaacctacattgggccaagcaaaaatcgtaatttcctccccccctcaaaaaaaaaaacaaatccaaatctaaaaatctcaaaaatcacatattctctactaaaaatacagatctaaccctaaatctaattgttttaaacctaaatcataaaaaaataaaacaattacagttaaaactttataaaaaaatgagagattatctttgacaaaaatattgtcggcattgggtggtgtggtcgcggtggtctatggatcgtgtggtcgcgaggttgaggttgtccgatcgtgtgctcttccgtgtgcatgtttacaagagagagagagggctgttcaaataagagcagtagaatatgattttaagaaataataacctattctactaatattgaggagcttaaattaaagagaacaattttgacttaataaatagataattagtgaaatttcccactcttaattcattgtctactgtcttattgggaaagtgccatacgaaatacagtatacgaagtacagtataccattaattaaattaaccgcgacatttgttggttgtcatttcaccaacggatatcatatcatatatcatatcccacttatttgtttacttatttatttatctcttctttgttttttttttcgtaagaatcacaacttggcacttcacttgggttgggagggaccacctagtaaataaattggtaaattgtacgagaattgctagggagcatctctcgtatacaatatgatatatagtattcatatattgttattggttattcattaataatttaataacttaataaaatacttatgtcatactttgtgttcttactaaaaacaagtttgatagtactttaaaaatgctatagggtaccaatatttaacacttatattatttctaaaaaaaaggcaccctatattatattattattaataattagtgtaattcaatatctcatttattttaatagtgactatagaaaaccgctaaccattttatattggttaaataacgatataaatacctaaagttttaagtttataactataataaacttaatattaataaaattgtaacttttatctagtttcgtcagtagagatttcattactattttaagtttaaacatgacacatataaactttaaattttaagtcattaggtttgaaacatatagtattaattatttttaaatattattttaataaatttaaaagaaagtttatattgattaaactgaacaaaaagttaaaattttattaacattgagtacttatattgttaaaaaataatttatattttaaaataacaattacaaatacaaaattttgtgtatttatactacgatttaccttttttttattttaaaattttatatatttaatagtctaaactcaaatttaattaataagcttttatgtaattaaattttatataattaaaaacaaaattaaaattcatagtaattaaagataatttgatcatattgatattgtaacttaaataaatatgtaaatgtattatattgtattgtattatattaatacaatagtatgtttgatattctttcaaaaaaaaaa

SEQ ID NO: 381012 - DNA, 1762 bp, Cannabis indica
catactgctgaaacaaaagtgcctcgtcctccgcctgtaaagcaaaaccatttcgaaaatattattatcagaatatttctaaaaaccttttatttcaagcaaaaaacagacagctgaacctgcaactttcgagccaattcctcatcggatttaaggaaatcagtttcatttccagtacttgattctccattctcttcttctttgtgatcctcaattatcgaaaccaatcggagtttctccgaaacggtaacgagatcggaatcgttggagaccatgtgatcatcatcaattccgataatctattcaatcacataacatcaatttcacctactgtacacatacgaatttgacaagagcagataaaaaagatgagatagcaaattggaattggagaccttttggtcttcaggtgggagaagagtgagggagtaaagctggaatttgaaaacctgcaaacacttccatattagagagagagagagagaagagaaattaagtgagagaaattgaaaagacctacttcaaagccgtcgtcagtgtcgtagtcgacagcgaagtctgagctattgtggcgaactagaaacttccgctccaccattttttgtgtatctgctctgtatataattaagtcaccatttatataacttataaatgtatttttatttaggataaataaaggtattacctaaaattttagatttatatataaatttaatgtttatttttagcgacataagtaataagtaaaattataattttttccaatttagttacttctaactctgtttagaatttattaaaaaaatatttaggcgtaactgatagtatatgtttatgtctaaacccaataaactaaaaattagttcttatatatgtcatgtttaagacaataatagagtctgtatgacaaaattaaaaaaaaaaattacttgtgcgtcactgtctcggcctaaatggggttcctcacctcctcatggcatttgagaccaaggaggcgtctccttggtacctcctcaccttggacaaaaaatgaaagtctcctcaccaatctccttgtaacgccctcaccttggactaaaaaggaaagtctcatcaccactctccttggtacctcctcaccttggactaaggaggcaaatcctcacacctccatcatctcggaccaaatgggggtcctcacctcctcatgtcgtctcggctcaaagggggcctcatgcttccatcatctcagcccaatagaggggcctcacctcgacacatgtctctcacgactcaccaacattacttgaaagacacattcatcttttatcattttttagatatttattttgaaatgtgacttttgtattttaaacctaacccgaccatagttataggaaggtgctcctgtgattaagagattgtaaatcatagatgaaaacttatataaggggagtggagtcacttgtaaagggacctcaattttgattctcacgaaatcattctcttgtgctctcattctctcgttctaaaaactcacttgaggattgaactcatggagaacataactctggagaattatccttgaacattaagatcaatttcactctaagtggactagcctattaccatcgaaagggggtgaaccactataaaatctccgtgttcatctttgtcaaattttatttcacaaaccggtttactttgataactagtatatttatttttaacccaaaaacttttcctggtgacatggacatcaatgtttgacatgtggcatgaa

SEQ ID NO: 381013 - DNA, 1636 bp, Cannabis indica
aaataaacaaaatcctatataaaatcagattttccaaaaataatgattggctaagaagtaagaagctcaacaatcaacatcattgacaaaaacattttttttctttcaaaaacatgaaacatacatttaacatcattctctcaatcatccataagtatcaatttaaagcccattttaaattataaagcccgttaagatagcttaacgagaaagagagtccaaaaatgaatggactcactccagtttgggctgggcccatagttaaggatatgatacaattgtcaattttcattaggcaaatcttcttcttcttttttctagaaggggaaaaagttccattatttaaactggtccaaaactccaagtgttattattattgtgatatataattacaacgtagtggaatattattggctgcatgggaatcaaaatgagcataatttttttagtttagaattaaagggataaattcaaaagtgggttggggaaagtgaatgaatatttagagaaactaaaggagagactttggaaatgtaagtatgcagttgcagtagtagtgtagtagtatagtagtaattaataatagtaagtagaagagtactaaataatagtggaagtatgactatatatatatatagataaaccttttctctaagtttttgtaagtagtgtcataggtttgtttctctcgatcttggatattatttcaaagcacatgtacagacctgaggtgagcctgtaatttccatgtgggtggctcatccatctaaatataccatcatcagtttgatcatcatcatacatctaaattaatcaacaattcactttgtgtggattgtgatcatcatcatctttatctccaaatcatatgaacgatctttatcattagtttcattgtacattatctttttcaaatacaaatgtatcataatttttattttatatgtttttttttcgagagaataaattagttcattacagatgtagaacatcaagagaaacaaacttatttgaacaccacgtatatatacatctaaatactacttacttggtgagctgtcttaactttgattaaatattttgcatgaccaaaattcagaaacatatacacaaatttaagacactaaattgcacagcagaaaaccaaaaccaaatcaagatgtggcgaagaaaagtattataagcggcacttttggaaaatagtaaaaagcatcacaagaaattacactaaagaattgtgtaaataatttttttttacacaaaatggcctaaattataaatatttatgttgacttttaaaaacaaaaaaaaaaagggaaatttcacttttaattttttttggaaaagtttacaaaagtatggttttattttataaattaaaaaatatatatggaaaaagaaaaacaaagtgaaaatatgtgggaaaatagtttaggacaaggacatctctaatcataagctctaaattctcttttctttattttaaagtaaaaaattaacaaaaccatctctaatagacagttatcttgaccttcaattaaagaattactcttcacgttctttgggattgcagcgatctctacttcagtgtaagaagttgtgagttttctttcgggagatcctggtgttcattgtg

SEQ ID NO: 381014 - DNA, 723 bp, Cannabis indica
cagagcttcaactacatgtggttcatgaataccatctttgctaccacactttgcttctaaaaccacaccattagaatcacgagccacacaaccataaccaaactgcctactctcaacaaacacaactccatcaacattaactttgattttaaaatcagtcgatttcgtccaatgctcaaccgcaacccggcgaaactcaaggttggtaactgtggacattatttgagcattaatccactctttaaagtttagtttagctaatagaaccacatctatagtactcggcagtttttcattccacaccagctgattccaatgatgccaaatcgaccaacaggtcatggctgccttaatagcttcacctaaactccatctacttaacccatcttcaaaccaacccgaaaacaacatagcagcagcacctactattgcaacccaagtacttctccaacagttttgagtaaagaggcatctaaccagtatgttaagaattgtttcaagtgcacctttacaaacaggacagctaggatcaatattcacatgtctccccattaatagaaagcaagttgggagattattagatcatgctctccatagaaattttagtacttttagaggtaatttcaagtttcacgattgcctccaaaagcctaatcaatgccgcaccagttacctttcaacttttgaagcatattacatgttgttttgagagagaatatgaca

SEQ ID NO: 381015 - DNA, 1628 bp, Cannabis indica
aaaaaaaaaaaaaaaaaaaataaaactttaacaaaaaatataaaaaaaaaaaaagacctatatatacatatttatattttaaaatccaacatacttttcaagtgttggttagggtctatgatagggagcaatatataagagggaccccggacgataatggttgccacattgagtccagaaaatgatttcagtggacattgattgcaatggttttcccctttaattattagaaaagcttgttctcattttcatattctatatacatatatatgatgttttagtttcaattgtttccattagtatataggatttcttgattgatatatattgatcttattgtgtcaagttagtgttgacacgtctataataacatataattaagaaaaacacaaacacaattttattaaatagatatatgtaagaatattgaaatacgaagacgacatgattaattaacaggtcatcacgacatgatacgacaaaacacaacaacacgatcataaagattaacatgaatttttctaaaacaatattatgaagcttatgattatttaattcttgttattatgtcaatatatacaattacaattatcgtatcaacaattcaaacgcacacacgatacaattattaaaaatatcatccaaacatatttatatcatcatttcgagtcgtattatcacatcgtagcccattaattaagtcgaaacaaagtacacatataatacaccaacaaaaatacttattaaataattattaattttgggtgtgttttgtaaaaaaaagtttgaattttataaaccacaaaagtaaaaatacattttagttttaaatttttttgttcttaaaaaaatgtatatacaacggtttttgttttttatttaagttaggagagacacattaaattgagaaaaaagtgaggtgagagaaagagaatacaaaataaagcattagttacaaaaattgtttaaataaactttaaaaataacaaggtgtttaaattctcaaaattttggattttcctttttaataaaaataaaatatacaaaatatgttttttgaaaatatttgtaatgaaataaaactatttaaataaacaaaggacaatttatgttacattttaaccatctactttttcttctatgtaaacaactattatatatacgattccatcaaaatgccaaaacagctaattttagcaattataatataccatctcaagtattgtttttcgctttttcatatgcttctacacgtaaagacatttttagttaaatatattaattagagctttggtacttattaattaattattatacatgctaaatatgctggtcaaatattctcacatgaccccatgttcttaacccttaatcataagttgtgacgaagccaaagccaacttccaaataacaaaaataagtagtacttaattggtatcaaacaaatataagtaaaaaaaaaaaaacgaaatattgaataatcagttgggattacagattggaaatctattatgatactaaggataattacagatagaaaatcatgtgcagtgtagttagttatgggcggcaacgagatgataacaaaaaattagtaataaatcttatatatatatatagaaaatttc

SEQ ID NO: 381016 - DNA, 1193 bp, Cannabis indica
aaaaaaaaaatcaaacactgagaaagtaagactccgaaatccgaaaattcatagattttgacattttggcttttaaatgagaaaactaaactaataggaaaaggaagagagggagaaagagatgcatacccagtggggaggttatcgacatagctgataagcatcttaagcttactgccaccttcagatgccagaccggcgtgcatctcaacggtcatagcatcggccacctgtctgagcttcccaattggagtcgaacaattgtcatcaaactccttcactatagccaaagcccgagcccacttgccagagcttatcatcctgtggcgcaccaccagcgccgccgcagcgcaaactgtcgccgcacccaccaccgctgcccccaccgccaccttccccatcaccaccacagatcagtcactcagatgaggaagaagcttgctctttctctctccttctcccccaaacagataaaatcgccgatcggatttttattcgatgggtcaataagaaattacacacttgtcacatgcatgcgtttttctacagatttgaagataaaaaagagaaaatttggacgagaaaaaaattaggggagcaagtgttttggaatgagctgttttatcggacagaaaaagtaaagaacacgagaatgaaatgctataattttctacaccctgcgtggccctgtaaatctattctcatcctctttttatcaattatttcctttcctaattttctcgcgctttctcgggaaaatttacgttaatttaaaaccaaaacaactaattagaataatgattctaattggatatgttttaagtgagagggattttttctttgggaataataactttttcgattaagtaattttggataagtaatttaagtggtatatataggaatctatttagggttaaatgacgaaaatagccctggtggatgttgactactcctagttgtattaggacaaacattgggtattagttttatttaagttgttgtaaaaaaagaattgggggcacgtgtgagtgtgaggagtttggctgaatttgatgttaaaagtttggatttggaatctctctcttccttttcggcattcgcttatattctacccaaacccccaaagcgccgctcctaacgtagtttccacttttcgcggcttgacctttttctttcttttcttttttcaa

SEQ ID NO: 381017 - DNA, 2238 bp, Cannabis indica
atggtttacttcaaactattgttatggttatgtaactttactaactagattgaaatgaaatttggatgggatatctaaaaaaaaaactttgtaagtggaaaaatgatagaggaacagcattgaggtgtcaccatgtttgacaattttttgttctactttaaatgtaggcttttctcagagtacctgggaatggagactatgttggcaattgtctgtaagacaactgaaggtgtcaaagctctagaagtatataataatgaaggctgcatcgataaaaattctggtcttcatgggctcggtgcttctattgggagggctttggaaggacgatttgttgttatttgtcttgaaaatttaaggcacgagtcttaagcattgcctttgatgaggaaatcttgactagtattaattatttcttttatcatttttgcttcttattcaaacatttctttgttttctatttccacagaccatatgctggtgagtttatacttgatgaccctcaaaggaggcttgaccttctaaagccaagattgcctaatggagagtgtccacctggcttccttggatttgctgtaaatatgataaatgtggataccacaaacttatattatattacagccagtggtcatggccttcgggagactctattttatagtcttttctctcgtttgcaagtatataaaaccagggtggacatgctaaatgcactcccctgtataagtgatggagccctttctttagatggaggaataatcaaagccactggtgtcttctctcttggaaaccggtaagaacttctgtcaatggcactgaaatgaaataatcatgcgcgtgttttgttgaatctcagtatgactggatctcttcaaacctgtacttgataaaatttcaagtttcacttcctgagtgaatgttagtctttgttttataaataaaaacagcctttgctgcctcctcattttccataaccaatttgcatgttgctatcattatcatgattttatagccatggtttgcttcataacccattttgatgcaggcaagatgtaaatgtgagattccctaagtcatcggtggccttgagcctacccgatagctatcttggagccgagaggcaaatcaaggagttgaaatggcagaaggaaaagatggcagaagatattaagagagaacagactttactagacaattcaaagctcaaattcgatagaaagaagcaagagtttcttaagttcctcgctgaaagttcatcatacgcgtctcaggtaactcatattctttttcctctcgctattaactcttattttccaagacaatttgatgccattcaaaaccaaaagacataaagccgtgcactttattacttgatgaaattcaaccatagtgtttaatggtgagcttttttcttttgataaatggcagcaccagataaattcaacacaaagtagaatgacccccagatgaatcagtgtacctggaagaataaatatagaagaaatgaaagtttttctagtaacaaactgagtaagtttcaggataagatcctctctctctcccttttggaaagtttgtgaaagtagaccagttatgatgatggtgataaattaggggagagtggattttgtccaatgaagttagactgtgttttttttttcttcctcagtttagattctaatgtagtggtaggcttttgcttctgcttcactccaatgcaaggtagtgattggtgtggataaattcttttgtattataacattttctttatccaccaaaaccacaatttctattgaatacaaacacaaccagcatcacatcttccctcctcccttgttattactttattttttgcttttggaacccataaaaattaaatggggaaatgaaatttcattaagtgacaagtcacatttggctcgatgtagaagttgtgttgttgcaaatgggaacaatatttctcctccaacaatattccatgaacaagtcaaacatctcatagaccttaattggtgtttggttgcaggtaatgaaatggaatagaatggaaaaaaaataattttcattccattactttgtttggttacatttaaaaccattggaataccattatgatggaatggcttttccatcattttggtggaatgactattccattttaaaatggaaagaaagaccattccaatgcaagatttgaaaaaaataataatttttttaatcaattttgtatgcattctaaat

SEQ ID NO: 381018 - DNA, 5110 bp, Cannabis indica
ataattaaataattatgcctaaaaatatagttgactgataataataaaataataaaataaataaaatgtccatagtatatagataattgaactggaaagaaatgttgaaaagtagatagaaataactacaccaattagcttatggatcttgtcgtaccataattcaacacgtttttgttttcctatacttttccacatatttctttccaagcatagggttgatagataatatgaatgcaattacgatgaaaaataagcaaaaaaaataaaagaaacaatgagcaagttcattggcagctcattatcttgcctaatgctctgtttttcccattttctatatttctctgctttattgttcttaactttcctctccattgtaagaaactgttagaagaagtataccttatttgtgcgaagtactaattctagaaaagctagaagctcattaaaaaaaggagagaatgaaaagatataagttggaaatcagcaaactgatacactgaacatgttacatacaaataggatgaatgatttcaatttctcttaggctggggttccccttcttcttcttcatctccattgtcagagaaaatggcagttccagtgggttcgtaagcttggcggggtctcttactcttactactttctcccactgttagctttctaacatcttcatccataacaattgttgaatcttgatcttgagcatatattagacagactccacactttttgacgtagcaagactccacaggatcactgaaaagatccacggggttgaactcaaatgagacttcggtcgcattccgcaaattagtacaccagttttctctttcgtctcctttcaaaacattgagattgaaactatggtcataccacaagaacaagtgatctgcatccactaatctaacaacagtgaatgagtcccaaccctcgtttcctacccaacctatcaacttggtgtcaaatttgtagctctcaccactgcttgttgtgaattcggactgagtttgaaaatccaagctactgtaatccttgtagttgttaaatgcaacaacaacacatagagtgaaacccaagaagttggttctaaaccattgtgaaggaagcttgatacttatggaagaaccttcagattggtagttaaaccagctgggaatcttatttcccggacaacaaacgaaaagttgagactgttcctaagtcatgagaacaatgacattgtttatcaagtaagctttaaatgacctatttgagtaattttatgttaacaaagttaaaagggagacttacatcttcatcagcaggtgttggcctcaatgatgctgctgcagttgccatgcgccaaactctaagctgtgcgtattccataaggttgtcgcgtgcattctcatccaaatttaggcaattcataaaagagaccatttcaatatcaggcttataatcttcataacaagcttgtgtgagaggcataattcttttcggtgctgtcttaagccttctgcagtttcccaaatctagtatttggagatttgacagaccctcaatttgtgaaggtacttgttctatagcagttccactcaaatttagatatcttatttccatgggaagatctggaaagttgtcaagagaagagcaaccgtacaggttaagatgatccagggacttcagtttatgcatgctgctggagagcttcttaaggcctttacagtttctaagaatcaatgagaaaagtttgtcaagagacccgattgaggaaggcaattcttctatgccagtgccctctaagtctaagtactgaattctttgtggtatggctttgagatttttcaagtttgaattaccgctgagattgagaactgttagcttgtcaaagtactcaagatatgaaggaacttgcagcaaatttctatggcctccaagattcatactctcaaggtgtggagcttgggagagatctgggaattgagtcaaattctcagagttactcagatcaatctttcttaacttgtcgaggtactgtaaaaaacaatatagaagttatgaatcatgattttatctaatgctgatagacatttttaatccaaccagaacatacctgattttcgctccaaagttgctcgatttggctgtgaggcatttcaagtacaacaagattttctggattaaaattggatggtaaagattttaaagggtatccataccaatgaagataacgaagagcatcagggagacactgaagacctctagtgaaatgcaatttgcacaccttgatcaaattgttagaattgtaaattttgagcagtcttaaattgtacatgttaacaaatacttcaggattcaagtctacatctctcatcttagacatatcaaggaatatgccctcaattgttgcagttccctgaaaacattaccaaaaagtacagattatgagctgtatgcatagatattcaaatttttattggaaaggattttcctatagagaatttagcagtcttacagtatttgttttcaacactcgacaaacatcgtcagcaatccacaatctactacgctttccaaggtccttagattcttggcgaacaatttcccaacccatttcttgtagcaaatcatgcatccaaactctgttctctatgatagttataagggacttgttgatgaggtctgttattcctatatcagcaaataaatcacaaccatctagtatattttctactaaacttctatcttcacccttaaagaaacacactatatccagaaatatatccttttctttctcatctaatccatcatagcttatcctcaaaacactatgaattttcatattgggcatttttttcaatttattcaaggcactttcccattcttttttgcttcttgaatgtaggtaagaacccaaaactttaagagccaatggaacccctttagtataatcaaccaccctttcagacaactctatataatcagttgaaggaggaaagctattcttgaaagcattcaattgaaagagttgaagagcttcatcaaaatctagctccttaacctcataaacttcattagctccttttctaagcacttgaatatctcttgttgttacaatgattctacttccaagaccaaaccaattatcatggtctccaaccaaaagttccaattgttctgaatcatttacatcatcaagaacaataagcactttttttcgtcgaagcctactcctggcaaaagttgatcccgcaaccatgttgcttgcacttgaagtttcttcctctaacaaagtcgacaacagtttagtccttaagtgatttagtccatgtttctgtgcttcttctctaacatttggaagaaaacaaccaccttcgaattgagagatgagtcttgtgaatatgacactagctagagttgtcttgcctataccacctattccccatatccctaccactcggatatcatatgactctatggttaacaatgacattacttgttcataacgtttactaattccaaccaaacccttggcatcatcatcacttgatgaagatgatacatatacactgttcaatttgtttataatgtcttcaacaattgcttcaactagtttggactcaggccttgcatagatgcatgtaagcaaatatcaataccatagagtgataaaataaaagctattaatcacaatgaaaacaaaaaaataatgaaagatatattttggctgattttggaagaaaatagaataacaatattaacaccattataatgattactttctaattagatttggacggtaataaaacataaagaatgaatgagtttattatttgtcaatagcaaagtagaagaaaacaagttagttgagagttggatatgcaaatataaaatcaccccaagttttaaaaatattacctagtgttaagtgaatcccatccagacaaattggcagctgattccaaagcatccctccactctttgactttatcaatgtgaaatctttgttgaagttgagcaaaggcaacttcatagctgcccttctgttttctgacatgggatggatcaatgccatgaaaaacagggacaacaagctgtccatttctgtgtttgcatttgagtatgtgaacaagttcatctaagcaccatgaagaagaagcatagttttgagagaatataacaagtgaaagctttgagtcctctattgctttgagaagagctggtgagatctcatggcctctctcaagtttgtaatctatgtaggtttcaacattttttcggcataaggctgagtagacatgactggtaaagctgtctcgagtatccacacctctgaaacttatgaacacatcgtatttatttactgcttgatcatcatcaacaacaacaattgaagaggaagaagaagccattgatgatatgttcatagaaatatcaatatgtatatctacatttttacatatctatacacaataatagaatcaaaactatggttgcatttcagcctcaaataaagtcaatgttttgtatacatgtgaacatgatcatttgagactactaatttggacatattccataaatataaatatgaatataaatttgcatatatgtacattattatttttagctggaaatatatatttctagagtgttgttgttgtcggcactagctataaggcgtgtaatatatgtctcaattattttactattctttttatttttactttcgctcggtgttgtccagctttaataatatttaatatatatatatatatatatattgtacttatactgagtgatataatttaaaatataacattttgatgtgtgttattataaataaagtaatagtattgaaatcagaaacataatttgctatttttaaaatatatagaaaagtggtgattttgtgataaatattaaaaatggtaaaattaacaaaaaaaaaaagtacatgtatttttatacataataatattatatatgttctacaaaaattaataatttaaaattaaaatatatattttcttatttattaagaaactttaagaatttttttttaattaatatttgacaaagattgaaaaatgcgaaaatatatgttgcattaattttaaaaaaaaaa

SEQ ID NO: 381019 - DNA, 2464 bp, Cannabis indica
caataaaagcgaatgagtataaaaactcattatatactagtgacgttgctatctaataagttctacctactattggatttgaaccaatgactcccgccgtatgaaagcaatactctctaaccactgagttaagtaggtcttttatcctaatttactgaaataatattgtaagtataacgaacatcgcaataaaaaattaaaaaatatatttttgacatatattttcaaaaataaaaattaattaaaaaattataataaaaaattttaaataaatattttgcaatatttttttttagtaaaacacaaaatattaaatgagagtgggggtggatagatggacaaagtgtacagaggaaaaagtcggcccgtcaagtcgctgttgtttctttttattatttttctcaccccttctctttctctccagctctactccgtatttaacgttaaatcacatcatttcataattcccagtgaatataataaaaagacacaatcttttctttcttttcttcttcctaactctaaatactagtaactagtaagtatagttaccaagtatctcccacgttttactctattaaaccctttcaccagttgtcaagcaaacttcaattcaagatattatatcaaaggctgctcaagaagacctaaaaattaatcaaatagatgtaagaacctttcttacatgttattctattctagacgaagaagagtacattaggcaacttgaggggtttgatagcaagaatccaaatgaagtatgtcttctaaaaaaaatctctatatgcacttaaacaagcccctagatgatgagtttatgtgtagaatttggtacattaaaagctactatgattcatgtgtatacttagatggaaaattgtttaccagctcttgtatgttgatcacatcctactagttggtaagaacagatcagatattgaagacataaagattgtgttgataattgaatttaaaatgaaaggtcttggccaacccaaaaatatattggggatagaaactgtgagatacagaccaagaaaaataaccttgtctcaaaagaaatatctctgcaaagtgctcaaaaaaattcaagatgatagatgacagatgccaaaccagtttcaacaccattggcaccccatttcaaactgtccaagaaagacttaaccgacacagaagaagagagaacaagaatggatagtgtaccatatgctacttgtgtcgaaagtctaatgtatgtgatgctgtgtactagatctcatttggctcatgcaatgagcattgtgagcaggtatatatctgatccttgtggacaacattgggaagctttaaagtgcgttctcagatatgttaggggcacacttgttgttggattaatctataattcaaagactgaaaatagagaggaagttacagggtatgttgattcaaattttgtaggatgtttgaacactagaagatcaaccacaggctatgcttttactgcacaagatggttgcattagttggaaagacacaccgtaaaaagtggtagtactgtcctcaagtatatggctgctactgaaatcaaagtggcaatatggctaaaaagggttgacaaaggaactgggcttcaattcagaaagtatgattgtatactgtgacaatcaaagtgcattacacttagtcaaaaacttatgagagatctaaacatattgaaatcaagcttcacttcatcaaagatattatcaatggaaaggaagtccaaatgaagaaaatcaataccaaagacaaccctgcaaacatgttcaccaaagttgtgagtgaataagtttagatcacattttctaaagttgctcaatgttgatacttattgaaactctccttaggagccaagtgggaaatttgacatagatctatatctaagcttgtggaaattaaacaaaaggttgatttgaggtgattagttaaatttcccaagttaaatttggatatttgtaataagtttgtactggttttataaaccagctcaataacatttccacattagctgctggcaattaataccgttgctctacaacaacttaagtcggctactgttgcggattagaaaacctgatcaagatcaccataacaatgatttaaggacaacaatcacaatgacagcaaaacatgtaatcaaaaccagaacaagaaatttaatcagagatgaatttgattaagatgaatgaatcatacatgtcataacattgtaattaaaatctgaaagagagaaaagatacaactttgagataaccaatcatgaatacaagaattacaaacaaagctcacactgagagaagtcacttcaagagtgaacaatctcttttacaaccctcaatccactcaaaaactaaactaaaacttgcagtaagaattcatggtgaatccctcagttttctctgatttctctcttcattacagaagctctctctctctctctctct

SEQ ID NO: 381020 - DNA, 2843 bp, Cannabis indica
aaaggtttggttaatagggcttggcttaacttattcccgagaggttttatctgctctatgaatacgagcaattctgatcatagacccttttgtcttttttctggtggcttggatgccaagactaaaagatgcttcaaatttgaagaaggttggacgcgagactaaagaagtaagttggtggcatcccatgcttggaagtcaattgctcacccctggccccccgcttgcgttttcaaaaagattagagctactcgagtagctcttcttcactggcacaggactcaatatggaaaactagacaatcttataaaaaatttggagaaaaaacttgattggttgcaacgactccccgctcgaacccgtgattggaaagctgaatgtgaaatctggagatctctgaatgagttcttagagagaaaagctatttattggaaacagtgggctaggatctcgtggattaaggaaggggataagtgctccaagttctttttcctctctgctgctattcgcaaaaggagaaatgcaatagagagtatctttaacaaggataatgattggatctcatctcgggaccttattggccaggaattctttgagttcttccaagggatcttcgctgggtcggacagcgggcagaccctcaactacaatgatttgtttcgtgagggaatctctgctgaggacagtgaggccctccttatgatcccaactcgcgaggatatcagaagaactctcttcgccatgaacaatcacaaagcccaaagtcctgatgggatgtctgtccttttctttgaacactattaggattcagtgggagaagatttatgtgaagctgtttctgacttcttcagtattggcaagatgcataaaggtgttaatgctacaaacatttttctcattcctaaagtccaaaacccgaagagaaccaatcattttaggcatatttttctttgcaatgtgatgtacaaggtcatttcaaagattattgcaaacagaattacgccactccttccgtctattatatgcccaacccaagccacttttgtgccgggtaggagtatacaagacaataatatgatagtgcaagagattattcactctttcaaccgaaaagaaaaaggcaaggaaggttactttaccataaaaattgacctcatgaaagcgtatgataagttgaattggagatttatagaccatgtgctttcttgctatggtatacctcaaaaattttgcaattgggtttcccagtgtatcactaccaccaccctcaatatttatctcaatggggggccagttggcacgattaaaccatcttgtggtctctaacagggtgaccctctgtctccctacttatttatttgggctgcagaagttttatcgaggttgcttaaggatgaattaagcaagaactctatcaaggggataaggctcagcaggggaggtctgattctctctcgtatcttctttattgatgacttaattcttgttagaaaggccaatttacgtgaagccatgggctattggcattgccttgagagattttgctcttggtctggccaacaagttaataaactcaaatcctcaatcttctttagtaaaaatactcctgataatttgaaaagagagattagggatgttttgggaattggctcttcgaagggcaacatcaagtatctggggcttcctctcttcaaatcaagacagaaggatgtagacttcaacttcattctggacaatctcacttctaagttgcagggttggaaagcaaaaaccttgtctaaggcgggtcggactacccttatcaaatcagtggggctttcattgcctttttatgccatgcagacttctaaactctctaatcgtctagtttccagaattgatggttagtgcatgattttggtggggctttgaaaaaggtaatcatggtctttaccttaaagcgtgggacaagctttgccttcctaaatcgcgaggggttgggctttaggaaaactaaggaaatgaaccaggcctttcttgcaaaatggggatggaacatcctcaatggttgtcagtctctgtgttgtcggatcctggctgctaaatacctaaaagggcaagatttccttaattacagatataaagatcctgatacttggttttgaaagaatgtttttaaaaccaagccaatcttgaggaaaggagcgtgtaaaatggtggttgatgggagggatacaagcattcgggggatccttggattcctcacatgaaagatttctactcgaaatcaaatggatcatctgattctaattctcgtatagttgcggatctcttctcctctagtggaggtttggatatccacaagttaagatctctcttcgatcgagagactgtgtctgcaattttaaaaagtgggtccccctttggccatggcaaagataagtgggtttagattcttaaaagcaatggtcgattttcgtgcaaatcggcctacctgacccaggtcatggaaagagctcccctttgtgaggtttctctgtcgctttggaacaagctttggaatagtaaaattttggagcaccataaggttctttggtggtctattctatccaatgctctctcggttcgggctgtgatcaggaagagatttcttatagaggatgctagctgccctttgtgtgggatgggcgaggaatctctagaacacttatttctctcttgtgaagtggagttacatgtttggaggtcctcgccttggggcatttatcctatttgtgacactggtatccgctgtgggatttggtcaaattcatctgggacctgaaacacaaggaaattgctactgaggaggttttgtgtaacac

SEQ ID NO: 381021 - DNA, 4268 bp, Cannabis indica
ttaaaaaactaaaaaataaaaatgttgtcaaactcccctctaaaataatacaaatgaatacatgagattggtgaaaatgaagaaaccttttattttatttttttatttatttattgagaaagaaactactgtaatggaaagcatagataacaatccttccacctgttataaaaaattcaaaatcaaaatcaaaatatattcttttcttaaaaaaaatctgatgcaataaattgtatatcaagtgtgatttcttcagtttactttgattttcctattaaaaactatatctgaagtagagaagcaataaacaatatctgaagtagagaatctcctcagtataataatatatatgcaaacacaagaaaatcctatttggactgttatgcttgaatcattctaatagtactctctctgtctaccatttatttttttaataacaaataccacataaaaccagcaatgaagtcttaatgaatctgcaatattgaccaccattctaacttggtcaacctttgttctgtaccagtcattactattactaagaaaaaaaaaccagaaacatagtacaatcaaaatactggtgttgtcattttatatatttatatttttttaaaaaataatgattcttatttctggccaagttgtatatgcctcatcattgtttaatactccaaccaagctagtacaacatccttacacccaccatgagagctttcaactccaaagccttttcttttctcctcatattttctcccctttcttgtttatcaaatgcatcaaatacccttagaacaggtgaaactttgtataattatgaaaccttggtttcttctaatggggtgtttgagttgggattcttcagttctggtgattcaggcaatgagtatgtaggaatttggttcataaatgacaaggacaagaaggcagtttgggttgcgaacagagaagatcctctcccagcttcctcaggatctcttagcattactaatggaaacttggttatatataacaacagaacatcagataagaccattctcaacagtgatgcacctgcaactactaataatacaattgctaaacttcttgactcgggaaattttgtcttgatccaaggcgaaaagatgatatggcagagttttgaacatccaacagatacatttctacctggaatgaagttgggattgtttaacattggagcgagtcagccgagggtccagtttcttttgtcatggcttaatcctggtgatccaggaaaaggctcattctctttaggctttgacagagaaaacaagactcagttcaacatctggtggggtgaaagtgtttatcaagagattggcttttgggatgggaaaaacttcagattattcttcgaaagctcatcaaataatcataactttagttatgtatcagaagagaaggagacttatgttacttttagtaacaaagaaagcattgtgttctcatggtttgtgatggcatatcatggggttatcaatgagtacaaaatggaagatcagcgaatttcaatggtcaattattcgctttgtgatggcacggcagtgaagaattctagtggttgtttgatcattccattagtttgtgaaaatggtgatgatttctctgagataacaggactaatgccgacttcaataatcactcgaagggctactgctattggtataaatggctgtgagttgctgtgcaggagcaattgttcatgtgttgcatatgcttactcaagtagtgatagatatggatgtgaactatattatggaagtaagttggatctctgaaaatgacagggaagggaaccgagctattcttttgcgtggacatcgaaaatctagtaagctttttcacttctactatgaaatcagaagatttgaacttataaccatattgtttcatgtggttaactgtaatgatctttagtttcatttttcttataaataatggtttgtgaactattcctttcttttactcaagtgtgttgagtctgatggctcttattttccttttcctcagaacaaaataggaagaagaaccggttgattcttgtcacagccacagtgatgtctgtaatattggttattatgatcttattggttacttattttataagaaagtacagattcataggtaacttattcaaatttaactatgttcaaaacacatttaaagttaccataaaatttcaaattgaactcattttgtatttttacaggatttgattggcagaaggaaggcatgaaaggcaatatgagattgttactgtcacagtttactaatgaaaacgatataaaatcaaatggtattggattcaataagagaaagaatcaaggcatgctcccgcttagattttcttatgtagtggctgctactgacaatttctctgctgcaaataaactcggagaaggtggttttggaccagttcataaggtaacccttttcatactatagcataactgaaaatagaaaagggataatataattaacagaggtgatgtcaattgcagggcaagttatttggacaagacatagcagtaaaaaggctttcgaagaattctggacaaggactaatggagttcaggaatgaggtgatgttaatttctagcctccaacataggaatcttgttaagcttttgggattttgcatccatcgagatgaaaggatcttaatctacgagtacatgcctaacaaaagcttggattccatcattttcggtaaccaaattcttctgtcaaatctcttattttctatcatcatcttcatgttcatttaacatcactttcaagcactcaaacattggagttgaatcagatcgaactaaaagactacttcttgattggcgaacacgcaagaacatcattgaagggatagctcaggggcttctctaccttcacaagtactcaagactaagaatcattcatagagacctcaaaactagcaacattttattggacaactatatgaaccccaagatatctgattttggtctagcaagagcaatttttgagaatgatcatatagataaaacaaagaagattgctggaacatagtaagtaccttatgaatttttgtctttatttccaagccatattgttcaaacaactaagctaacttttctgtttctcttggcactgaaaacagtggctatttgtcacctgagtatgcattgcatggacttttctcaacaaaatcagatgtgttcagctttggagtcatcttgtttgaaatcattagtggaaggaagaactccacctttactgagtcagattgctccaacttactaggacatgtaagtatccaaaccacaccttagaattcttaatatttcttgatcttgagctttagtacataaaaattataattaataaagctgttaaggacagatacatctatcacatattctcaaatcaatgactgattccattgctatcattgtcaattatatttttcaaggcgtggaatctgtggaatgctgggaggtgcatagagttaatggatctaaaaatggctggtacctgtccactgactgatcttatgatttacattcaagtgggtctactatgtgtccaagaattagctgaagatagaccaagcatatcagatgttatttcaatgttgagcaatgaaggggccagtctaccaatgcctaaacagcctgcattttctacccacttaatgacagatggtcaaactccatcaagatgaactcatatcattatcaaaaaaacctgtaggaaatcaagctagctgtaaattacatttaatgtatttttcatttactctagtattactaggtattcactttgtattatatataccctttgtatatactaaaagagatcatcagaaataaaaacatttttctctcatttacttcatggtatcagagcatttgaaacttctcaaacacattattttctcacccattcctttcttaatattagggttcttgaaattaggatttggaggctttatcctagaagattaattaaaagtagttttctattctcacctccgacccagggagcttgtcccacctccgatcggcaaaacccaaaagtccgacgtccatctgagctgcgcgtgggcccacgcgccacctccttccgtcgcgaccctctccacgcgccggcgcgtgtacgcgcgtggcagtctccagcggtgttttttttccgcatcgtctctctcagatttcttcatctcagactcttctccaactccagcgacgttttttccggcgtcctctctctctatt

SEQ ID NO: 381022 - DNA, 1768 bp, Cannabis indica
ttttttttttttgtataatgtaggctattttttttatcaataatgtaggcattattaaatatggagattaagtaacatttcttttgttattttgtttcaaacaaaaaaaaaaaattcattatacaaacaaacaagatagcattacaaagcataacaaccaaaaaatacattaaataatatttgtttttaattatagtgacagtttaatatataaatggtttaaatatttcttgttatcaccatttatctaaaataaaaaataaataaaacatctctcttccctcatcaatttgtcaaataattttttattcctctcctcctttttcaaaatgtaatataagatatataaaatgctaaattaattctaactttaataacaaaaaaataggaaaacaaaagaaaaaaaactcaattttcctttcattatcaatgtatatattaataaatacaaacaattaatataatcataaaacaaatatctatattagagactaaaaaaaattaagataataatattacctgcattaattattaactaattaatcaatgccaagaatagccaagataagaagaagtgtatggattaatatcagaaaataatgaaaaaagtggtatttttgcatgagaatttgtatttgtgtcatgtaagaaagaagatctacaaagtgggcatgtgaagtgattagaatcaagccacttgtcaatgcacttgatatggaacacgtgtccacatttcgatagttgactcaccacatcttccttctcaaagtcaaccaaacaaattgaacacaatgcttcttcttcttcttcttcttcttcttcaaccttcttattttgacttttcaatttcaagtcaacatatctagaaattggaagccatggctgaactgcattggtatgattattaatctcataatcattttgatcaaaattgaagaaaatgatatttttaagaagcccaataagagatttcttgagttgaagcaatgggatccaaatacaagtgtagaaaataattgtaactacacaaaatcttgattgtgaaaccactaagcatatcattttaatgtatatgtaaatattgtatatattgtataatgtactctcacaaaaatcaattttttgtaaggaaggattaatttgaatgaaagaattttgggatgttatgaataaaacaatgtgaggaagagttggccatttatagagtgaggaaattaaagacttaataatttaatgggttttgtttgttttgttttaatgaatatttaagtgtttgaaaaattaatgtagctttgcggttaataagggtgaatattaaagtaatattttatggaataacacataattataattaattaattaataattaatatgtatagtttgtttgtattataatcaaagtttgaaaagggaattagaggttagaatataaggccggcgccgaccccacattctcctaatccaaatactaattatctaattaacaataatacatttaattagatcttgtttagatcttcttcttgttgtttaattgtaaaacaaaattgtaattatagtagatatatagtaactacattaacttaattataagaattgatgcattatattgcaactagatatatattattattattataattagttaaattatatataatgaccttggcattagggtcaaatctgtttcctttaatcacttcatccttaatatattagatatatgaaagtgcttattacaactttctagggtaaataccattttgga

SEQ ID NO: 381023 - DNA, 2202 bp, Cannabis indica
tcatactgttattagtataattatcatataccttaacaataacaaaataatttttagagaattatggctaaccaaaataataaaaacggttagagtgtccaaaaacaagactctttttatatatattttttcttttaaagaaaagtacatttatagtagaggcagattacgtttgaccattttctttgaagtactactgagaaattaaagaaaagttttgtccttgtaaaaaaagaaaagaaaagttttgtatccagaattaatagagtatcctttttttttttttttttggtttgccaaaatactcataaaaacgtataggaaccatcatataaggcaagatataaagccctactagcaacaaacgacaacgtttcgcaacaaaacggcagaaaaggaaaacaaaactggcaaaagcatagccattcttatcttcgtaccccctcagaaagaacccaacaaataaaaaaaatatataataataaatgaagaatttaatacataaatatcatgtaactcccctaaacactctccggcctctactaattaatataaaacccactgtttcactcagtacaatgcaccttcactcatatcttcttcttctttcttttgtgtacccttaagcctccattattgttcttttcaatatttcatgcataaccagtactagtatacactcttagcaaaaaatcccagtttcttttgtcaaaaaaaaaaaatggctccaattactcgcagccgcgcccgaaaaagcctaacccaagcctctcttcttgtccagaaacctaataataaggagaatcataataagatcatcacagggaagagggctgttggtgttggtgttcctcatgttgaaaataaccgtcgaataattaggaaatcctcatcacttatcccaagctatggtggtaatgtaggtgacgatgttctcgcacacatcttcacctatttgccaaccagaatactggttcaactcagcgttatgtccaaacggttcaagaacacgtggcgttactgtcgaaacctcctgtttggcaacgagttctacagaaaactccacaaccgaaccgagttcatcgatgtcgtcacccgcattatggacaatcacattggcgaaaacatcgataccttgcaaatcttaatggacccaaccgataaagaacacagactcactcattggatcaagattgctctcaataaaggtgtcaaagttctagatctcgactgcgacttatcgctcaacatattcaagttccatcactcgttgttggattctgaaaccctaagggttttgaagctcaaatactgcaaattcagtctcccatctcggcttcgtttgagatcagctgcaggtttgggattcataaccactttggtgctgagaaaggttgtgttttgcgagttcacagtgtacaggatcatgaaacactgtgtgaatctggagagtctggacatgactgactgttctgggcctagtgtcataaggataatgacccatgacgacaacttcaagtttaagagcttgaaagttgggaattctatggatatgttctatattgatgttaactgtccaaacctcgagtcacttcactattcaggatcagttcttcaaggtattcggatcttgatgaataatgacccacccacttctaagttgaaggatgtcatgctcaatttctccactcctagaacaggaatcactccttattactatgtggaaaagattctccatttaaatctttataatgtgtccacgctcaccataaccagtactgttatggaggtatatatatatataaataatatttgaattcttttttctttcattatatatattattattattatttctcacgtacgtgtggatagcacattttcaggttatgtgtttagcttctcctttttaaatcttatttgagtgtttgttttggatagatgatctatatatcttcttcgattgggttctaatacaggattcaaaaatccctctttaatgtaattaatctgcagggagcgtgtgctaaaatgcgcaatgggagttttgggagtctggatttctgtctatggcatttgaaggaacttcaggtgtttatggactacactaccttttgcaatgccgttgatattgctgactttgttggaaaatgtcccagcttacagaaattattccttgatgtgagtatatatatatatata

SEQ ID NO: 381024 - DNA, 1790 bp, Cannabis indica
aaaaaaaaaaaaacataacaaatcatactaaggagacaaatggcaaaatgggagaaaaacaacttctatattgcttataaaaaagacagtatataaaattatagtaaaaattatataattaaaatgaagagttgtaatatatgactgtctcaaataaaattatagtaacaattaaaaaaaaacaaaaaaaaaacagtactccatgtaaaaattcctatttttttttccctctcttctaaattaggcttcaaatatatattaaaaaaaaaataagtttgatatttaaaactagtagatcaactttacaaattgtttattttattaggtttaaaaatcaaatagtcaagctaggatacatcggctaaataccactatcttagcagctgtaatctataacatttggcttaacaagaacaggtgtattttcagtaattattctaaatcagtttgtgatttagttgatgatgtaaaaagttctattaagtacagattacaacttgtctaagcaggagagagactactattgagattacaagataggtatttttttgtcttggctgggttgtaaggggcggtgtgtgttcttgagccgtgagtggcttggtagcttttgctagttgttgtattttgccctgttgattaatgaaactttttttcttgataaaaaaaaaatcaaatagtcatacacaagttttaatacaaagatttaaatctttaaaaaaaaaaagtcatatctaaatattcagatcgagcgagatccaatccaaaaataacctaacagagcataacaggtcagatcagcaaaattcgaatcagattgggtcaaatcgaatcagatatgaccatccatttacgggataaattacaacaagatgcttcacttcagcaatgccaaaaaatgtgtaaacaatgtacataaagagtaaccgcatttagaacacgtgccattgcgtatgaatagatatataatataacattacacacaacctagattacaaacagcacaatactttgacaaaacccacaacgaaacttggccatgagatatcgccgatacaaaatcaaaagaccggttgccatgaaacccagtgcatgttttttcttgtttcttttttcatgcctttgtatcttttagtactccacccttttcaagctccccgactagatccctcagggatggaactttcatggccaatgttctgtatagcctagagtaacgagctcgggttccatcgccagtccttgccaaggcaagcaggcttagagcttctgggagttcagagaatacttgcttcatctcctccaagctcatgttttccaaaacaggcggtttcggaacaaccctcacaatctcaccacccttgggttcctgaactcgggcatctgctttaatgaccagttctgaatttgagtttgctccgcacttgatgataaatgggtttgctgagcctgtattgaactggagtacattccactgtgccacgtcaacttcagtaccagtaccaaaatctctagatgatctgcggctacgtgatggttcttgaatgcggtcatcctcttcaggaattgtctgcagcattgtgcatagtgtaaagcaatagaagaacaataacgactcaccaaaaaaaaaaggaacaataacgtaagatagacaaacgtacgtccagcaaaaactgtgatgagcaactaaaaataaactgtacatgtgatgagcaagagaagtgttcctttatcttaacaattcagatttaaccaccaaaaacccaatttcccaagaaggattatgtgaa

SEQ ID NO: 381025 - DNA, 1609 bp, Cannabis indica
gggttagtatcttaattcaccatcgtttcacaaggcatttcccccctaaacattgatatgtacaaaattgtgttcccaaactttttaggccattaaaaaatacccccaaactattgagattgtcggattcaaggatttcaaccaattccatttggctttactaacagacgcctaacatggacagaaattcaggaatcacaattgggtacatggacaatccccacgttaggtgcccggtagtcaaattaaacagaattggacggaagtccttgaaaggttcaggttcacaatttgttactaaaaaatcctaagaacagcatactaaaaaccaatttatggagtttcaattgtaacatacctaatgtgtttcccagttcaagaaagtactcatttaatttatctcttctcaacttttctcggtctgccttctgaacttttcttgcagttactggatccacatccacatctgccttttgtttttgtctgtgtatcaatcaacaacaccagcaacaaagaaaaaagtaagtaagtaattaactaactacacaatgatctaacttcaaagcctcatcatcaacaagtttgcaactgaattgaagctcaaaaaccaagtgattactctcttttaacaatctctaaacttttaattgtattcactttcactgttaaaacaatcaccctaacaatcttcacatgcccacataaatttacacttgcataattgcaatacagaaaaagtctcagcaaattcaattctctatacaaaagcaaatcaatttcttataattaaagaaaaatccaggtgacaagagcataaacccaattgaaatcactctccaaaatatcatctttactgtaaaaattgaaaatttatggtttaattatatcattcataaatcataataataataataataataataataataataataataataataataataataataataataataataatggataaagaaatcgataaaccttgaatgatcatgagatgaagatggagctgaatgtggagagtaatcttctggtttccattgctccatagctagctagggctatatgtttctccaaattagagaattgagatagaaaattttggtgaaaaccccaaaaaaggaaaagcaaagtgagttattattattattattattttttgaaagaaagtgagttattatttaaatttaaaggttttggatgatccatgagcaacaacaacaacaacccataaaacactttttattaattttaatttgtggaaaatatgttattctgagacgacgataatggacgaggtcgggagttgtggagttgggacttgcgtcatgggcggagatgatccaatgatctgtcgaccatcaacttacttttctcttaaccaatcacatttaaacacctcatcattctgccatgatattaaagagatattgctgtggtgcacgataacccatggtcctatatctattgtgcccaaattcaggatagaaaagggaaatttgattttctatgcttagaaaatcaaaaaatttgatttataaaccaataattaaaaccctaaaaaaactataccttttttttcaaaagggaaatttgagtt

SEQ ID NO: 381026 - DNA, 3365 bp, Cannabis indica
aagggtcccgtgagctaacgtcaccgttttagtaccatcatcaaccacgttaaaacctttctttaatactactatatcctcttccatgtccctaactacctatcttcttcttcttcttttcttcttccttcttctcaattgctcttctgaacctcttcaagattttctctcttcttgcctccaatggcacagactctccaacctacctcctcctcctcttccgttccccaaaacctagttctgccagaatccgagtctgaaaccgaccccgcctattccatctccgccttcgatgagccgcaaaaccctaaccaaaatctgatttctactcctacccagaccccgaccctcctccacctttccttcaaccaggactatggctgcttcgccgtgggcaccgacatggggttccgtatctataactgcgatcccttccgtgagatcttccgtcgggactttgggatgcgtggtgggattggattggtacagatgctgttccgctgcaacatacttgccctcgttggtggtggagcttgcccgcagtacccgataaacaaggtcatgatctgggacgaccatcagtcccgttgcatcggcgagctatcgtttcggtctgaggtcaagggggtccgactcaggcgtgatcgaattgtagttgttttggttcagaagatcttcgtctacaattttgcggacctgaagcttttgcatcaaattgagactattgcgaaccctaaaggactctgtgaggtctcgcacgtctctagtcctgtggtacttgtgtgccctgggctccagaagggtcaggttcgagtcgagcattatggttcgaagcgaaccaagtttataatggctcacgattcgagaattgcctgcttctctcttacccaagatggccggctgctcgctacggctagtagtaaaggaactctggttagaatttacaatacattggatggttctttgctccaagaggtataatttgatttttctttttcttctgttgttagctaatttattcatttgtgtgttctttcataaagggtatatttatatttataaattggagtagagtagggtctgtatgattttattcatttatatttactggttagtaatagtatgttagacttaaagtttgtgaaaagatggcactgtgaattgatatttgttaaataatttgttggatgtgattgggcgtaagagatgggaaatattggcatttaagtttggtggagcttaaatatgtgattgaaaactctaatgttttggtgtttgatgccaggtaaggagaggtgcagatcgagcagagatatatagtcttgctttctcatctactgcccagtggttagctgtctcaagtgacaaaggaactgttcatgtgttcagtctgaaggttgattcgggacttttagcaaatgatttatcgcgtactacgctggactccagtctttctaacccatcagccattccgtctctttccttcatgaaaggtattacattttgcggtgtggtaatagtttgcttgaaatggaaggagtattatttagttactaatgaactcttttgtattatgccttagtgttgggtatggtcaaatgtgttagttccgaagagctattatactttatttgttttaacttctctctattttattatggtttgcaggtgtgttgccaaaatatttcagctcagagtggtcagtggcacaatttcatctgcaagaaggtttgcagcacatagttgcctttgggcatcagaagaacgtagttgtgattcttggcatggacggaaggtaaaacaaaattaaaatgtatttttataagaaaagtaaaagcaaactaaataattgaagacttgtaagttggatgctttgggtagataacatattaaatttgaaactagtggcaaaacatagctttgggtttcataagttgaactgaagtatctattatcttgaacataaactacttcatttttccgcgtttaggttatatatatgaattctagagttgggatatggggaatatgaattgaatagaggattgaacagattccttaatagatttcagttttcacaaggattttttcagttctaattagatatcgctgctatagaaacttttcacatatccttatgtgattggcatctttatggggatgtttatgctccttgtagaggatagagcaggttttttattttcaaatatattttttttatgtgagacttcaagttgtatagagatcaaaaagagatagagtaaactctggaactggttattctaattatgtgcgtataagagattttgttatgatatggcctatctgtgatcacgatccatttatttatttatatttataaacttgttgtgttgtaattttgtaataaaatgaagaaatgggtggaattttgcagcttctaccgatgcgaattcaacccagcaaatggtggagagatgaatcagcttgaatattataattttctgaaaccagaacaaactttctaagcaatgattggtatatacatacggtcttttatttctgttaatactatgttctttgttttatcttttcaaatatcttctagggaactgatctacaatgtaaatataacgggaaaatttgaatggataacaatttttcaatcacttatttataagattgggatgtatctaaacaaactttggctgatttactttgcttgtatatgcttaatatcgaattccagaaatctggagcttgttttcaagtattattggaagaaattctcagtgttttcttttgtttttatttatgtaaagcctattctattgtacaatgcgtttttcaagtccaataactatcaagacattgcattggatatttgaaaattttactgctgcttttactcctagcaaaataaaagataaactcgtgtataatttagaaatatgggataattatcaatggtgcctcctaaaataataggcacaggataaggataatcaactaatttcagatgaaccatcaaactgaatatttctcttttatattcttacctttttttctagttcttgaatgttatattttttaggaaacaataaaacttattgtttgaggagagaaagtgataagaagaaataagtttgagctgtaagaaaaatggagagaagagaaaagtgaagaaaaatgtagtgtgggactcacaaattgaggggaaaaatcttgtgtacatatagcatacaaatgaagatactaaattatctttagtaaaaataatattatatttatagttttggggataatataactaggggtggcaaaacggggtttcgacacggcacacaaacacgacacgaattttacgggttagggttgggaaaatt

SEQ ID NO: 381027 - DNA, 2780 bp, Cannabis indica
ctggttttgagcatgtaattcctgccaatgtacctcgaatatccaccagtgcctcccttgacccttcaccacaggaagtaatcactactcctcaaatttccaaagttcaaaacaatcataacacgactacaagagccaaggctggtgttcacaaacctagagtttttagtgtgtcatttgttcccactacagttactcaagcactacagatgccacaatggaaagatgcactacagatgaaattttagcccttgtcaggaacaaaacttacagtattgttcccttaccccctggtagacaagcaatagggtgcaaatgggtatacaaggagaaagaaaacacagatggtactctcaacaggtgcaaggcaaggttggttgctaaaggttttcaccagcaacctggattcgattttactgaaacatttagtccagtggtgaaaccaattaccatacgtgttgttctcactcttgctctttcacaaggttggcaaatttgacaactcgatgtcaataatgctttcctaaatggggttctacaagaggaggtctatatgacacagccacctggttttgaggttacaacaatgcctaaccttgtctgtaaacttcacaaagccctatatgggctcaaacaggctccaagagcctggtttgacaggctgcaactctctctttccaaatttggatttgtctcatcaaagtttgaccactctcttttcatacagcactcacccaagggtacaacattggtgctagtttatgtcgatgacattattattacaggcgacaacagtgaagttctgtctcaacttgtcactaatctaaacactgaattctctcttaaggaccttggttaactgaactattttttggggattgaagttcagcacactacagatggtttgcatctttctcaaggtaaatatattcgagacttgttggtcaagactcaaatgcaaggagccaagcctgcatctgcacccatgaccagtggcctcaaacttttagcctatgggagtgatcttgtcgaggatgttcaactctacaggtccactattggggctcttcagtatctcactataactcggcctgaaatctcatatagtgtaagcaaagtttgccagttcatacaccatcctttgcaagctcactgggtcgctgttaaacgaattctaaggtatctcagtggcaccatgagctacggtcttcatctcaaaaagcctccacacactgaaataacagcattctgtgatgctgattgggctgcaaatattgatgacaggcggtccacatcaggctatgcaatctattttggctcgaaccttgttgcttggtcctctaagaaacaacacactgtttccagatcaagcacagaggcagaattcaggtcccttgctaatgtcgttgcagaaataacatggctccattcactcctctttgagttgcatgttcctcttcccaggacccctgttgtgtggtgtgacaatttgagtactgtgttactcactgcaaatccagttttacatgccaggaccaagcacatagaactcgattatactttgttcgagagaaaatttcgcagcatgttgttgacattaggcatgttccagcagtcgatcaaattgctgatggtcttacaaagtccatctctagcaacaggttcagcaattttcgacacaaacttaaaattgaagatgcttcacttctaagtttgaggggagtgttaagggtaccaattcagttaatacagttagagatggtagttagtacttcagttagtttgttacagtttgttatggctctaactgattctcttctccttctctttctgttgtaacgtgtatataagctcatttagtactctttgtcaattgaatacaattcactctttccctttctttctctgtttgattctttctctctcttttgtttctttattctgctgcaatgtctaggaaagttaacactttaaaatgcaactaaacaaaagaataaaataaaaattatttactttttatttcattacctccaatcaaacaccatctaaatctaaatgtatgtaacttatccataaaaagatatggagtaggaatacttactaaaaattagataataaacttgaaatatcaaataattgaaattcaaaatcaatacaaaaattagagaaagcatacaattgtaaacagttagaaagttcaaaatgagaatgaaaaccaagcgagactgctcaaaagctaacatcacatgaaatccattgctcaaatggctgtaagatctccaacgtcaaaaagctttcttcccattcaattatataacaacctataaaacacacatacaatataagaggattgaggtaagtatttaacttcattttttttttttgaaaaaaaataacaaataaagaaaataaaaagtaaatcaaattgaaaaagtaaaatttaaatatagcaatttaaagaaaaagaaaaacttactagccgtgagcttcaaagattaaccaataatttttaaagttctaaatctagataaattcacaaaaacataatacgtaacgcaacactacaataattaaatttaacaaaaatataacaataatattatcttttaggagaggaggtttcaatggttacatttttattgtaaccatcatggttacattttttttagctattggatcacctattaaatggttgtgattaatttagaaataaaaaaaaaaaaaaaaaaaaaatgaacctgtaacctgatattaacatgttcatttattttcttttaaaa

SEQ ID NO: 381028 - DNA, 1193 bp, Cannabis indica
attgtgacttttgtagtagtgttgtgatgtcgattgggctagtgatccagaagacagaatgtctacttcaggattcaccatcttctttggcaacaatttaataagttggcaatgtgagaaaaacatagtgtgtctcggtctagcatagaagcagaatatcgaaatttagctcaagttgtttctaaaataacttggttgcactctcttttctctaaactccatgtgcacctacctagacctcccattatctagtgtgataacatgagcacaattctcctaactgctaatccagtcttgcatgcccaaaccaaatatattgaacttgatttatattttgtttgagaaaaattatctcaagaaatggttcgtattcaacttttcctagttgttgctcaaatagctgatggtcttacaaaggctattactagctcaagattgaatcaattcaaagacaaacttgaaattactgacaacaccaattctaaagtttgtgggggtgtgtcaagacagttagaaaactaactgttattatgttagttagctcttgattgtttggtttcggttaaggttttgttattgctttgtattttatataaagtgtattttctaatcaatgtaagagattcttctttttgtttcaatctctctctctttccttctctttctttcctttctttttcttcttctctctttactatgttcttgtgtttatgtaacaataatgacgaataaccatagttctaataatgttgatgttggagagttgaagtgcttaattagttactttgtttttcctttattgaactttaattattcccacactagtaaattaaagtaaagatttaacttttaaagtttttacatagttactgaaattttttcatcgtcaatgaaccaaatatcaaattttgacaatgaatgattattactattttttctgaagaaataaataagtattaaggcatgtgtagtttcctagataaaattaaattctttccacttaaagaaacacatccgtacattttctgtaatgaccgctctagtatttggattagtaaaggcaattagcactaatttttattatcttattattatttgtgaattaaatttaaatgtggaccccaatatttagaaataaatattagagttataatttctcaatttcggagattttattaaactctaggggtatt

SEQ ID NO: 381029 - DNA, 6330 bp, Cannabis indica
cattcatccaagtattccaaatctggcaatacttggatatagtgatagtccagcaagcttgtatagcacagagataaagagcaaatgggtagctgagtttttgggaggaaaattcaaattgccaagtgtaaaggatatggaagaagatgttattaggtgggaaaagtgcatgaaaagatattctggttgtagctacaagaggtattgttcaattgctttgcttcaaatatacatcaatgatcaattatgtaaggacattggttgtaaccccagaaggaaaaactggttcttggctgatcttttctccacctatggccctacagattacaaaaacctaacccactgaccactctctctagtcctgaaatcactttttgattgtttctagctgagatgagagttgtattttcaaactagagtgaaagctcttaagttaaactccttagaacagagagtaacatttacacaactccaactctagatggtattatattagtaccacacccctctgtggttagttattccatctttggttagtttcattaatttattagccattttttaaatgtacactagcaaaacttattgttatgtcgtttgctaaattcaattttttttttcagtacttatatatctaatgtgttaatgctcttttttttttttcgttcaagtacttataggacttagcaaaagttccttactggtagggaatttttttgaccattgattttagatattatagttattatgatgtaaggtgtatacttttactataagtctgtttgtatacaactaaaattttatacatattataataatatttaataatattattatttttttaaaggtaaattaaattgtttttatataggtatttcttttaaaaaaataattttttacaaattttgttatcaattttgttatctaaaattaaaattaataaaataataaatacatttaaaattaaatagatatagaaaaaacatatggatttgtcaccttatcgcctttagatatatgacaaaatagtttaaatgtttgttccaattcttgttattttatatattcttcttattatgctaacaaaaattcttatgtcttttagctctatttccacatatgttttttattttataataaaccatttatttcttaaaaatgcgtagtttatataaattacatgaaaaaattgagtctagcaattctaagtgaaaggatacctttgcccccttgaaattgagtctttgtaatttgtacggacattagcgccgcagctctaattcaagccgtgtataaattttttattttaaaattttgttgttacgacttagcgattctaggtgaaaagacacatttgcctcccttaaaattgagtcttcttaatttgtacagacatcagcaacgcaactctacaactctaattcaagcagtgtacatatttttcattttaaaattctattgtgacaacctagtgattttaggtgaaaagacatcgttgccccccttaaaattgagtcttcgtaatttgtataaacgttggtaccgcaactctaattcaagcagtgtacagatttttcattctgaaattctactgtgacgggctaacgattctaagtgaaaagacacatttgcccccttaaaattgaatcttcgtaatatgtacggacgtcagcaccgcaactctaattcaagcagtgtacagatttttcattttgaaagtctactgtgacgacctaacgattctaagtgaaaagacacatttgcccccttaaaattgagtcttcgtaatttgtacggacgtcactgtcgcaactctaattcaagtattgtatagatttttcattttgaaattttgttgtgataaccaatggtattattgccataactctctcgatattatttgaaattggtgatttaagatgttttaaaaagatgaagaaaggtctaacacttttatttacaacattttttcaaaaagtgcacgaattatactcaaaaatttacttgaagcttcaaacttaattttttatcacaaataaagcgtgttgagcattccaaacttaaaattttcattcattatatcatacaatctaaacttcatgataaatccaccatattcaccatatttaacatatttcttctcatttcaatccatattagttacttgattgataaaatttgaaacaagaaggaaacaagtgtaatttcacataaaataaaaaactacaataaacttctaaatcacaacataaattgcacataaatctaacctatcaaattctcacaagtttaaaatgagtaaagactcaaacacaacctaaaatatacaaagcacaaacaaatgaatcaagtcaatcaatacaaaaatggcctcaacttcaaaaaatcatgcacataatcctacatatactttcattttaaccatgactaatgaacaaccaattaattgaaattatgtatactttccaaatcttttcatcaaaccaccaaaattaataatccatatacttgctgttaagggagaagagttagttaattctgttatgactgttcagtactgttaggcttgacagttagttggttagttaggattagttactggtttagctgttaccagttgtattctccatctgtataaatacttgtaaatcctaatcaatcaataataacagattactctttctctgttcaatactcagtatctttctctctttcgttcttggttctactctcttaatctcacatggtatcagagctccaggatcgtccatggagtgtacagattcatcaaatggagcagcagcaagattgaacactgctcaactccaaacacctcaagtcaatcttccaaaatcctatccagtcacctttactcattctttatcgataaagcttgatgaacataacttcttgccatggcgtcatcaagttcatgcctccattaaaggtagtcgtcttcacaaatttcttgattcaactcaaattcctcctaaatttttgaatcgtgatgatgaacgtactaacaaaattaaccctgccttcgaggactgggaacaacaagacaatcttcttgtgtcctggcttctgtcttctatgacagagaaaacaaccaatcgaatgattggttatgatactacagcacagatctgagaagctcttcatgaatattacactgcccttaatgctgccaatatcagcctgtacaaaactcagcttcgcaataccaagatgatcggttccctcaatgactatctgctcaagatcaagaacatagtcgatcttttggccacgatcggacacaagcagtcagctcaagatcacatcgaggctatcttcaatggcctcccacctgaatacgatgtgtttgtcacctcggtcaccacaaggaaggatgcatactcagttgctgaaatcgaggccttgctcatggctcaatctgcaagaatcgaaaagaatgtcaaaagcctcgacattagcaaaggagaagctcatctttcacaaacaagataccctgggttcaatcaatatcctcgcagcaatttctctggtcttcagcaccagaattttggtaatggtcgtggtaattccaatcagtataatcctgtgggtaatgttcagcatcagtacaatcgcagtggtcccaactcaggcagaggacaaaatagctcagcaggccgtggtggtcccccctttggtagaggacaaaacaacacatggaatcaaaagccccaatgtcaattatgccacaaaatgggtcatacagtgaagcaatgtttttataggtttgataaatctttcacgggtccggagtgcttccaacagtttcctcctacagctaatgtggctgagatgcaggcatgctttgcaacaaatgaaactgtcaatgatgacagctggtaccctgactcaggagcaacccaccatctcacaccagataactctaatcttggctctagctcaacctacaatggccaagaacagatttacattggcaatggcactggtctaaccatagaacatataggtaatgcctctcttctctcacctttttcatcttcaactcttcaactcaataatttacttcatgtccccaccattaccaagaacttgcttagtgtatctaaatttgctcttgataatggtgtattctttgaatttcacccctttactttgttctgtcaaagaccaggcaaccaagaagatcttgttggctgggaagcttgacaaaggtctttacaaatttgagtctcctcaactaagtcaccagcctatcattcaacagccattctctgccaataattccaacatacaatgttacaatagtgaaaagtctgtttcgaattcattgtattccctttggcatagtaggcttggccatcctactgccaaagttgttaaacaggcccttcaatcttgtaacattcaatttcctaataaagatttacatgatttgtgtcatgcttgttgtcttggaaaatcccataagttaccattccctctttctaccactgtttacaatactcctcttcaattattgcatagtgatctatggggccctgcccctgtcatatcctcaaatggatacagatactatattagttttgtggatgcctattctcgatatacttggatttatcttcttagaaccaaagatgaagcattacctactttcactaaattcaaaacccaagtagaattgcaactaggacacaaaattaaagctatccaatctgattggggaggtgagtatagatctttcactacccttcttgaaaacagtggtatcattcacaaacttgcttgtccacatactcatgagcaaaatggtgtggtggaaaggaagcatagacatattgtagagtctggcctaactctacttgctcaagcctctttacctctcaaatattgggatgaggcttataggacagctacttatttgatcaatcgaatgcccacacctgtccttcaaaattcaacacctttagaattgcttttctctgttaaacccgattatacacaattaaaggtgtttggatgtctatgctatcccaatctaagaccctataaccgaataaaatgcaatataggtcaactccttgtatatttcttggctatagtttgtctcataagggctataagtgtctatctaaagataagagactctatatctcaagagatgtggtctttcatgaatgcaagtttccttactctactactgccatgtttcccaaaaccaagcatgatccacctggtattttcagttctggtataccacctctcttacccactggtttgtcccctgttccttcacccaatctctctcctaatccatcttcaacaccacaaaccagtattacacatcctctccatgctcctgaacaggtacctactggtatacatcgttcccctacatgtttccctgccacagaccccactgttgctctcaataatagcactgctgctataactggtaatgttcctgcaacagaccctactgttgcttctgcagatgctgatatggctcctacaacctctacacaccctatgacaactcggtctaaagcaggtataagaaaacccaaggtctttttagtgttttgggaaccaaaaacagttaagcaagctcttcaagaacctcattggttcaatgcaatgtcaactgaaaataaggccttaatcagaaacaagacctggacacttgtgatcttaccacccaataggactgcaattgggtgcaaatgggtttacagaattaagtataatgctgatggcagtgttgagagacttaaagcaaggcttgttgccaaaggctttcatcaacaggtgggctttgatttttttgaaactttcagtcctgttgtgaagcacattaccataagggttgttttaactattgctgttactaaaggatgggcaattagacaacttgatatcaacaatgctttcctcaatggtgatcttgaagaagagatttacatggttcaaccacctgggtttgaagatccacagtatcctgacagagtttgcaaactcaacaaggctatctatggccttaaacaagctcctcgagcttggtttgcaaagctttctactgttttacttgagtatggatttcaattctctaagtcagatccttctctgttcattaaggctactactaccagctgcatttatatttgtgatgtggatgatattctcatcatggggagtgatgactccttggtcaattctctgtaagtgatcttagcactaaatttgcacttaaagatcttggtttggtagtatatttttttaggcatcaggtcaccgaactgatgctggtcattcatc

SEQ ID NO: 381030 - DNA, 3100 bp, Cannabis indica
ccgcccatctttgatttctcaacatttggggagtacgatcttatccttgcttccttgttggaaagaagccataggtgaggtgtcacctaacataaaactttttggacaaagtttcttctcatgtttatggggtaaccccctcagaataacctttagagagaggtctatcttgggttgcctccactgactcataatacaaagcatggagttccctccattaaaatgtgtaatggattctcttctcttgttatttgcttttgcccctgagtatgccactcaaaacctttggcataattgccactgttatctccaaactctaggtcttccaacaaagcttttttatatccccttcatatcgattaattcaggatagttatctcactaagtacatttgcttctctcttgtaggaccattgattaagaggctcaagccttacagagcaggcggtgatgaacaatgtagtggagatggttgttttgatgatcaattagcttcatcgactgggttagtcatagattacatcagcattccatgtgatgttaaaggcctcctctaagcatttgcctagttttcttttcttgtggtcgggagttacccaatctctcattgtttggtcctccaagtgctagatgttttgacctaggtgatgcccgaacgctggttgtacttcattcacgtgcatgacttgtccttgtggttgcatgtccattaatttccttttgatcacttaggaaaattttacaaagtgatgaatacatccttgagaaattcattgtcaagatgctcgcaagccatggccttttctttagattcatgtgagcaaggtatcactgacactaatgacatgtttttcaagagaaagaaccatgtaaagatgtttaaaagtatgtatgctttgagattatttctagatgcttctatgcatgcaagcctttgtaattttgagattcttgaatacatgcaagccttggtgttgttgagattcatgaaattatgcaagtttgtttatgttgcctagattcttgcatgcatgcaagccttcccaaaatgcttgcatggattatttcatgcaaccctacagagatgcttccatgcatgcttatgtaagcctttgtgttgtcgagatgcttccatgcatgcgagccttcgtgttgtcgagcttcttgcaagcatgcaagcttggtcatgtctcttagaggcttccattcatgcaagccttgccaagatgcttgaattcatgcatgaatgtcgagatgctttcacgccagcgttacgagatgcctgcacaaaataattaagagatgcttgcacgcatacaaggcttggtgttttcaatatgcttacaggcatgcctcatcgagatggttgcatgcatgcttttttgtgatgcttgcatgcatgcctttctgggatgctttcttacattctttgttgagatgcttgcatgcatccttgtcaagatgcttgcacacatgctttgtcaggatgcttgcacgcatgcttgtcgagatgcttgcatgcaagccttgctgagacgcttgcaagattggctcctcatcttgacgcttcattcttcaagttgaaagactcgaagtggggatggatttggcctcatcacccaaagcttgattaaaaaacttttttaatggcgcacgttgcttataactaatctcgaaacgtagcttgctaatttttggggttaacaaccatttaggtgttataatatagtttttttatttattacgatgttaattttagtaataataaatcttgattatatgttttttgaatattattttttaattataaatgggaaaatgaccactacaagaaaagcaacatttatcttcgttttttttactagtctatcatctattaaaaatcttataataaaaaactttttaggcaaagacgtacataggtcccgaaaacacaaaagacatactgggaaataaccgaagagattggtattttttctaaaaaaaatgataattttaccttaaattgaagactctattttaattcgttgacgctaagacccacaacccaaaaaaccctaaaatcaaacaataaattttacatgatttttcaaccaacgccacaaaatttccgagtaccatgagtgattttccaactaacacaatcgacttttcgaccactaccgagggtatccaaaccctatatctcacgagcttaaaaaaatcaaaaaaacatacaaaaaatgtaatcaaacctaaaagactcatattaatgagattgatacctcgatgcaagataaaagacaacgtcataatactaaaaaaattatgttttcttgcctattttaaatattcagctaatgtattttcatcagtctctatagtcattgcctattcaaccatctcaaaactagatagaatagccgaaggcagaaaatcgtcgatgaaataatttactgacaggttaacaccattggcaatattataaactatagcctacgatttaaaatcattgccatagcctatggtttaaaaccctaggctatagtgtagatgacatttcaaaataaaaaaaaataaattgttgttttaggttgttaactacttttacaaaattttccatacatttctatgtctttaatccatttctttgatattccttcctctttattattttccaattatccaaaattaaaggtttgaccaaacttaatcaatatatttagtatctcaaatgaaacaaaaaaacaaagccaattaaaaaaagtttcttcaaaataaattaaaaagtagatcaagaaaaatattacaaaccatgaacaaaatgttcttttcgagcagagacgagaaagagtaagaggggaagcctgagatattcgagctttgctatgggctcgaaggaaacctgggtctcggggttgtagacggctgatggcaggtcgagctcattgtgaatttgttccttcaaagagggagagaagatgagagagagggagggagaatggacgacgcgactacaattgtggttgtgggtcttatgtcgttgaggaccacagggctgtgttggaaattattttaccaggatctatttactatcatgtatgttttactaacaccctaa

SEQ ID NO: 381031 - DNA, 3142 bp, Cannabis indica
aaaatgtaaaacttcattaaccatgttaattattcaaaaacactcctaccaaagaattttccagtacatgtaatcaattacacatatattgtcatatagtaatatgcagtgttatataaaaggggacctcctaaagcatgacactgtttgtctattgactctatatgaattggtccacacaaacaaacacacaaaagttttggggtactgagtttggtccagttacattaataagtgccttcatctgtggcccaaaagcaggagctcactctctccagtccaatcaatcacaccaatgaaccaatgaccaaacaaaaaacctgggttgtttcacaaatttcctttatgatatgtaatttaatttaatttaactataaaagaggagtgtacttaattttcatatcaaggaataatactagtctcccccatgcatatatctcataataataataataataataatgataataggccagctataaaactgtgtcaaacatttctatgcagtctcagtctgaaagttcaaaactttcccaaaatactagaacggatttaagctacaacaaaaagaaaaggccacgtctatgactctgctacaaaaggggcttgctttaacattcccgaattctaaacagcttccttgtaataatatgtttgcaatgaaagataacggttgccataggatgataataatggcaaaccttcatgacagaaaaatatccgcaaatgaacatcatcatcatcatcatcaactcatcactcatcagtagtagccttgggtgaattctctggggtgttcacatccgaagaagccttgcctttgtatgcggttacagcaccacgaaactcttcgactatggaagggtctttgaatttcaatgcgtatgtagagaaaccgcctccaccttcgctattactgttcacacaggcaaaggatacgcctttcttgtccatacttgtgagctttatgtctgggaatagactagcgttcaagattaaccggtaatttccctttgttctcatgagaagtctggccttgtccttgtcaggttttgaaacgttgatcttgagttcaccctttccacgttctttccagcctccctccatgaattcatacaaggcagaatctgcattgaaaacaacttcctcattttcttccccggtcgcaagttcaacctcttgcattgatgggaaaccgctgccttcactcttagatacagcagcagatgtgcttgatgtgccgaaaagggaagagtttccattgttagagagaccaagaccaaaagatggttgatcagttttcgatccaaaaagcgaaacagaacttgtgccaaatgcagatgatccatcctttgcaatagagccaaaggaaaatgtagacgaggaaaacccagttccggaaagattagtaaaagcattttggctacttgaaagctgttgaaatgaactcaaaggagtaccttctccacttgggtccacattttcagtcttctcatctttcttatcatcatccccactcttctcatcgttttcagtcttatgttcgcttagagctggttcattatctgtaactggcttcacttcatcaatgacagtactacttttctcctctgcagctgattctgcattaacctcaccctcgatgttggcctcagccttactctccacttgcacctcagcattattatccttgacttcagactgcttattatcatcatctttacccttctcgttctcagcactgatttttggctgtccatctacatcacctgacactgttttctcaccagcagtttgtgcttctgtcgtaggaagcaacttgatccctgcaaaaggattggaagagggagcagagggctgtcgacgaactttgacgattcttcttgttgccaagacctcctcactggctcttttgaatgttccactttcttgctcggaaacatcatcgtcatcatcaagacctgggttatctcgagagatttcccttccggcagccctcttcttcgagggtggaagagcattttccgcatcccccattagcgaaatatgtcaaaaagaaactagaatttaattctcagtggtcttgaagttccaggaaatgcagatctctgcaaatcaacagattatattttgcaaacaattaccaacaaacaaaaccaaaataaaaaatagaaccactgtgcttattcatgcaatgaaaaaagttaagaaattaaacccaattggaaatgaaatgttcaaatacatgtttccgaaaaattgtcaaaaacatcattaaaataaatagctcaagttactcactccccagtttccagcaaaaataaatctcaacactcagtcctgactcttcttttaaccttttctattccaagtttcaaaccatgaaacagacacactaaacctattcctcagctttgatacaatcgaaaaacttgccatgcaaacatagaaaaaaaagcaagggaagattttaaaattcattcacttctatgattagagaactaaataatggggaaaatgaagccaatcaactcagcaaaatttgagagtataaaagtttagtgctataagacaaacaaaaaaaaggagttaaaaatcaaaacagcaatttttagtactcaaaattctagtacaggcacatacaaaaatgaaacataaggtttcttcaaaaatataatcatgaactcactcaatctcatctcaaaaaacaaaacccagtatatacagcgacctaactatactagggtttcatccctagttatctacaatcaaaaccaaatccaacctagggtttaaagctgactaaatttcttttaaatgaatttcatttcatcaattttcccagtaaccaagtaaagggtaaaacgcaaaaaccccagataatccacaacataaaactttaatgcataaatctattaaaaaaaaaaaaaaacaacttatcctagaaaaatgaaacgaatcgaattcttcataagtattgaaaaaataaaagtgggattggagtcaggacataccaagaatcaaggtgaagcagaatcagaagaagaagctgggaagagtttaaataaagggggaaaattcttaagaggtagagagagagagagagagagagagagagagagagaggagtaggtaggttggt

SEQ ID NO: 381032 - DNA, 3387 bp, Cannabis indica
tttatttttttattttgattaatggagtcagttgtgggaatatcattccgaagcgtgggttacgttaaggagaccctttcttcgtacttgtttcttctttgtttggaaggcctctcgtgtcttatcaagaggctgaacgggcagacttgattcacggaatttactttggttgcaatgggctcacattatctcatctcttctttgtagacaataattttgtgttccttaatgtgatgaccgaagaaggagagtattatatgcatcttaaaaacttataaatgtattatattttaataatttttattttatataaaatatataccattaattatattaaattttttaaaacaatatcttatttttaaacaatatatctatcagcaaaaataaattatatttaaaatattataacaaaaagttatgtgaaattttattagaaaaataaaaaaaaatatatattattaaaaaaaattataaaattaaaattaacataaaataatattaggaaaaaaatattaagaataaaaattattttaaaaggtttacttatcatgcaaatagaatttctccaaaattaattgtggtgcttgtttaatatttagccatatttagccaaaggcaaattatgtaatccctcacttgattttgagggattagaaacctcaactagttttaaacccttagcttagttaagaatatttatttttggcatccaatggtgaggattgatttacttttaaagtagggataaatagtaaataaaaaaaggtaaccggatgaaattaaaatatttttatactttatggattaaaataatactttaatttagtaaagtaagaatctcaagaaaatttaaagctaaaggagaagggggatttagatttccatagcagaaataaaaaaatgaaaaaaaggagaattaagtaaataggaaagcaggttagcaactatgggctcacaacaaagaagattacatttgcatgtttgctaagcttgaatattattgatgttaagacattgatgaacttacccacgttttgaattgactatatacataccacctctcatctctgtgcctattttgaacaattctcctgaatatgttaaacaatattattatatgtgtatatatatttatataaatgacagctgtagctgaatattcataatccttttataatttacattttaacgtatagatatagattactggagttaggtgttcaaaaagttaattctttcttggcttataattgttctattcaaactcagcactctatttattaatgatgttgtgtaatcacacttagttgcttctcattagttaggtaggtttgcaagttcagaaaattacactgtgcaatgatataagtgatgtataaagatcttatacaattgattagtgcacacgctaaaggaaaaagatggccacaaagaatttcaactcatgctttccattatgactaatcacttatctaaatgaaaaatacaaatctgctagtaaagaatacatttttctttactaaaaatacatttcaacaaaaattattttacattattacctctcaaattttgcttcaaaatttattttaaaattctaaaaaacaaaaatgtattaaaaaattaatttattgacctctgttttttgtgtcagccggtacgtgaacttgctgcaagcggtaagtctagaaaaactaaaaaaattgtacaatgttagtttttttgtctcatgcgaggtgtgtaaaacctcaatatgaggtgaggtacttcataacaccccttagccaaattgaaccatataccgtttgtccttttcatccttctaaattgattacagtgattactgattctccttcttctccgaaatgggttggcttttgttcttaagaaattcaattcaacttcccttctaatcgttcctattgttgggtttaggtttgatctacaacgattgttgaaaatagccctccctattttcgattctgtatgtgcatcttcaccattgtttggtgcgctcaaagtcaaaggggctctgaaataccgtgtatgctcaagtttttcggatcaagaagatggtggagactggcagaggacatagcaggccactagtgtcgtgatatggacattggacctcaattttttcaaagagcttaatgtggtttcgactcgttctggaagtgttgataattcgattataccggaaaagttttcgtatttgaaagcattttctttttcatcagctttaaaaacattagctcaacctccttgttctcagttcactaagaaagtttttgtcaatggggatggtcaaggaatgaggtaaatcttttatatttaaatctgggtattacaatattcgatttagttttgctacttaggcaggttcgtgtgaaaagttctattattagggcccaagtttgaagtaaagaattttagtttcttgccaaacatgatccttcctaactcaagctagttcaagaaatcacctcaattgtttcccagaaagatgacaattgacaaaagaacctaatggaactttacaaacggaattcagttttcacaaatgtttttaaacttaataactcccccttcatcatctttcatgatctatatatttttttcatatacaattggaattctgtgggatatacttatccaaatactattagagctatgattaactgttgcacaaacataaaggttgaacgcaattttagtgatcattcatttattttcatattatgaatttacagatcaaagatttggcagagataattaacgaaatgcatgtaaagaccactttgagcattgcattgggtatgtaatttctctagataataaatttatcttcagtagttttatctatggactatggactatggacattagtaaattaaacttcttctatttttcctgaaaataggacccattctcgatgatttcatgtcatccacaatagtgaagatgcccatgtgaatagaactcataacagacctctctgtaggagaagcttcataaatttccaaaaccgttcgctgggagtaacagataacattagaacatatataaaaagcaggattttttattgttttgttgacttgtctaacctatattcatctgcctaccccacgtagactttgaagatcaattcaattcaagaggaagatagtcatagatgcattcatggaagctgattttgaacttctcacctcacttatagggctgttgaaaaaatggtaaaaaaagagcattcatatagttttttctttccatgaaaggagtactactagtttctagtttttgccttgggcaatcatatcatctttgtttgctatataccttacaaaagctcaatctgatgtgaactaattcatataaaaatactct

SEQ ID NO: 381033 - DNA, 2254 bp, Cannabis indica
ttttttgtttgaatccaaccataaacatcagatttcaatttttatccaatttcatcccaatgcaaagaacatagaagtttaaatctcaacacatcggttaattccacaatatagactagtgtgtcaattaaattagcaaataatactcattatgagaaagctagaaaagataactcaaatacaaaacttcacaccattttgataacatcaacccaaaacttgcaataacattatcttgtatcattccttcatcgagtgaaaatgtatagcatttaatcaatataatagtttactctgaatctgatgaatctgggtttgtactctgccgaacactcctcctcgtagacttagatgaattatgcgatgattcaccttcaaaaaagattactttggatttcgccaacctctcttctagttcatctgtgctgaacccatctgttccaccaagctcatcaaatcccacctaagaatacacattaaaaccatcaaaatgtcaaaagaaattcaacaaagtaaatatctgtatgaccagtgaactgttttatgtagtaacataccacataatcatccactttggtgttctttatgagggcgagtgttggcagaacaactatctttaacttctcggacaagaatgggcttttctcagcatttattttcacaaaacgagtctctatatgctgctttgataatatactcaagtgcttgtccatcacctacaaataaactgtaagaatcacttgtctttttctgtttctttctttaaaattttatttttaacataataaactatatgaacacataagaatattccatggaacaagaaagattttagtagcatatagagaacagttgaatacattatgcttaaatggtttaactacagatttcttcttttttatattataatttctcaaaggagaaaagacagtttaagaattggctatcaaaatccacttcttaatccattctacctgtaatatcagatcatctccctcgaatgcacatcagtataaatcctacattcaaccacaaaaaatcccccctatatgttcgtataatagcaagctactgagttcattcactgccagcttatatagttcactagtttaattttagaaaccaggaaccataaatgggaaagaaaattatcgtttatgttgatctatatcaaattctaacaacaaagtctaataacatttggccaagaaaaccctaaacagcatggatttgtgctttaatcattaaaatgaaagaaaattaccttgcaaggccaattttcgcggtagaaatgacagacaacgcgatcgctagccttaacgacggtgaagaagtccttctcggaagggatctcggagtaatcgccatggccgagggcgatccaacggctacgcttctccgccatcttcttcatctgctggagcctccgctccctcagcacctctatatcgtcagtgtcgagccgatccaatgccgcgatctcatcatcgatcttatcctcaaccgccttcaccaccgtcaacacctgcttctccagtatctgttccgccaccaaaaaaaaaaattgaaaaagaaaaccatgaattgtatgcacaattatgtagctatgtgattgtgaattgcacaaaattgatcaaaggaaactacctcctgaaccttgttctccattgatgatgaagattcagtgattcagtctcacaggttttggtttttgtttttcaaatgcaaatatatttgaaaatgaataatatcatgagtcactgagccatatgtttctgtcgctccacacgacgccgtttagttacatcttacttacatgggctacttgttctgcatgagcgggttcgtttcatcacgacccggcccaaatatatttcatttgatttttcttttctcttttttaatgttaaatccttatcttataggttagcaaaaaaaatcttatgatattgattaatatttgtcaaaagctctatgtttatggttttatttttctatattattttaagaatttgtgtgtgtttaatatttctttaaggaatttaatatttttaaactattttttgtatttttataaaaatctatatagaaacttacattgtaacaacctaacttctaattaaaattcatatagcaactcacgtaaaaattaccaaagtaattatttgagtaattaaaactgtaaatttaaaaaaaaaattaaaaaaaaaaaaaaaaaaaaattccttttttaattaatattttaaaaaataaa

SEQ ID NO: 381034 - DNA, 1454 bp, Cannabis indica
acatatatatgtactgcgaaaattttgatttttagtcacaacaaaatttgtaactaaaaataaaataattgtgactaattataaatcatcattcctatgttgtgactaacactacaagaaatatcacttttgccagcacatttttgtgctggtaaaagttgatattgcgctaataaaataaaatttacttgtgatgtgttggcaaaaggggttggcaaatcaatattgacattagaacttttgccagcataaaatgaaaagcgttggcaaaaatgactttttccagcgcgtaaatgtgctggtaaaagttagattttagctactacaaatttacgctggtaaaactttgacctatttgccagcgcagtttgtgaaatgcgctggtaaaagttactttggttaaaattacttttactagcgcagtaacgaactgtgctagtaaaagtgacatttattgtagtgtaagaggttcgtaactaaaaatattagtcacaaaaatcacaatttgttatgactaaaagtaaattagtgataacttgtatgatttaaatactatgttttgttacaagtaactatttgttgtgactaaaagttaaatttagtcaaaaaaaaaatttatgttgtaattaaaaattatcactaaaggtagttattaattatttgtgggaattatgtacctctccaactttttccttatttttgaaatcaaataaataataacactaataaaataaacatgatgtgcatcatttttttaaaattaggaaattaataagtaaactaatttgccaaaggaaaaactaaaaaaaaaaaaaaaagttgtataaagaaatatcttaaactttattagtgtatattgcacacacacatatataaatatatacattttataattttttttctttttgaataattatttatttaataaaaattcccatcctttttctattaattttgagtcaaaagaataatattccattgccaaatatagtgttgcttatagagttaaagagtcaatgaaatcctctaaatgaaaaaggtaccgtacacatacagctcatacatagaattgatcacacatatatatataaatataatatatataaatatatttaattatatataacctatagtgttatgaaagggccacattagaaaagtgatatatgatagtattattagagaacaattaaaagacaaaatgagagataaaaagataaccttttgaaatgagtttgaactttgaaggcaaaaagtttttttaagtgacaaagtggaaaagtgatacatatatatatatatatatcatatgtgcttgaaataattgagttaattatatgtttgtttttaataaattaaattaattaattagggtaacattaatttatagtatttgtctcttttgggtttccatgctatatagctagctaactccattattatatatatatata

SEQ ID NO: 381035 - DNA, 1454 bp, Cannabis indica
tatgctatattaaagattcgatttcgtttgcatgtaataatattgttatgatcatttataagattcaaatatgtaatatgattattatttaagtttcattttgggaaacatataaactatctgtcaagttagagagatggagatttgatccaaacaataatttgaataatattaattgttatgattaattagttattaattaagctatatagtggcacaatcacaatttatagatatataaatctgatcaattcattaaatataagaagaatattcattaatagctagcctagcctagctagctagctaatatatatatagtcttataattatgaaaaggttattagattagatacaatatttttcttggatagatgctcaatatttactcctaatggttaaatttgatattataactaatctaaggtccaacaaggagacacacatccatacatctatgttatataaattaacttttttttttatatatacaaaaataaccaaaattctccagcaaatgccagacacacacacacacacattaataaattaatagaatataatggaaggtccacccaatgaatatataatttaaataaaataaataaataagagtgatgagaggggaaggagggagacatgttgatgagctaattgtgtattgtattttatctccttggattctggattttccatgttgccaagtttcctcgtcacacatggatatgtaaattatgcattggaatttggaaaaatgacactttgattgcaaattgagagctgtttcgaaatctatatatatatatgttttaattaattgggtcgactactccatccattgatggatccaaacatcctctcaatttgggtgatacaataaattaaattcatttacttgtgcacaaaaaacaatatatacatgatcagtagtactgaacctctcatttcagtaccattaatataccttatttcatgtatatatacgtacgttcttgaaaaatgtaatatacttatatgcataataaatattaattagcttaattaaattaattataacatgtccaaggtatcacactcgatcgctacttaatcagcattctttaaattattaatttgttttaaattaataaaagagaccaatatatataagtaagaaataacttatatatataattaataaattgaacatggttttcagtgctggaaaatttgggttatattatttaaaaccatatataacctgagctcagctgattcgcaaatcccatattagttatagtttatttcatatatacatgttattaataaatagagttagaaagagatagtcatgtgtatttaattaatttctattaatataattatatcatattgttattttacttcttaagatatttaatttaatattacatgatcatacaatcgattagttttttatattatttattaaaaat

SEQ ID NO: 381036 - DNA, 2330 bp, Cannabis indica
gcagaggtacatgaatacggctgaacattttactccccacttctcagaatcaagatcaaaaagcagccaaagcacgctcacacaaagcaattcaatttgatcaatatgttgattgcccgtatataatcttgccccaggcattccctcagagtacttgttcgtcaaatggctacctagagcttccataacagctttacacacaaaattctctgaagctatcaattcaatccccctgaactgcctttgcctctctttctccatgatttcgtgaatctccgggtccgcaaccttcattgattcgtttccccagcaaggaatcgatttccgcctcccaccaatccccgattcaacgaaaacgcgtttcggaagattcttaggtaagaacgacgacccatctctcgccctcttcaaacacatagggtgtcccaaaatgctaaacttctcatcttccccgtactccacctccccattttcaaccctaacctcctcatccttcctatcaagcaactgaagcggaacagagactccagaagaagaagaagaagaagaagaactcaccgaacagcgaaacatattctcatcggccatcgtgggcgtcaccggagctgaagacatatgagtactaaaccccaacgagagactcggttgagcattggaaaactccatatgtcaacaacaaaaaaaaatgattttgaatttcttttttttttaagtatagcaacaacaaaagcaacgacaacaacctctgaagaaactacagcggaagtatcgaagtgaagatgaagatgaagatgaggttggaagtggggcctgagtagaagaagttgtttccatgaaaaagctttaagaaaccaaaaccctagcagagaaagatgaacctggatgtaatattatgttatgttttgttttttatttgaattggtagtgacacgtggtgaaattttataggttgctacggggatatttgacttggaacaaaagaaaaggtgtgaggctccatgtggattggataacgtctaggttcatttctctctccatttgtccaaaaatgaaaaatatatctaataaaataaatcaattactgaatgtcccatgaaaatgtctaattagtaattactagcttagaggaagtttcttcaatgttggaaactctacaagtgatgtggtttagggcaactctaatattaattatccaatttagcattaaatttttttcaattctaattataacaataaagtttacactatgatggtgtttggtaaagtataataaaattataaataattattgtaatagaaataatgtggtgtgtaattttcagtagcaattggcttcaacatgtgagattctataagaaagaattgggagagagggtttgggaaacacttagagtgaattgtatgtaggactgaccagaatatttgtttaatcgcgaaacatgcattgtttgcattgtatggcatggtgtgatgtggttaactttattcgtggtgcaattataattaaattttttactatcgtgagggtgtgattcaattaagcaaaacaccctagtgaaaggtaagaatattgttccgaaggctattttcactaggatgttggtcaaacagagtggtctaaggttctccttggcaatgattctaccttctctgcttactctgattgatcctagctcaatcaagatatgtgttgatggttcctttaaacatggatatagtgctctggcggtagtgtgttacattcttgatggtgatcctcgggttgtcactaaggtgtgtagagcttctagtgccttgaaaatggaggctcgtgcaatcttttctgcttgcaagtttgctcttgagcaggagtgggaagagattaccatctgttcggactgtaagcctttggtggatttcctttgtggatgtgctaagtgtccacattggagcatttgtgacattctcttctgtattttgagttctctattttaagtttgataattgtaattttcagtttattgcaaggtcccttaatggccaagcagatgctattgcagtttggactcgtatgtctaaatgctctcgtgttttcaatttcggggagctgccccctgttgtggtagtctaagtttcttcttcattgcatttctactttgtgacaaaaaaaaatgttaaaaattgcaatatgtattaagagttagtcccacattgctaatgtgtggaaataaattgtgatatataagatgaaagggctactcctcccattgccaattggttttgttatagtgagatttctctcacctagaaactcgagaccagactcctctttaaaggacacgtgtattcag

SEQ ID NO: 381037 - DNA, 5319 bp, Cannabis indica
gatcatgtccactgagaaccaaagcatggcgggttaatatgtacattattgtcgggaaatctcggactcatgcgctggtccagtttcccctttctcttaactacaccacacagcacccgtgagtctaggggcggacccagaataaaattataaatttgattctcattaatataatacaagctactataatttattatcaacaaaaaagaaaaaagcattttgtttgtttgtgatgcatatagtcttattctgatttgtgcagagaggagtccaatgtacataatcctacttgcactacaacaaacactacaagaaaattaccctatttgagcgattaagaactcccgtaatagacctatctcagcggttatcgaccgtcgaggatctgattgccgagatagggtaccaatctcagtgattttatcttaaactaccgagatagctgtgcaatcatcttatgggtttggataatctcaacacctagaacacctggaaccgccaagatatgtaccaatctaagcggtcacatcgtgaaacgtcgaaataggtagcaatctcgacactttgaaattgccaagataggtagtaatcttggcgagcatctatgatattttcttttcagtgtcatgaaagtttatgtacgtatgacaacattatcatttcaaatgtcgatcgtcacaaagagttattaaaaacaaataatgtcattttaatactaaatgttgtataaatgaatattaatgacgtaatgtttaaaaatttagcaagtataatgttattataatatatattatttatgatatattattataaatattagtgtatggagttatataaaatacttacactacagcctttagttgatcatatatatttttgtcacatgaattttgagatttttaatcacaataaaaaggtactataactaacacataatatttaaatacgaattgtcacttcctttcaaaaaagatacaagtacgttgtcactaatttaattttagtcacaacaattattgcgactaaaaatacatttagtcacaacaaattatcatttttgcgtataatacttttagtcacggactttaagtcacaacataagaatgatgatttataattaatcacaatatttttacttttagccacaagttttgttgtaactaaaaataaaattctttgtggtggtattgtgtttaatatctcatttttttttcgtgtcatgccttggcaattcactacaagaactgaagttagtattgcgctggtaaaatagaatttacttgtgatgtgttggcaaaaggggattggcaaatcaatgttggtattaaaatttttgccagcatgacttttcccaacgcgtaaatgcactagtaaaagttatattttagtcactgtaaatgtatgcaagtaaaattttgatctctttgtcagcacagtttgcgaaatgcgttggttaccaacgcagtttgcgaaatgcgctggtcaccagcgcagtagcaaactgtactgataaaagtgacatttcttgtagtgatttgtaggatcttatcgtgttaagtccaatcccattatttttttataccagatcgtattaatgtctcatgggctcgtaacgatttcgtaccatattaaaaagtccagctcttattcacaacactactaataataataaaagccaaaaaggaataatgaaaccaagtctaaagtcttatgtagtaatgtttttaatatctcggcggcttacactacacaaattaatgttaaccctaggtataccaacttttacaaaacaacaaaagttgaaataaattattattaatgccaataaatcttaaggagagcccaaactttcctatatgtatattcaaaccaagtaatcataattaacacatcaaatcaaatggatcagaaaactcacatagccattttcccaaaccttccaattagtcacctaattcctttcatagaatttgccaaacgcttagttcttgatcatcacaacttccatgtcacgtgtcttcttctcaccaccactgaagatcacatctctccatctcgagccaaaatggctatcctagactctacccgccgccattgacatcatctttcttcctccagtcaacttagacaaccttcctgaagatcacaaacttaggctcaccataactcgctctctttcttctcttcaaaccactttaaagtctttattaattactaacagattggatgctttctttgctgacctttttggtttcgaagccattgaaatcgccaaagggttaaatgttccatcatttattttctttacttcaaatgctttgtcgttggccttgtttctccacttgccaaaccttgaccatgaattactatcctctgttcgatttttaagtgacctaaccgacccgatccaattacccggttgtgtacctttactcagtaacactttaatggacacaatgcaagatagggaaagtaagaactacaagtcgcttctcaacctctccaaagggttatatttgactgagggtataattgtcaatatatttttagcgatggagtttgaagcaattaaagctttggaagccaatgatagaatgccacgtgtttttcctgtcgggccaattgtgaaaatggaatcaagtgatgatcatgacaagtcagagtgtatgacttggctcgataaacaaccacgtggtagtgtgttgtatgtctcgttcggtagtggtgggacactatcgagcgatcaaatgaatgagttggcattcgggttagagatgagtggcaaaaacttcttatgggtgaccagaagacccaacaatgaatcttcaagcgctaattttctcaaacaaagtagtcgtcaaagtcaaagtcaaagccaaagtcaagataaatgttttgattacttaccaagtggattttttgagaggacaaaggggaggggtttggtggttgagtcgtgggtcccacaagctagggtgttgagccatggctcaacaggtgggttcatgagccattgtggttggagctcaattctcgagagcattgtgaatggggtcccgcttattgtgtggccgctttatgcggaacagaagatgaatgcagttatgcttgtggaagagttacatgtggcgatgagattgagttgtggtgaaaatggcattgttggacgtgatgagattgtcagaggtgtgaaggagattatggatcaaagttgtgaggagggcaagaaggttggaaagtgtatgaatgagcttaagaatgatgctattatggcacttggtgaagatggttcttctaagaaagcactatcggagttggcatttatgttgctaaataaggcttccaattaacactatataaaattagggtatagtatgcttttgttgctgatcaataataagattgtatttgaataaatcttcagaataatataaagatttcttttttcaaaaagtattcttcctattttgtttgaggaaaaaatacataaattgttatatatttttggtaataagatggtttaacttataacacatgtgacaatattatggtagaaattgaaatttcattattcatatttttatgtgtatatataaaataggaaaattgaagatgcatctctatttgttttgacatcagagatagtttttaatttcattttttttatagttgtatacgttacggttggacatccaatctaatctaactttttttttctaatccaatcaaattcaattagcaattagatttgaaaattattatccagcccaatccaattagaccttaaaatttaattcaactactaattgaatttgatcagatcggctttttaattggatatccaatccacacctaatttttaatattaccttgagtttcccagggtaaggagttttatcctaagtctagtggatctagagattctggtgataacagagtggttgatctttttatagattgcagtgattgagacattcagaaatggaattacatatttgataaagaaacagtgtcatccatattgaaagggggtagaccatctggtcaaaataaggataggtggatttggacccgtgagagtaatggacgcttctcgtgtaaatcgactaatctcatccaagctttagaaatggctcctcactatgaagttgcaccgtccctctaggaacaaactatgaaatagtaatattttagaacaacataagatattgtagtggtgtgtatcctatctaaggctctcccaattcgtgttcttcttgctaagagactccatattgaggatgtggcttgcccgttgtgttgggggtgaagagaaatcaatggagtacatatttctctcttgtaatttggcatttcatttgtggcgttcgcccccgtggggtatctttcctattgatgggtctagcattcgtatgtgagactaggtcaaatttatcttggggcaaggaaaacaagccattaatacatatgaagtgttttgttatgaatcaatattgttgacacaatttggtagactcgaaacgacaaggtacacaatagtagtccagttaatgtgaaatattgtattgaatcaattcataactcttatgcagattatagagcctctcttttccctactcctcatccgctgctggtagatggatgtcagtctcccctcaagagttgattaagctaaactatgatgttaaagtagggatagaaagcatgtgcatctcggtagtggctagaaaccacattggtgtggtagggtgcataaggcaagattggagttttctaatactctgtgcggagaagcggcaacttactgtttgaatttggaagttgctaattaaagatgaaggctagaatattatagagagtgactcaagggtggttaccaattcgatcaacgaactggagttttgttgagagattggattggatttgataagttcggttcaattagattagattggatgttgcccatcccttgtaattatttaacatattctgtaatgttttgagaaatttgaaaaaaattaacatgcccaaaatagggttcaaattttttttccacgcgtgactcttttattttatatgcgtgtgaaatggactctttgaacactattttttatattgtaaattcttctgaatttcttaaaattttaaaaaaaatgtattaaataactataatgtacacaactattaaaaaaattagacttttaattttttctcaatgctaaaatagataaaaagtgcacccatgcatccttttattgaaagtttataatatatgagcattgttattgggtactagtagtgtctagcacctctagacat

SEQ ID NO: 381038 - DNA, 3848 bp, Cannabis indica
cttgcccaggctctgctactgtatctcttccttcatcctaaaagctctctttatacaaccattgaagaagcatcaacgaatttggagcttaagaaatgaagtcaattttcaagtaaaaaagtattcaaagcaggcaccttacatttatattttattaactttgaggatttaaagttaataggttcaaagttgtgcatgaataagaaatgccaaggtattaaagtgaaaatggaatcaccatttgcagttgaaaaaactcccacgcagtcattcagggaattttagcttttaagggattacaataaccttgtaagtatgggatatcttgagaggtgattcctttgaaacgggcctctgctcagaccagagctccaaatttacagtaccagttccccagtggatgaggcacttgtaaatctcattaatatcaaaatgattcactaaagccagacccagacatttgtcaatgagcatccattcacctagaatgacaaatacaaaaagccatttgaatcagtaagtaatcatctcaagctacggcagcaaatacaagtcagagctctaatagaaccccacaagcgtgttcaacatttggattcataatataatgtggagctaaactcctaacccattgtcacaagagtactcattgggtcatgctaggaacacttataaattacacctaaaaattacacgctggtgcaattgatttcaactacacaattaaaatttatagcataataactaaaaagaaaaatgtgaagaaacttcacagcattctatcaactcacaatctaatcatccaaatttcatctcaatttctctatacattgttgatacttaatgtttaagattactagtttctcaataccaaaaacagtagagaaataattaatatcataaaatcaggtgagcattcacttctacagtaaagagaaaaactaggcaacaaaagaaaatattgcccaatgcctaaaagccctacagaacaataagattgtatagttcaaagcaagagatcttgtagcaaaacatttcattccaataaattttattgagaaaatagattataaggaataccttggtaaaaataaatattaaaattcaaaatgaggaaaataagaaatctagcattagagcctaacacatcagcgttctccactccctacacaagtctaggaatgataaattctcaaaatgtttggttctattgacccatgatgctgtccaaaatctgattttctcccaaagaaccttgctgaactttcaattccttcgaatatcctgctatttctttcaatccatattgcccaaatcatagccaaaattgcagtcctccagattataaccctttgtttgccacccactggtttgtttatcaaagcttgagacaccaaccgaggcaagacccaaaccagctcaaattccttgaatgaggaaaacaagattttttgaatgtaattacattccatgaacaaatggtcaatggattcactgctggatttacagcacacacaagccaggggacaatgacataaatggctccttttttgcatgttaccatgcacattaacttttctcaaagccaccagcaagccaaacactatcacctttacaagcacattacttttccaaaccactttaggccactcaattccacttgaaatctgattcgcagtaaaccattgaaaatttgatttacatgagaatagaccccaaagatctggcttccaaattctgctataatcaactactctgaccaagtttacactttccatttgatgcatcaacccaactaggctaggaacctaactatccatcaaattccttctgaagttaaatcccagctgcaaaccctatatcctcctatcctccttcctcaatccacacatcctcccatcctcccaaaagcgaattttatctccttttcctactttaaaggaaaccagactcaaatattcatcatacatatttgatattcctttccataggcctttaaaggagaatttttcacctttttcggaaaactgtctgtgatcccataacgactttttatcactttatgccaaagtgaattgggttcaagaggaaacctccatagccatttcattagcaaccctctgtttctcatatctgatctcccgattcccgaacctcctatctaatctcccgattcccaaacctccttcatttctcggtctacacactttttcccaagctaccaaatgttcacccccaacaaatcacatccttcccaaaagaaatctctcatcaacttctccaactgatgtagtatcgaattcagggctttgaatatagaaaaaaaaagtgtggggagagaagaaaggactgattgaatgagagtcaatattccccctcttgacaagaaggcgcttttccatccgtcaagtctcttaccgcatttatctagaattggtgtctagaactccaccttcctgggggatccccccaaaggcattccgagatacttcatcagccaattgccgacttcacacccgatagaagaagcgcacctctccaccatactctcagccaagcatatccccaatatttgactcttgctcctttcaaccctgatatcgcagaaaaggcctcaaccaacataaccattctatggagcgaaatctcgtcattcatgaagaatagtatatcatctacaaattgtaaatggctaacctggatcttctcccttccaactatgaatccacataattgcacccagactccactgctttgtcaaccattcttcctaacacatccgccagtaaaataaatagaaaaggcgaaagaggattgccttgcctaagtcctctagaccctttaaacttaccgatcggtttatggagtatgatgtagatgatatacatccccctaatccatttcctcaaagtgccaccaaaatccttacgctccaaaactagctcacagaattctcattccaccctattataggccttttcaaaatcaatcttgaataccaactcctctttacctctgcttctatactccacaaaatcattagtgatcaaaattgaatcctgtctcccttcgacaaatgcagctggagtctccaatatagtgtcctccaacacacaagtctagaggtcagaactttggcaataatcttgtaaacactcataatcaaactaatcggcctataatccttgaccttgcaactatcgacctttatagggattagacagatgaatgtttcattgatattgcttggtattctcccatctccttcaaatttcttgaaaaattcccaaagatcctctttaattatttcccacttgaattgaaacacgactaggctaaaaccatctccctctatccctgcagttagctaggtagcaatttcttcttcatcatcaatgatagacccatcttctctttaaattcatgatattgtatttctagcctttcttgcattcaacaggttatgaaaaaatttggaattggcatctccttccctagcccttttgcacttaagacttcagccacacactcctttcttcttcaaagactaacttttgccattcctttttgatctcccttctctcctcggccatggattgattctgtagaaaatagtgattcgaattgtgtgtatatttcatagaatagtacatatttatatacaaagctaggagactaggaaataggaaactaccaacaaaataggaaactactaaatacaagttaccctaattcttttacacctaatatacagctaatattctaacactccccctcaagctggagcatagatgttaatcatgcccagcttgttacaaagatagtctatccgcaccccattcaaagct

SEQ ID NO: 381039 - DNA, 977 bp, Cannabis indica
acagtgatcatccagttagtattaaaaggtaatatttaactgacgcttcaaatttataaagaaaaataaatttaagaataaaaagattaagtgtataaaaattaaaacaaaaagaatttcgctgggaattactcaatataatattttaccttcaattttttgcataagttgatatcactccaatttctttcatcaaaatcaatagtattagtaagttgatccctccaaataacagcagtaactgaagaagtgaaaatcactttatgaattgtatgagtttgagcacaagcttccaacacattatgagctgctctcacctcaacctcacccataaattcctgcaccacaccaccacacaatcaaaacccaatttcattctctattaatacaataatgggaaggacagagaggccatctctgatcttatctcatcaacattaattattattattaatcaaacaaaaacaaaaacccaattgggattgaaaacttacatcataagaggtgtgatcataaggaggctcaaagcaataaaacaaagcataacaaccctttaatgcattcattatgctgtgataatccaacaaatcacaatcaaagattctaactttattggatttaaatgattgcatcaacaatggatcacctatttcaacacaacaaacaataaaaatcaattcttttttactttcttttctcgattgaattgaacaaacaaacagacaaacagaaaccgagcaaatacataccatggctttgtattgctgcatggacagtgtagcctctttggattagacgatttaccagattcgagccgaggcgccccgacggcatccataacacacactgtcttagaagacatcataagaagttggttggttatttgaagtgaaagtgatggaaaggaagaaagaagagacttatagtttgatgttttggtagagaaagagagaaagagagagagcgattgaaagaat

SEQ ID NO: 381040 - DNA, 2024 bp, Cannabis indica
aaaattttaaaaaaatattgagattaatttgttaaaattttcttaagtttccttttttttatattaaggtgcacgattttgtgggtacacataaatatctcccaaaaaattatttatatatatggtgaagaaaggcaacaaaatattgtgtttgtaatgataataataataatgccgcatattactctaatacttttatggctcatagttggtatcccaataattatcaacccgaccacatggatctggaccggttccgatcccggttcagtagcactcgccatggtgccgcctaatccgattcaatgcaacgatggaggcggcggtggtggtgactgcactctctccaactcctatggtgcctggggagaccgaaaggactgccatgtcctaaatgtcacgtacccaaaaaacgaagaggagcttcggttagctgtggcccatgcaaataggaacaaactcaagctcaaagtagtctccaaattctcacacaccataccaaaactggcatgcccgggatctggagaagggccaaatttccttattagtactaagaactacgattccgggatcgaaatcgacacgaagaacatggcggtgacggttgattccggcgtgggactgcggcggctgatagatgaagtggaaagagttgggctgagtttggtggctgcaccgtactgggaaggcgtcagtgttggtgggattattagtactggagcccatgggagctcttggtggggtaaaggtggtgccgtacatgaccatgttattggggtttctatggttgttccggccaagccatctgaagggtatgctaagatcatcagaatagaggccaatgatcctctccttgatgctgccaaagtttctttgggattgttgggtgttatctctaaggtaacaattactgtcattctttacacctacacacactaattaataataaaaattaataacattcttatagatgctatggttggtataccagtaatttatgatttttttttaaataatttatatggtgaaaaataaaattttaaatacacaattataccgatgtaaaaaaaagagcattgctattaagaactagtggtgcttagtaatttctcaacatgttgcgttgcgattggctaagcactggctttagtatttctcaaaaagaaatatatagtttttatttttattctttaagaaaaagaatttaatttataatttttttatacataaaaaatgtttacaaaaaatctatatttttgtatgagaattgttaaaatgtattattgtttttagtattgttatcaagtcccaatattactcttttaattattaattagctagtgtggatgggaattagtggagacatatgtttacattatgcacgctcaatcattgagtttttctctattatatttatatatatattttttttaacttattataacatggagccagctaatttgttatggtgcgtatcgttatttgataactaatttatcatcgataaattataattaattagtgataagaatattattgatttaagtaataaattaattaaaaaagaaaacaggtaaagttgtcagtagagaagggatttaaaagaagcataaggtataatttcacagaggatggtgggattgaagagagatggtttgaacatggaaagaaaaatgaatttggagatataacttggtatccatcaaagcatatagctgtatacagatacgacaatagagttcctttaaacgcttctggagatggcacctttgatttcattggtttccagcctaactctctcctcatctctaaaaccattagagctacaggtacctatacatatatttggctactgtatattaattgcgtttatttattaattcatgcattattttttataatatattcttcattaatgatgagtattagccatgtagtataaatttttaatttggaataattacataaggcaatattttttataaaatatttatatttttacgttcaaagattttttttttttt

SEQ ID NO: 381041 - DNA, 6493 bp, Cannabis indica
aaacaactcgggtctggcaatttctaaataggagaagaaatggcagcccgagaactacatgtccccccttcttatcaaattcccagagccatcaatagcattatccctccccatcatatactcaaagtgagtaaacttacttgagatggttagatccacccatttgatagcctcctagaactcaaaaaagatggcactcgccttctcccgaacaatcaaaggattatcaaccctttccccaaccttttgtttattaccctcgtaccaaattagccacaacatcatcaagtaggccgcacgatctgaggatggaatgttactcatgatgtcaacaatcaccatttcatgatgttctcttcccccaactctccacattagccacccaaggtgttggtgttgggattttatgtcttaaataaagctcaattttcattataatcttatttgctatcaataaagatcataaatcatatcttgcctttatcatatattttgttcacatctttatgattataggtttaatatatacattttattgaattttgaacatatagttatttataattatagtgatgtcatcacagtagaaattaattgtgattatatgattcaaattatttagtcttgtaatttattagtgtatcggatttacactaacgtgataatcagcgatgcagtgtacttacatgtggataaataaaatgtcttttctaagaaattaacaagtaaacttgtatcagatgtattagctatccatcgaactaaactgatattgacagtggaaaatatatcataaactaaccgttaaatctcttttaagtcgatatcacttagttgatcttagatcaattgatctcaatcctgatatggttaggttctagtttaattatgctatgcgggttttttgacttgttcattaccagctaacccgtaggactagcccatgcttacatcttaggaattcagtagtgcaattgagtgggagcattaatcatagatatagaatatatagcttctataactataagtgaaatgatcactactacaaagctaggatttcctgactgttttaaatagtcgggtaaagtgtttatgtcaatctctaagactgttgcctattcaatcttcgaaaaaagtgagtagaataggtgatggtggaaaaccatcaggaaaacttttttcccgactgtgcaaaactgttggggatactgtgcaacatcgtcgatagttttgcactgtcaccttagatgattaattctaaattgggaatttcacatgttccccttccaaaaacacaaataacatttaccccccacgcttcaaagaattgagagttgtggaggcttgcaatcttctctctggattgttatggacatgtggagaattcaaaaaaaggagcgacctttttaactttagtattctttggtcgtggacaactagggacttttggctttcagctgctggattacgcatggcactagatccttgattcgtgaacttcacgtgtgttgagaaagcgcgtaatgcttaggatagcatgttgatggtaatcatgtcatcacttgtactgaggtgaacgcaatgatttaaaaactccttgattcctaaatgttgacctttctattcccaaacaattagattaaatttgtgttttctataatgcaatttgagtcattgatcgaagaggcatgtagatcgttacgctttccttataaataaagtgagaaaaaatgattcaccacttttttccatttcatattttgagttcagactttctaagagagaaaaaattgaaaaatacttttagtgaatgtccaatctgttcgaaaattgtcttaatcttcttcttcaaattcatgcaagagaaaacccaagagcactaccaccaaatttgacaactcctcttccagatctgttgaggccaccggatctctaagaagagatcgacagactaattgcttgggcttgtaagctttaggccaaacattgtcgtctcaacgaggattctattacgattttccactgtaaatcttgccacccccacaatttttatcttcctcaagtaagtactctcacccctgttgaacttttgatttcttttgtggttgaaatgcttgttcaaattttaggtagggtagatgtgttctttgttgatgatttaggtgccaattttcaggtgggatataggatatagtatgtgaaatttaagttttccagagtcctctagaacattcttgagaatttatgtacaattggcatgtatactgtctaaaaattaggatctgtgaactacgttggttgcccatttcttgtgaacatcaggtatgaaatgtcactaagcatattcaaatttaaatttttctgtttgggacccttacggttccagatgaagcatttaggaaccttcagtttattctcaagttctcgatctaattatctcagagcaaagttcaacagggactttgcttttggataacaggtccgacagggacttctccaagcagatttttaggggaggattctctcgtacctctactatttctttttatgtgggtatatatctgcttggtttttcttttgcctttttctctagttgatcatcatgttggacgtctttgaccttgaaacggttgaactgattgaggagcaaactgatgatgctacttcaaaaagtggtaccgaatgaggagtgacttaaggaggtggcttcaaaagtggtatataatatttcactgtgcgagatggaccagatccccaataagttccataactacgaggtgttgaagcgctatcccaaggaatgagaggttcgccatatttcgggtcattgttggaataggttgttgctccatggggagtcacctactgcgtgcgtggacgaatttgttaactggatctgggcgcacatcgtatatggagtgcacttgccgctgcgatgttactttgcaaacttttgcccagcactaggaattgtgcccttccagctcattctgtagtcatacaagctaatgttcaaatggtacatcctttgcatagattggaaaatggaggttccagaaccagagataacaatgtacttttatagtgtgaggtcacattccatatggaagaacagatctaagatcgggttctacaagctggagaggcgctccaagatggtttacccaaccagtagtgtgaagcatgtcccagacttccaggactattggttctttacatttggctttcctttaaagagagctcctacactgtcatttgacttcttggttttgggtatgcgtcattgtttttcctttctttcaaattctttccgcatttagaaaatggcttgctaatataaaaaattctatcattcagccaacatttcacctccaggtcctaccgacttcttggtggcgagggaggctttgtagatggggatgccttcagcggcactgaaggtgaaagggttggtcaccatggccaatcttcaaagagttgggttgatagccccacacctaagcagtgactacttcgatgcttgtgacctgacttaggactcatcggttgttgaggaggacattatcaagattatggttgatgagattcggaaggccaccaaacaggacaaaaagtggttggcagactggaatgtgctcatctagacctagtgagtaaggagaacaaattggcagagcgctttgctgctattatttcaaatgagggcactcagggtgccaatactttaagaaatggtaaaaccccattcaatttttatcacactctacgttcggacatgaaggctcagatcaatcaagggggctttgatccttattttttagaagtagatctccttaagtgtcctatgataaaaaattacgataaggtagacaaaattatgaggagcatagaacatttctatctcaatttgttaagatagatcatttcaacaaataaaactaatgagaagtggagagtaaaatagaataatgaaatcatgcaatgtgtacatattggcagatctattcagaatttaacagtaaaaaaactaataagaaagtggagagcaaaataaaattgcaatttggagagttttatcctaaaaatttaataatggaaattactcgtgtcaaacttcaaagttaaaggaatttacctacaaattacccaaataaaatataattatataaacaaaatactaacataaaagtttgacacatacaaaatacaagctttatacaaataaagcagtgtaaatgttctatttaaatgtaaattataaactaatgagtatttgaaacttaagtacactgcaacaactacataaaattacataattatacagtgtaaaaaaaaatactgattaaaatgtaatgtaaatcataaaaatggtaacaaaataaattctcttggacggcaaatgatatattttataaaatattaatatctcacatgcatttttttttcttgaaaaaaacaaggccgctaagcctgccattgggcaatattatttacaatgcttttgttgttcaccaacgtcatgttttaaaaataaaataccaaatttgctatgtgtatatgtttgtggtgttagaaaaaagaaatcatcagtattataaggttttcaactttaataattttagtataaataaggcttcactcgtatccttaatcatcacataataaaacagttcattgtcacctcacattaagaagagtaggattttgcaaatagcaagaaaaataatggctaaatattcgagcaaagtgaccatcttacttagttgtgttgcattagtctgtgtttttgtactgatatccatgcccattgcagagagcattcaaattggaagtaagttataatatagttaaataatttggtaattgcatgataaattataagtttaattttttttttcttttaattattattacaggtggttttgctggtaagaagaatggtaagctggtatgccaaggaatatatggagtacaaagtggtgacaattgtgctggaatagttaaaatgtttagcttggattctgagaccttcacctttatcaatcctaatcttgtttgcaacaacatctttgccggtcaatgggtctgtgttagtggccaactcaactaattacttactatcataggcatagcctcaaaaaaaaaagaaaaataagagagatagagacaagtgttttcttctccatattacgtatcaacatatttcctaattatgcatatgattatgcatggttgaagggcaatgtgtgctttgtttgtttgtagtcaatatattatatatctttaatttctttcatagtaaaatatttgcaaatgaagatgcccaagtgttgttttcttcatttctttacaattccattgcttgcgtgataaattagatcgaaccatctaagtttcaaggcatcaaaaatcaaaatgttcacatttttctacacttgcaaaatttacacacaaatattaaataattcatatttatagcacatcatagtacactgaattttgtgtatgaattgagagcagttacagaggaagagttttctttgagaggaataattcaaattataactttgccttaactaaaattttacaattttcacgcattaatatgttaaaaagaatccatttcaaaaaaattgtaaaaaaaaactgtgtatgattaacaaaataataatactgtaaatcttgcctcaagtcagcgatatattgttcaactaaatgatctatttgcttggttggtaattatgttagcataaacaatattgaaatttggagaccacatacgaactttcctgatctgatttaagagttcatactttcaattcaattcaacaacgaatacatattcaaagattttaagtatataaaaacactagaagataaacaaactagttttcaaatcattttggtaaaaatgctgtggggagagattggatatcgatgtaagatggtagattcgcttatgaacacatcgatagtaattactcattaaattagcttgtgttactatgttggcatctgaattctgactcaaaacgttttattaaagtttgtgctgagttatcaatatattaaaggacccttatgaataagaaatagtcgttacacaatatcaagtgcaaatgaatatgaaatagtcgttaacccgatatgattttaataattgagtaaatgttgtgtttggcataattaaattaaataataaaaaaagatgtatcccggatcactcatgtaagtattgtttgtggaatttatattgggaaacttacaaaaatactgtaatttgaattaacttttacaaaaatactatcacacggaaattttttcaaaaatactgtatttttataaaacaccagtaaaacacaaaagtaaaacacaaagcagaacaactcaaaacaccagtagaacacgagtagaacactagtaaaacaccagtagaacaccaatgaaaacttaacacagtatactgcagtatgaaacttataaaaaaatacag

SEQ ID NO: 381042 - DNA, 3260 bp, Cannabis indica
cttttaatatataaagatattggcactcctctaaaattgataatctcaaagggtattttagtttcattcaaaattactttgattttgaacttttttttaatttttacaaaacacaaaaatctaaaataatagaccaccaagtttatgagaaagcattcatttataatatgtctaataatttaatactattagtttgcttgtattattagccacaatcattcatcttacaattatatgtattatatattgttgttgagattaaaaaagaataaataaaaaatcactgcagatcttaaaaaaccatatgtataatttacattcattttgaaaatttgcaacataaaaactaaaaattttcgtatttgaaacaattaatttaagagaaaaatttagtaggtgaaagcaccctctccctcaagtgtttagaatttttttaaaaaataaaaaactaaacacatcctaaaactataaagaagagttcagtttgatgataaggcctcttctgctcattgggtcaacaaccttattttgtagctaccaattcttggttgcactaagtttctcaacaatgcttctcaaaagaaaatacatctggaaatggaaaacaacatcacagaaaatcaagtcaaaagttacacaacaaaagataatttctctcatttaagattgagatcttatgctggaaagtagaagaagcaaataataaaattgatagatgagacaacaactagaccaaggacaatgcaagttctcttttcttagaggtggaaagaagaaaagggcagtgagatttcaacgatggtgatttttcggatattaaagcttcaaaagcaatagagatgcatatggacaatgcattaagaggtagcaaattctttgttcaaaatgttgttaagaactaattataagggaagtgagaatttcaatgatggcgattcgaccagttgggttcggggattctttaaatattaaagcttaaaatgcaatataaatgcatggacaatgcattaagaggcagcaactttctttcttcaaaatgttggtaagaactaattataccttacttctcttccagaagaagtgatgtgcaagaaagaagggatgctaactcgtcttcggttgccaatccatagccttgccatcttattctaccgaatttgtcaatgaggaatatatatctgcagtgaagacaccattgacaatggtatttcttaatataatgattttctcttagattaaaattgctaaagtgagaaacaagagaatggtgttctacccggttagaaggttaagtatatgaagttcttttcgaaagtaatagtgatcgccaaaagaatacacaatatgcctcttaagtggatcgtcacttccatcatcattcgatttcttcataatccgaaggagaagctgcttaattggagtctggcataatagccacgagtctatgaacgatacctaaataccaaaatgattagacaacattcaccgccgaatggagaaatttgaattgggagccaaatatgcttaaacaaaagtacatgagctgcaactaagcgtggaaaagtactttacctcgtacagattgacaccctttgagctacgaaaagtaccgagaaaaggtaaactccaagaactaatcatagactgttcagaaaaagaagagcattacattattcaaaggtttttttatctttctaatatgctgcaatgaatgtaacaaaaatagatagcacatactactttctttcctataatctgttcaaatatagtttcaaaaatctgtttacctgagcgtttgcccgaaacgaaacgcatattaaagatgccttagggataggagaagacttagcagcatcagctgcactttccttctccttcaaatcaatgggaagcttcaaagctttcccattagagaaattcacttcaatactagggaacttcacagctttcatttcaggaatgataatcttacttgccaaagcaatctacagatacaaacattaaaaagttaaagaatgccatccaccattttaaaaaggtcaacataacttaatatcagcccaaaacaaattcaaatgttctttattcgaattacatgggataattgtggtataattacccaaaattttgagtttctcaaactataattttcatcgtgtttatcagtaaaagaagatttaaaagtaatttgatactatatattttcgtctagacccaataatttagaatacgaacttatatgtgtactatttaagatattaatggagtttgacatatttattcagtttatgcaacttaaaaacataaaactttagttacttatactgccaccatttacccgaattacattcaatcaatcccattgtgagcaagcaacacatatcatacataaacaaaattcacaaaagggttattgaatttgacaaaaaaaaagtgttaccttgccaccatgtttcttaagctcagaaatatcagcaaagtatcctctgttcatttcgtctgcactgccatagatatatcttaatacatatcatttatataaacaaacaaaagggttttagtagctaaatagaagataactcacagccgagctcgttctttatcgattgcatctttgctcccaagctgataatgagtaaacaaaaagattagcagaaaatattttctgggtaatcaaacagagagagtaaagtttaattctttaccttgtaaaaatcgaagaagcgaattgaggtcgtttgaggaaagaaatggtgggaaaaatgaggagaagtgtagtaagagatgagctcgttcttgtctttgagcttcaataggcggtgggaagccattagagaagatcgagtcactcgcttgaagcttaacatcttcttcttcttcttcttcgatttgatttgaatctttcggaagatcagtagattttcatatacggagggaggagtctcatactacattgatgacgatgaacaaagatgggccttgccccaacgaggcccaaacaatctccttacatgaggcccacttgttaagattatgtcatttctgggtttagaatggaaacttaccaaaatattagaatttaggttaatttttataaaaatactgttacacggaaatctttttaaaaatattgtatttttataaaacacagtaaaacacaaagcagttaaactcaaaacaacagtagaacaactaaaatacaccagtagaacaccagtaaaaatttaacacagtatactgtagtatgaaacttataaaaa

SEQ ID NO: 381043 - DNA, 2064 bp, Cannabis indica
agtgcactcctattaagaatgtgagtaccctataaaatatattgtagttggtaaaataaaaatgttaaaaacacttacttaccacttttatacgtgtcaattcatattaatgtaattaagtacaaattttatataggttaatataatacttttaaagaatattactaaacaaatggcaagacaagaaaatattttagtgcttaagccctactatccccaataacagtgctcctcagtccttctaaaatggcggccttctactattcaacttgacattatgtaattactgcacacattaggctcagctaggtagccagattagaatttagaagacataagaaaaaaaaattgcaacttttcaatcttcttttagaatacaatctattacgagggatttttttaattattataattaaaaatatatgttattttttttaattgacaacgacagacaatttttctaattattgttattaaagaatctccaaatccactgttttttgtttttactcctccttaaagtcatataaaatgaaattgaaaaaaaaaattgtacatatttgtcggtaacatgtgggattcatttcattaaaattattgttgttgttttcttaactctataatgatctgtgaatgcagttgctgttggtgatggatttatagcccaaagacataggtttccaaaacacagctggcccagaaaagcaccaagcggtagcacttcgggtcggggcagatcaaaccgtcataaaccggtgtcgtattgatgcttatcaagacactctttacgctcacacaaataggcaattctatagagattcttccattacaggcacagtggacttcatatttggaaatgcagctgtggttttccagaactgtaaattgattgtccgaaagcccatgaaaggtcagaaaaatatggtcacggcccaaggtagagaagacccaaaccagaacacaggtacctcaattcagaaatgtgacatcattgccagttctgatttggagcccgttaaggcccaattcccctcctatttgggccgtccatggaagatgtactctagaactgttgtcatgcagtctaatattggtgacgtcattgttccagctggatggttcgagtgggccggggatttcgctttgaaaacgttgtattatggagagtatttgaacacaggcccaggagctggaaccagcaagagagttaaatgggccggttatcgtgtgatgagtgcagcagaagcccaaaagttcacagtagcccaattgattcaaggtggagtttggttgaaatccactggtgtgactttcactgagggactataattaagttcttttggatatggcttaggctttatttattctagaattagttggttttcgtactattagcaacgatggtgagttgtatgtatatcattgttgtcatttaaataagtgcaatgccgaggccttaattttctaaatttcaagtaggtcatgaaactccaagtcttcaacaggtttttatgtgaagtaaaggatttgagtaatcttatcaagtgattttggcactagtagtattagtaatatgaaatatgagctatttcattctattcacattagcacaatgagcaaaagctataccacactaaaagaaatgtcaattaatgtcaaagcaatttggacactgaaaaagtgagtaataataataatacaaaacgtagcacatattatgatattaacaaaaaattgaatcaaatgaggttttttcattgtatcggaaatgcacaagtactctggcttttcacgtgatcaacttaagatttgttctttgctaaaagacactaagatctattcctacattttcattatattttggctaaacgatgaagaaacaaaaccaagaagtagcaagcaaacaaataacaatgttttctaggaaaaaaaaaatatttcataattatacaaagacaaaattttatattttttatgaatttgctgttttttatatatatttttaaggagttttttttaaacggagtgttgttttttattgtttttttgttgttgctacataaa

SEQ ID NO: 381044 - DNA, 4071 bp, Cannabis indica
gtcatgtcaatatttaaatctttatcatcaatatatatatcattggatggttggtgtttttttttcctaaggataattaaaagattcctcttctactttaccaatttttaatagataaaaatatgctaattttggtgagtaggaccataagctagccaaaaaaaagtaagaaaaacgtaatcctccaatagctagcaaaacattttccaaaagacaaaccaacgaaaggtaatcatggaatgatcaattaattgaacaagaataataaattaaaaaaaaaggttcatcttaattaatgtactctcttattccactaaaatccaatcaagaaaggaaattttcggatggtgctctattacttttgtgcataataaagaaacatttcaaccaaacatttttcttttatcaaacaaatccaacaagaagcttacaaaaagggagtcaatatttcttaacccctggcaagaatgaagaaaaagctgagaaagagaagatttcacatattacaatcctaaaaataactatatagacacaatattaatgttacatacccataaaaggaggctgttttttccccctatttatacatatattttcgaaaaggtctaaaattaacccatttaattatgggcaattgggatttctaccaggtcctccataataaaagtaatttccccattctcccatcttgccagttttaacattataacaattgggctgctcagtaaaaatcccaatgtctttggggtctctaagattgttagagccatccacaatttgaatgttcctgaaataaccagctttcccaaacccttcatcaggaaaatgaccactgcccatttgagtagaggtatgttgcccttcagactcagagttcacaacttctccaccccattcaatcattgaagcactgtcagaaaggtagggaaacaagaaagctggccaatatcccaacacatagttgttcccaaattgcatccaccagttaccttccttggggtcctacaaacacaattattgccagatttcaaattggttagtacccaaatatgatttttcaaaatacttaattatagcttaatggtaatcatatcataaaaattaagaaaaaaaaaaaaagacttacaaccaccacaactattactgatttgggtaaaccatatgtcaattagaagttgcttttttaatcatttttaaatttgtctatgaaaaacattcttacttttgtttcagaaatgtattcttttttaatttgaatggtgaatctataatttgttataaacagtagaaatatattatttttgtaaagttggatgggtatatgaccaatatgtcagagattctctgcatcattattaagtttgtattatatattatttgagtacctgatgtctcaattataaagtactaatttagatctatctatgtgtcaagatgtatgaaaaagtaaaatacattcaaaattttaaaattaccttccaaacaagtatgttgatatcaaattgggatcctttataggcagacacagggtatatgcttgcacccattgctatttcattgttaatctgaataaagcctgaacatagaagattgtagcacccagtggcttgatatgcatcactctagtgtcaatttccaaataaaccaaaatagaatttcagattattttatgctttttttaaaatatatagaaacatgaacaaacaagacaaaaattaacaaataaaagtacttacagtccaataagtgaagagtctagtattgttatctccatacagatctgggctaacctgttttaattaaaatattatacactataagaataaaaaactactgaaataataataaattttaagttagaaaagcaataaacctgccaaccagcttcaatactattgagatcttcaccaaaagtaccccctaagatccatatttgtgataagctaaattcattaggctgttgaattttaggttcccatacattcaatgttgctttggctccatagtacttatctccttccacatacacaattgcatgctgcaaactccaaaattcaaacacataacaacattaagaaacttacaccaaataattgaaatgtataatattaaaaagtaaatggcttttgttccactacaatgcttggttcatatccctttatatcttgtctttttctatatgttggaattgtaacaaagtactccactaactttaagcacttgggtgacttaattaattacaaccaagtttatcaactaattttaaaacaagaaatcttatttaaataaaatgaaacggcaaattaaagtttggtgaatttgagagatagaagactatagaagtagtatggctgagtatatatacctgatgaccactttgactagtgaagccaggatcagcagaccttggcttaggaattgatttatgtactttttttccgtaggattcgatagtgctggctcttaacaaatcctttcttttagttcttctgactggaatagttcctttgggacaccttcctttggtgtgccaaagctgagtattgactggtttagaagacttggaagaagaagtaatcttcatactctcttcagatactccttcaggataaaaatttggcctcatctataaattaaacaaaaccacattcctcaatataaaaaataaaataataagaagaaaagagaaagaagaaaaaggagcaaagtgtaaataagtaaataaaataaaaaagaataggaatgttcaatttgatacctgaattgtatggttttgcattaaagggtggtcaaaagctggctggtgtgagacatggacgcagtcaattacatctccatctgggctctgttcaaaccaaacatggaatacattaactttgttttccaaacctgaaaaaagtaaacgatttagtctgatatttatataggtataccttaatggacttaacagcaggcttgttcaattgtttcagctgtttcttcacctcaaacgtgttctgcgaaacgacgccgcttcttcctgcggatattaacaaaggcaaagatagaagcaaaatccagaaacagaacgccattttcgccatattctctcaagctacctaatctccccaactggctcaaatttcgtactgcttttattgcccgtgaacccagaagaaaacagaggagtagtgattctctagtttaaaccataggaaaataatggtgggtaaagcttatttaaacactttgcactcactctctctctctctctctttatatatatatacatatacatatatatggccagtaaaggcaaaccccacctgtaaacactccgccatataaaacaaaccgcatgtggttgagaagaagataactttttttcctttttcattttttcatttttcactaaacaagaatccaaacacagctgccgacgacctgaaggacgggacaaagggtaaattggtaatttaaatatatggaagaggagagagagattttcaggcggaggaatgttaagtgggcaatatggctggaatacatattcatcctctacattactgtcactaacactactttttttcttgagttcgtttgtcgttttgaacaaactatgtgtttgtgcgctcttattttaaaatagaaaaaaaataggagtaaagttgaatagacacaaaatcgaatttactaaattaaccttgtaatcagtgccaaagtgcaatcttttcagtgcaaagtgcgatcctttcctgttctctactgatatcttaatattccaaagataaattactttcctcaaaaagttttctttttattaataattttgacttaaccacctatgaactggtttttcacactttctttcattttctcttttattatagcaatattattctcctctttggatatgattatattttataaaaatatatatatatatattgcgtgaaactattggagaattgtatatcaacatcaagattatgtttttacacatgtgacggcactcttttagtctttttgtatatatatatagttgtaacgtgaatctacaatattataaattttatttatttagttttattt

SEQ ID NO: 381045 - DNA, 3144 bp, Cannabis indica
ggtttacaattcgcatccaggatcgtatggagcggtgtccaagtcaaaaatgtaactcaacaagctcaatcaggtagagggtcttatgatgcaaatgacgtagatatggcacgtgccagtaaacagagagagtcattgattctcatagaatttctgaaaggaaggcacatcaagaaagtaatacaataacattaggttggtaaaacaagagaagggaacaaccaaactaatgaaaagctccagcacgccaaaacaagattggagttggcagaggcttctacgtctcaagaattgtttgatttggatactctgactagaatgcgaaaggatgatgcagagaggggttcgtagaagctcacagacattgttaatgcctcccccatctcagttgttatctagaagctcgcacgacgatgacctgaccagtgaagttcaaaggcaaaagttttccagcataacttcagaaagtggtcccagtttgttgcatgctgattccagaaaacaacctttagctttacaccatgaatcatataaaagaacaaaaggaccgagagtcatggggagcctctacttcacgccaaccccgaagattctctgggttcagctgatcgcttacagcaatcctccactcactttgttggagagttcattgagcaggtaaggcaagaagtttcggtttctggaactcagaatgtgaggaatgattctgaaacaagatttgcctctgaagatgataataaaagtcaaaagagctcaactcattatagctctcaagacttccaaatgaaagagcaagaatctggtagttcaggaaccaagggcccatcagatgagatgtgggatgttaccgacccatcttttatcaagaacccaaaggaggatggagagacaagtgcaactgctgaaaacgccgatgtaaaaagaagtggcaggtccttgtggaatattataggagatatagtcttactgagatggggttcacgtcctgaaacccctagttctgctacaaggtctcgtcgaaagacttcatcaaacgaatctgctggtagtgaatcatacttttctacccatgaacctgaacagagtaaagataagcatgaaagggacaaaggcttgcaaccagaaatcacaactgatcggctgcaagtaactagattgtccagtccaggtcaagaaaatgaatcggacatgttgggattgacagatcagataagaattaatgaagtagcaccatcatcatcttcaccgaaaacgattaaaagggggtcaacattaaaaggaatttctttatctgtagatggaaatctaggttggaatgaagatgataagagttttcaagtttcccctgagatggaaatagtggaatcttcctcacaagctactgctagaggtgaaagttccaaaagcagtttgggggagcaggtggagcaacaagagttagttaagtcggctgaactatcaggagttgagggaagtggtggagagctgaaaagaagaaagcttcagcggaataaacaagtaccaaaggatagatttgacgaatgggaagaagcatttatacttgaaagtgatcaacgaaaaattgatgaaacgtttatgagagaagcgcttttagaagctaagaaggctgctgatacatgggaggtgcctgttggtgctgtactggtgcaagatgggaagatcattgctcgtggtcacaacctgtaagttttaggagattttatatatgttttatggttacactttattccttatcaatgtttacatgaaaatatgtatttcagagtggaagagttaagggactccactgcccatgctgaaatgatttgcatacgagaggcatcaaaccaacttcgatcatggaggcttgcggtaatttccctgattaaatctatattgatttgaatttattaatagaatatttatcgcatatttttcattgaagatgaagggagtggcattacatggtgccctgcactatttaaattgcactcaagatcaaaacctcatcatttacagctgtcctaatataggatgatcatggggaatcagtcttggcacatagctatctccttccctaaccctacaatatctgagtaggaaactatacaattactatgttccctccagtaggaattcaaacctccaagtttgtgggagcaaattactggaccatttgggtactctttgtttgacccttccgtgcattgaaacccagcacataagcataaaatggtttcctttcactttaacataatgttggcattcatgctttcataagagcatcaagattttactgtttgttcaaggaacttttcatttcaattgcatcttttcttttttgtttcaagatcatttcatctgcaagttgaaaggagaaaatatatctgttacttgaattcgtcctcaaaaaggatttgcatgatccaaactgctattgctatgcttcttctgggttacattttaaattttattgtgcaagtcagttacaggctatatagctttatcatggcttcttgtttacatgtccagtgctgtttttctatatgtagggcactaccctatacgtaacactagaaccatgtcccatgtgcgctggagcaatacttcaagctagaattaacactcttgtatggggagctccaaataagcttcttggtgctgatggcagctggataaagtaagtaattaaagaaatctgagtattcaatatagtcgttcaaatctaattacattgtttcttgtatttaagatttgaatgagccgagtttgtgttagcaatcacaactctatcgtttcatagcatgtccacattgtaaatgaaatagtgcctgatctagttgccttgtggttgaatgtgtcagtccttgtctccttgtctctcttccggttgaggacttaatttttgctatgatattaatcatctcaatgtctcacgttggtgacatgctaattagactatactttctcatttatgtagtatataactataactatgttggttggtccacgaaaactcattgtaatcagaaataattatcaacgtgctacacattttatgccagttttcatttggttattctttcttgcacttcttagtgagaggaaaatgtttgttattgcaaagtaataataataataata

SEQ ID NO: 381046 - DNA, 2072 bp, Cannabis indica
atctccagtattcttcccaaaaatagaactttctcttcatcttcttaacagcaacctggaatcaccggatcaaaaataatattcatgatcaagaaagaacatgatgataacttggaaaaataagtgaatctaaatttatatatacaaggaaattatgatgcagcttacaatctcatgtgtcctagaatcaatggccttatatacagtgccacaagtgccatcaccaagctcttccaaaattgtatatctgaaaatataaataaatacatataatgggttcaaagaaacaaaacaataataccaaaaaagaaaaaataaaaatcaacaaactagcactaggcatgggacagggacttacctttccattattgaaatttcaatttattataagcaacaatctttcagttgaatttaaacaatctccagttagaggtatctaagctgtcaacacagtattgaccattagcttgtagacaaggtttagagctagagtctagcacagagcatttgatgtcgtaaaaattggacttttcttcgttgtaggagcaattgaatatcagggagagatttatcagcattttgtagccctccacttgaaattccagtgatcaagcattaaacttcatgggcatgaattttggcttcattttcttcacatatacttccatgaaaaaaaaccctcatagaaatagggaggcttgagctgcagtaggtaattcaagaaaagaaaaaatcagctatggaaaattaagggtttcacctcaatttaaccaaaataaacccacaaaaggctgagacaaatacaatagtactctattccattttctcttatcaatcttctcaaataaactactaagtcaagtttttctcaatacttactttcataatatcatagggttataaacacatagaaccaagaatttactaccaatattaggcataattgaaagaattatatataaaaaaaaatgttacagagataatcgaaatagtagaagagttcacctggtttattaataaaaagtcataaacttttaagaaaagaactaaatcagaagagagaattcaacaccaggtagttaaagctaagagaaaaagaagacttttaaccgataatccgaaagagaaacagaaaaaaaaaaaatcagtttccaattcttattgcttaatactcaacaaatatcttcactcaaaccacgcccatttcaacttcataaatggctggtaaagcaccaatatgagaagtggaaaaagaaagaatccaaaataagatctttttccttctttttcttttcttttcttttcagggaaaccaaacagacagatatgttaatttgaaatgcattacagagaatacagctaaaggaaagcaataatgtaacctagaatcttagaacaatcaagattatatacacaaaatcttgaaaagatttgaattgaagctaaactcaccaatgattttaaattgaataaatccacatccagaagatgaaaatattgagcaatgtaaagaagtaaacgaaattttctgagagagaaaagtttgaagagagaagaaattgtagagaaagttttagagagagaaagtgagaaagatttggattggtattgaagccattagaaagggtgagagaggaggattccgctgaagaagaaaccaaagaaataatatttattattattaaattaaaatattaattaaattttaaaatattgttagtaatgattttatcttctttgatttattttaatttaaaataaaaaaattaaaatacttgggtgtggtggggaagagaaagggaaagtggtccccttaccttatttaatatttaatttagtgaaattacttatatgccccagacaacttaacacgctttaattgtcattgactcaaataccctgtttgaattcgtaaaatttcaaaattaattatgtggtgctacgttttctccaattctggaatgagtgtatttatttatttattattataattattattattaactttgtcaactttccaattctcacatattagcgaaattaacaatttttctcccgaactttaacatgta

SEQ ID NO: 381047 - DNA, 2866 bp, Cannabis indica
acaggattgagaatgagcacctaaacaatgtaggaaagtacagagctgtaaagactgttcccttaccattccgagagactgattcggatggctgagtgatcattgtgttctgttgtatacactaaacaacatatacatccggggatgagcaaagcaaagcaaagccaagcagaaaagacagagagttggagttagatccgcattttgttatttgtaaggtgtggactgcatgtggacttccctctgccactcccatgatcctatcattactacaacttctactattcatctcaacctatgaatcaacagctagcagcagcagcgccaactgtaatgtagcaaacaagcgtcgctcctataccaatacctctcctttctgttctctcttgatttgtacatttttagtatttttaacattaataatttgctgctgctaatgctaatcaatatgtactatatatatacaattctaaacttatgctacttcttcttaaacttattctctttccatttaagtaaagaaatcgtttgcatgaatcaatctttaattctgatgctatcaagaatcatgaatcatgtaaacatcaaataatactaaatctttattataacacatgaaatcatcactaaaagcattcatcaataaatgataataagagtaatacgatgataacgaatcctcatgacttatcaaataaatagtttacagatctgtttttgttctggtcaaagattgagcaattttcttggagagacaataggcagttgactgaatagtgatcatgggattgacaccaatggcactaggaagaacactagcatcacaaacaaacaatccctctgcttcccagctctgtccattctcatccacagctccttgtttttcattgatccccattctgcaactcccaagctgatgagcagaaccatagttagtccatttctcctccattgacataggccctttagcggcataaacagagtccaaaaactcctccaactcactctcactaatcccttcacacttcaatctctgcccatcactcctatgagtcccaacttccactgctccagcagccacaagaatcctcaaagcccgtctcaacccaactgtcatgttagccctgtctccatcatccaactcatagctcaatctcccttccttcttcaccactcccgacccgcggtctctgatgatggtgatgaaatgggcagtcctagagtacttaatcatcttattcttcaagtcagctccagagatccacggaccaattgaagcaaacgcacctggccccaaagcaggagtttctattatagccttaacattattatggctaccaccaccatcatcaccatcagagccaaacactttgtggactgaagtaattattcctccttcatagttcttccctgtgaattctgaattggattcggggaagtaaccccatgccattaaaacagggtggaggtgaaggtttcttccaatgttcttgttcttcaaaccactattgatcatcaatggtggagtgtagagagctccacaggctaaaattgtgacttttgcctcaattcgaatcattcttttgaccccatcacccacacttctggccattactcccaaacacttgttctttcttccacttctactgatgccgttgtttttctccaatataagcctctcggctttacaaccagtgagcaaaacagcaccgttttcaacggcatcgacgagccaagtggaatcagtacccttcttgtcccctgttgggcagccataggcacaagacccacagtaatgatcctccgagctatttctggggacgaactcaacatccagacccagattcttgcacccttttctcagaacttgattctgaaacccttcttccttacatttatcggtcactccaagtctttcgcagacagaatccatggccgaaacgtactcctcgctcccaaaaagactcaatttttcgtcctcgctccattctttgagaactgatttcggggttcgaatcgaagccgaccaattgatgagtgagccaccgccgacggcggttccagccatgattgccacggttccgtctaaggtgccgaaagtaacgccgtattcgtacatgtgatcggaggagggaccttcgagggaggagaaatctgagggagcaaaatagttacccttctcgaggacgatgaccctttggccagattgggcgaggagtgcggcggcgactcctccaccgcagccggagccaagaacgagaacgtcgcatctaatgttgtagatgttttggtggagaacgacgtcatttaggcctttttgggaaagggcgttgagaaaagttgtgtcgttttcgtaaatggtttggactgttgctttgtccaatggtctaataatagtcacttcctctttttttgatttgtgtactttgtatccaattgctttccatgttggattctctccattttcatcaacctgaaatcaaattttttatctttcaattaatttaattcatttatataattccaaaacatagcaatttaattgaatagtaattttttataatattgaagaacattgtcccaaatggattaaatgtaaaagtattgagctatatataaagaatatggactactccatttattagcaattggttttgagatggaacccatgattctcaacatacaaatattacataataccatttttcaatgagcaatgggaataagtattagttattccttcaactttgtttagacatctaaaaattgtgctatattgagcacattttattgcaaaattatgatatgaaatttaatatctaattaatgttttattaaaaaaaatctaataactttataatcaatt

SEQ ID NO: 381048 - DNA, 1212 bp, Cannabis indica
aaaaataaaaataaaaattaaaaaaagtaaaaaaactaaaaaaaaaacttaaaaaaaaaaaaaaaaaaacccacaaaaaaaacgatttgtcaatttctattcatgttataaatatagatacatagattactaattagagaaataggtctatgtgttaaaaaataggatgctaattaaatgattataatagctgtcaagaagtaatttggaaaaatttacataaaattatatatatattttttagatttttatatttttaccgataatatatatatatttgcagaatttttgtacagttattttatatttttataaaaataattttgattttatgtatttatgaaaaaatccctttaattaaaagttttcctaattcaattgtgatgaagaaattcatatgatatactaaagtacataaatatgtttaaatcctagctgggtacaatattaatatctcccacatgtaaaggacaattaaagcaaaaaatttggcgaccagtaattgtacatatttatgctggtattgatctctttgtcacacttcaatattatttatgtgatcatttttagtagtgtttaagtgtggtggtgacttgcaattaataataaaatctaagatgaccaaaaatagttcaaccaagttttcatcgcatttacggattaagaaactaaaaatcatcttcatacggtaagtatagctatagactggtttaggaaagttgttcaatacgtaaaaaaaaaattcatacttgttttttcattttagtctcttatttgtaataagataataagtcacttcctctttgcgagaagatacgtgcaatcattaagttatacctataatcacaaaacaagtttatttattgatgatatattgtattatgcatgccatattatttgtaatataaatgttttacttaattatgttatatataattaattattgattacatattcatgacttactaactgcttgaagtagaccattaagctccataaaagctttactctagtgtatgtgtggtttttcaaagatttggtaataattgtggaccaatatacagctagatcattaattaacatgaattgtttcactaaccatatgacatgatgaaattttgttgggaaattatagtaaatggccaaaatcataggagtatgttagtttatgtcctcatttcaaaaaaatatagcaaatggccctaaatcata

SEQ ID NO: 381049 - DNA, 2407 bp, Cannabis indica
catttttttaagggggtactaatagagtatttgtggaaagtagttaaatagttcctttgtcatccttttactctcattgaagcttttaaagaatcaatcatttcagcaattattttgaggttagattgttattaagtaagaatatttggttgattttccgttgtgaaaaccaacaacatcatgaactgaataaaacacaagctaaaagtaagaatcaaaacttctagaacagagataatccaatgctagaatgtaaactcagcacacaaggattaatgaggttcgagcctagtgcagtgctctacttcctcggggaggaacactcgtaatctctttattgatcttcaatgaaataaattacaagatctttcagctaaagactttgctctcaagtgtttcttcttacaaaactctctctttacaaataatgaattgactaaacttaaaaaacacaggaaagacaagccttataaagggatcaagacctaaccgatttttttttgttgaagaaaggcgatagatatttccttttccctttcataattttcttaaattagaatagggaaaacaaatgctctaactactagataacgaattacaaattacaaaaatgaaaaactgtgcagaataatgagaaagtagcacaacgaatggcactttggaatgatttttgcccaccatcaaaaggagcaccggttaacttaagagaaacaattaaacggctttcactagtgacactgattcttgttcctactgcttgcaaaaattcaccgatcccacatcacctgaaatatggcaggtctgtgttttaaccattgaaccatatccctatccaattgagaattacttaaaacagcatctagcatagggcgctcttgaacgaccatattctgtccttgggccaaggtctctgcagctgcttctccatccttgacaccatagaatgagtccaagccttgataagtccgagccaatagaatgagcccaagtgtcaagtcttaaatgtatagttatttgtaaccaatctgaaaatctctaaattatgctcttcaggttatagtgaaggagttgaattatgtgatgcaaagatgtggttcagctagtcgaaagaacgaagaacaagaatccgacgaaggtcaatccctctgctctgtttgatcttattctctatatttttaaactttgacctgattgccatacatgttatgattgaaaatgtaattacaaatacaaggagattgatttttttttttcatttcgtttgtgaaaatttcaggccaaacaattcttgagaagtacaaaaaccgtctacacttgtggcaagtgtttttcgccaacccatatgaatggtgggacaatcgaaaacacaaaataagcaatcctttactccctgattttaagcacaaggatactggtgaatctctttggttaggccgaaatgatcctccatggattaagaaacagcttgaaaaagttgactcagctatggcagaacatggtccagttgatagaataggacgccgagctcgtgtttctgagtgggagtatgattcgtagccgtaaggacgaggtgttgaaaaagaaagagtggtagcattacagcccggcctaagtgcatgaagtttatgtccttgcttgctccattgatgaaggcaaactagctatcacagtacagtattttaaacactgtaaatatttgacaggtttttgtttatactgtaaattccttgtatactttttctttttttctttcttgtaatttaagttctttgtgtactaattatacttgagacatggagaagagtgtattactgatagaaacaaataactaaacattgttttttttttcttgttcaattacaataaagtttgaatcatctcacctttaaagggataattagatttttgacaatagaggagaacaagttttcatttttttttttttgtacatgttagattatcatgaatttctcaacatattcactagatattttaaattaactatgatgtatattgttccataaaaaataagaatttaaacaatttaaatatcaaaacaacgagatctctgactaagtatactctaagttgtcgaatgaatttagattacactaaatctactcaattatggaaaaattgtttaatcacttagaataacgagtacttaaagaaaatagtaaaaatatatgtatttaaataactaataaaaagtacagaaattatagtggttcagctcgagatttgagcttactccactattgaaagagtactctttttttttcttgcattattttcagcccctttaatagaggtggattcacctagtgtttgattggaaggaatgaaaatataaaaatataataagaatagaaatgagaataggaatgaaatggaataaaatttaaaa

SEQ ID NO: 381050 - DNA, 1004 bp, Cannabis indica
gttgtggcgctagttgtaataagaaagccatatacgattttttgttgcaatttaggttgcagggctagttgcaataggagtttctatatagaattctgtaaaaatacaaaacaaaaaaaaaaaaaaaactattttaaagtgtaaaaatgaaaaagcctaaaaaaaataattacattgaaacatgtcaaatcaattttatatagcttttctctttcgggagtcttctagtaagcatgagatccctcttctccgtgagtgagattttggtcccgttaatggaggatgtcgtccacccaagttgttttagtggtggcttgttttcttctctactatgctactgtcatatatcttttttttctttcattaaagagagaatttattgctctgaggtatatactatttctctttcccatcccatttattttggtcagtgcatttattgctcaacactccatcttctccctttttttgattccatctgttatctctctccatcctcttggcctcttcatcataaaaaccaaatcttttctcccttatcttttcttggagattgcaaaatggaggctgacgtatggtatcccaaagctactttgatcccctccatcattgtggttattctggccatggctagggatgtaactaggagacctttgagattgatcttaagaggctattgattttcctttataaagcacgattcaagtactcttcttctcatctctctctctcttctttcgtttctctttgatttcagtctgctacttgtttttctttctttgaaaatggatgaatttcttaacaatgttaaccctactaatgattctcctacccccattagtctcctccttaagcttcacacagtcaagccctttaatttcccttctctaatgaaagctctttttggtatttggtcgtcgcagtgtcattttcctgtttctgtttctgaacatgtcgatggtcttttcctggtcacctttgggtgtgagggggataagggtaga

SEQ ID NO: 381051 - DNA, 1248 bp, Cannabis indica
tttaatacttacatatatatatagtctctgtacttacctaatccaattatatatttcgattacttcattaaattattgtgaaataaatcacagtgtttgagtgtacgtcaaaactaaatgctgttactgatcatgattggagatacatcaattcatatatatttagtaattaactttagattagtggacattaaaccaatatatatactataaaatctttgacatatatgtatcagaagatcgaatgggataattgatatgatatacatgatatgaataaataagtgtgtttaattatattagtcggtgaaagtgaaaagctagagacaattaatgaatgtgtggctatatatatataagctggcaaaaactcaaattatttaaagctttatgttaccactataactctgaagtcaaaaacatacatttgacatcgttgttgtgagtttgaaaaaatagaaatatcccacttattaattgtcagacatttttctgaaaaatattgcaatgtacatcctaaaagaatttaatcccaaaggctcaacaacgcgtcaaatgtcaaatgatcttctacaataggaaactatttgtgagtttcttcaccgacaattgtttacacatttatatataactcaactcaaccatgcatgagatgataataataattattataaatattggaaaactctgcattaccatatgtggagaaatatgatataattaatttgtgtatattttaattaattatttaacattatgtactattttttgaatttttaaataatttatcatgtcacaaataaatatttataaaaataattcttttcatagaaaacaagctcacaacaacttatgattttgtgttttactaggtaaattattcaaaatattacccaaattaagtttggagagaaattttaaataattacaaaaatgtataacatatatataataagattgtaatgtattcctatgaaaatgcataattagattattttgaaatatattttgtatgaacttgaaacgtcaagttgttttgaaatttatttttggcatgattcattatattatattattatttattttctaaagattggtaaaatctatacctactactatatttaactacaaatacaattagacaatattgctattattgttttaaaaatagtttaattattaaaaagtttatgaaaaatgggattatattttctagtttccctatatattaaaaaaaaaaaaaaaata

SEQ ID NO: 381052 - DNA, 2660 bp, Cannabis indica
aagtctaacatataatttatattcacctaagaaatctaataggacatcatctataaaagtgagtatatctttaaaattataaaaataaaattaaaaattaaaacaaataaaataaaatagataattcatataatttcctctagtaaagatggccataaatttaagtttctagttatcacttgattagttttgaacctaaaacttgctttagttacacttcacgttttaggaacgcacatacaaatttgagttgagacaaatatttccgtcgaaatataatgataacacctatcagtgaatataaatatattcctatccctatatcaatctctagtgtctaacctaatcaaaggcactcatttatttgggaataaatttcaaactttcgagtgtgctatcatcatatgcatacataataattatgtaagactacttaataattaaggactactcatcattgaataataagcatttcatgaagtgtggtcaaatctaacaaatagtacaaaacaatacaaagattattgtgatataggaaatagttattgataatctattatatatatcaaccttcacatgtttaaaataaaatatacatataaactacaccaaattcatataaacctacacatgtttatatgcatagcaagtgcccatcttcgttacaataatctagtactatgagtgtttaatttattttatttgttttatgaagaaaatcccaaaactctaccctatagagcaataacttaaaaaaaatgaagaagaagagatatcattaaatattcttgatgccatgattaaattttgaatacaattcaaataatttggccaccaaattttactagttgccatagataaagaattgctataaaaatagttgctgcagaaaataaaaagaacgaagttatcgaattagaatctgggttgagtcgcggactaggtcgctctctttaagatgttcgtggcactgcccagatttatgcaagcaaactatcaacttcgtcgtctacaagataaaacagcccagtcgaacacactgtatcgaaactctattgcacgatagaatactatcgaaatactacacccaaaaaccgactactgctcgaaatatatgtatgtaatataattgtatgtatatatcgtatatgtttttcagagtgaaaaagagagatgtgtttctcccgttggttcagatgcattatagaaacaatgtattgaaggttgtaacgggaagaaagatgttacttgaagggaacgttagaacatgggatcgttggaacgatgctaaaaattaggaagtctataataatttaataaacaaaattttctccaaaaaataaggtgacaccacacctgccagctcggtcggacggcggcgacagcgcgcgtgtggtggtccggtgtgtgagtcctcacccatgcgcgcaaaaattgggtaccccttaggacccatacccatatctcaaacttgcactatttatacttctaatgaagtgtttctatcccatgtgggactccctgtactcacacacttcatttttattttttttgtaagatttcacaaagttccaacaagaattcttagcaagattgtgggtaacaatatcaactgtcatatatagaacaatgagaaagactaacattattaaagagaaccaaattacaataaatgtctcgaagaactaagcttaatgacgagtccaaatgaacatattattgttgatcttattaaccacattaagacagtctcaaactgaatattttccaaaccaagcagatgacattgaaatgtcgagtaaagaagagaaagtgcttcaacaacttcatcctgaaaatatccaatcatgtgctaaatagttgaggcaaaagcaatcccataataatcacggataattcacataccacaaaaaccctcaccacatctaatgccacatcaatattgatcttgaaaaaatccaccaaaatggatacccagcgaggcacaacaagagaaaaggaaaaatacacgggctaccgcgctacaagaaatgttactttttctagcgtagttttctattgcactagaaaaagtcacttttaccagcgtatcttgcgaactgtacgctggtaaaaattcaaagttttaccaacgcaactcatatttacgttggcatagcaagccgtgtaaacatcttccccttaatattttttaccagcggaaaagtgcactggtaaaaatgactttcgctagcacaaatgtgtaatgcactggcaaaagttacttttaccagcgcttctcgcgaactgtgctggcaaaagatcataattttacataaataaatattaatatttttttggatttcttttaattttataatctcctataattattttttgagtaatttgcggcatatatacctaagttttacgccgagtagcagataaatacttaagtcctatttttggcggtaaaagtaccttctgttagggtcttggaacttccgtaggtacctgaacgttaagtgtgaggtcattacctacatggcatgttgtgattggtccaagtggatttatttttattttttattttaaataatcatttaatattttaaaaattaattttaaattgtaaaaaattaaaaaaatatatatattttttccttttactctctctctct

SEQ ID NO: 381053 - DNA, 1261 bp, Cannabis indica
ctcaatttttgataatttttttaatataaccaatttaaagacaatttctgatactaacaaatattgaaaatgtaatcagttttgtcataacacatttatattaggttattattaaattttattttgacaaaaaatcaattcaaaatacaattttaaaaaatacaaggtctaacttattatttaataaaacaaataatttaatcaataacttttataaaatacattttcataaatcatctattttgtcaaaattgccaagtaataggcagctttggaatacatgacaaattgtttggtttgttgtttttattatacacgtctattttatttttatttattttttttcaaattaagaaactataatgggcacacaccaaagtttaaaaccaaaagaaacgtctagggtttgggcactgaccacaccttaaatatggtggacccacccacacacaagcatgctttgcggcctgagtaccatagaaatggctttttaccatcttaattgggttgtcaatgggctacacaatccttgggccccatgtgggcccaacttagacaccaacaaggttaactactctcaaatgtgggccatatcttggcccacataaacttccaaataaagagggaccaaagcaaagactacacaataacacatggggacatataagagtgaataacttctctatttgattttaggatatttcatattatgtagtgttgtttgtatttattcatcatttttcctaacaatctcatttatataattaatttttattttttaattcacaccaaagataataaaaataattaaagctaattaaacataataaataatattttttataaaaaaattactttttaattatcattttaaacttatgaatattttaattatatagaagtacgtactagtggatataaacctttatttcatttcaaataatgctgaaaaatctattcaaaaaacctaatattttgataaattagttaccaattttactgagctcttatatttttgtgtgttaaggtttgtttttaaataatttataggttaaagaaattatactcctagcgggtgtgggacaaataacaaattattttatttatatttttcaacaatactcatggtgaaaattttattttgtattaacatttgtaattgttaatttattattaatttttatggagattaagactttaaagatactaatgaatgagaatgagaatatgaataaaataaaatttaaaatacattaaaaaa

SEQ ID NO: 381054 - DNA, 2762 bp, Cannabis indica
gagtgccacaaaaaaggaaactacactatgagaaatgatccctatatatattccttaccctatccacccaaccaaccaatgtatctatgcataggaaccacacccacctattctacactaccccaaaacacgatcacatacaaccaggtattaaagctttatagacattacaatacaaaaaaatgctacttttagtaacaattttttattcacagtataatttttttgtgactaaatgtgacttttagtcacaacaaaatattacttgtgactaaaacgtagtatttagttacaaatggtcactaatttaattttagtcgcaacaagtattgggactaaaaatacatttagtcacaacaaattgtaatttttgtgactaatacatttagccacggacttaattagtcacaacataagaataataatttataattagtcacaattttttcactgttaatcataaattttgttgtgactaaaaagtaagattttttgttaatatgcacccggtatagcatttcaaaactagtgttttgcttgatcttttctttaacagcaataattttacatcaataccaactcccattacttggaaccttctactcctaccaattattattttgtaatagttattaaattaaattatgcgagatctgatacgtaattacattaacaacaatatagcacctctaactagctgtgcctttttagcatttcttttttgatttagtgtcacacatgactcacattacaatatcacatgcattgctagctttaccaattgctctcacataccatcaattaccctaaataaagataaaaacacataacacttttattatatgaaaagttgatctcaactaaaacagtaatctttctttaacatctgtcacgttatacattcatatataaaatatatatatatttttcgctatttccaattatagtactcattattctccatacgtaccaataattaatggacataattaaatcgaatatatattaattagcaatgttaatccaatctatacccatgcaaaataaaattgacaatatatagcaaaggcaaaaaatacatataaacatggaagctaataactttattaaagaatgtaagttatatcatgtacaaaaaggacaattggtgggtgagtaaattaggagagagagtacttcatatgcccattaactcatttcattataagtgccaaacataatctcgaaggtatctttagattacatccaaaatcaatttgtttagaaagatatcaaagtgcatagatgaaacgtgtcatgacatgataggtggtccccaatggccaaaatcactataaaatctagtggagaaacatcatcagcaacaatatacttattagcaaaatatacagctatatagcctttcatggtatacgatgcttgccaaactatggctcactcttcttttccttggagtggtggagctcaccgcaaccaccaccggtgttgttgctgcaagcactcacttgccccgtaatttgaatgaattacctcatcgtgagaaaaagccacctcgaaaagatcaaccgaaacttaatccaggtgataagccacctttgaatccaggtgataagccgccacctgaagacaaaccacctttaaatccaagagataagcctccattgaatcctggtgataagccaccaccagaagacaagccaccattgaatccacgagataaacccccgttgaatccaggtgataagcctccaccagaagacaagccaccactgaatccaggagataagcccccgttgaatccaggtgataagcctccaccagaagacaaaccaccactgaatccaggagataagcccccgttgaatccaggtgataagcctccaccagaagacaaaccaccactgaatccaggagataagccccccttgaatccaggtgataagcctccatcagaagacaagccaccactgaatccaagcgataagcccccgttgaatccaggtgataagccaccattgaatccaagtaatgataagcctccaccaaaagacaagtcaccactcaatcataagcccctactgaatcctcgtgataagcctccaccaaaagacaggccacatttgaatccaggtgataagccaccactgaatccaggagataaaccgccattgaatcccggtgataagccactgccaaaagataaaccaccactaaatccaggtgataagccaccaccagaagataaaccaccactaaatcctggtgataagccaccaccagaggataaacccccattaaatccaggtgataaaccaccaccggaggataacccgcctttgaatccaggtgacgaaccgctaccaccaaaaaataatccaccagaaaaaggaccatcaagaaagactgagattgtgagagacaacctatcaaggaaggtgatgaagaacttgcaaccctaatatccttgtaataataatacttaatggcttgtatttgctaagttataaaaaccatctatctacgtacgtagaatacatatgagagccaaaataagtactatttttatagtacatacatataatgtttggttaatattacttagcaaactattgtataaatttatatattgtggtttgtattgccctaatttttcatcatacatgtatagtttggtatatatgcaattaattaagggaaatttgatttctatacttaaaaaacttaaaaaaaaaaattaaaccaatacattttacactacaaaa

SEQ ID NO: 381055 - DNA, 1105 bp, Cannabis indica
aagtttaataattaaattaaatgttttaatttgatgcgattttcaaggaaaactctttgattagcaaaggtggcacgttaattggaaaatcactgtagtgcacctaagtatcagggcgttacactatcatacctggttggcaagaggttgtcgattgtccctaaaagatgtttgagacagggtgacccattttcaccttatcttttctatctgctgagttaggttgtaatatgagttttgtgtggcgtagcatttttgaaactcaagatatagtcagaaaaggtgctagatgcagaattggtgatggctccaatgttagtatgctgctggacccttagattcctgatgagaacaatcctcttggcacatctattcaccctgctcttattaatcaactagtgaatactcttatggttcctggaagtttggcctgtcatattgacttggttcgtgatttgtgtaatgaacgggatgtgagattaattctcaacattcctttatcttcaagtcgtattacagatgtttggttttggtgttgggaggtttcgggctacttctctgttaagagtgcttaccgatttcttcaagagagcaaggatgcagacacttaattagctaatgacgatttttggaagataatgtggaagcttcgtgttcctcctaaagttaaggatctgttgtggtgggcaacgacaaattgtctccctactattactcaattgcgatcaaaacatgtcaacatagatgctctttatcctatgtgtcaattggatagagagactattgttcataatttggttgactgttgttttgccaagtcttgctggcaatagacaaatattgatttgagtgtgactgcgggagcatcatttgctagctggcttaacagcttgtttcgaatgatagatggggagcaaaggaagacattggcaatgacttgttgggccatttggaagactagaaatgaatttgtgtggtcaaagatatattttgtagaaatttgaaaaatgcttaatttaagatatttaaatatataatttagaaaattattatctctttattattttattcttaaaatataattgcctaaccatatttattttaa

SEQ ID NO: 381056 - DNA, 1232 bp, Cannabis indica
aataataataataatattcaacacgtcttacgtaccatgcattcaacacgactaagaatataaatgctactcttcaaattcttcttatatatataaattgcctcaaacactcacaacaacacttactcaaactcatcatcttctacaaattccattaccaaattcactaaatcatatcatgggcttcaaaggtttcgtagaaggaggaatagcttccattgtcgccggagcttcaacccacccacttgaccttatcaaggtccgaatgcagcttcacggcgagcccactctcacccctccaattaatccaaacccatcttcaattattccgtccagccatgcccggaaacatctccgccgtccattccatccacctcatggatccaccgccacgtgtcggcccagtatccataggggtaaacatcgtccgtaccgaaggagtcgccgctctcttctcaggcgtctccgccacaatcctccgtcaaaccctttactccgccacccgaatgggtctctacgaagtccttaaacaaaaatggaccgatccccaaacgggcaatttcacgctccccaaaaaaatcgcagccggcttagtcgccggaggcgtcggcgcagctgtcggaaacccagccgacgtggcaatggtccgtatgcaagccgacggtcggctcccgattagcgagcgaagaaactacaagagcgtggtggacgcgatcagccaaatgtcgaagagcgaaggcgtggctagcctttggcgcggctcggctcttactgtgaaccgagccatgatcgtgacggcttcgcagctggcttcgtatgatgagataaaggagacgattttgaaaaagggtttgatgaacgatgggattgggacacacgtggcggctagctttgcggcggggtttttggcggcggtggcgtcgaatccggtggatgtgattaagactagggtgatgaatatgagggttgagagtggggcggggccgccttactccggggctttggattgtgcggttaaaacggttagagctgagggtgttatggctttgtataagggatttattcctaccatttctaggcaaggaccttttactgtggtcttgttcgttacattggaacagatcagaaaggttcttaaggatttttgattcaaccattacttatataataataataatattcattattcttttttctgagaaaaaatgttttcttaatatgtaaatgtaaat

SEQ ID NO: 381057 - DNA, 9764 bp, Cannabis indica
gtagtggagaatatggaactgtttattgtggtgttttgtttgataatactcgtgttgcagtgaaaaagctacttataagcaggtactactagttgaattttttgcttttatttatgtgaaaaataaaaaaatcacttgcattaactcatattttaggcttccaatttataagggtgtgtgagtcttttttttttttaatatataaagtatatgattaaatataataaacctttgctgataagggaaaaaagtgaaactatttgcatgggacatctaaagagaaaatgtaaaagtgagatgtatatacaattatatatatggtgcttattatgaaaacagttgccaagccgaggaatttattgcacaaatggaagcaattggacatgttagacacaaaaacatagtgaggctacttggttactgtgttgaaggagttcacaggtatcatataattatatatatatatatatatatatatatttcttattgtaatatcaaaattactaaaccttagtgtgattatagcactacttgatcacaaaacagtttttatttattaaaaatttcatggtgttattataggatacttgtgtacgaatatgtagacaataagaatttgcagcattggcttcatcaatgccctcaacaaatcagacttagttggagcatgaggatgaacataatacaaggaatagcaaaggggtttgattcaaaaacccttaatttaatccttgaatatatattaagacataaaattaagagtggtgtatgcattaattgtttatgcagattggcttaccttcatgagggcattgaacaaaaaatcctccacagaagcttaaaaccaagtaacatcatgcttgatcaccaattcaatccaaagattactgatttttgcattgcaaacttctttgggccccggtggggatatacagtcatggaatcattagggtgatataccaaacactacgtatatatataacattatatatatgcatacataccattcatttttctaactatgcaatatttttgcacattatatatattatatttatattcagttacttagctccggaatttgatgatgatgatgatgataatgaatcgtctcctataacattcaatgaaaaacatgatgtttatagctttggaattcttgtcatggaaatcataacagggagagccccaatagatcaccaccatgaatctcaagtatgttattatatactttcatctggggcatataaaatatatatatattatttgaaaatgttataatttattgttttgacaattaatttgtagccatatctagtggagtggctaaaatcaatggttgcaacggaaagaagtggtgatgtgttagacccaacattggtagagctgccttgttcaatagaactcaaaagaattctattgatagctcttcgttgtgttgatgttgatgaggaacacaggcctaatatgggagatgttattcatatgcttcagccacgtgacttgttacttcaacttaatcgttaatgaagacaatattgatcctcatcttatgatatataagagctaattttaattaactataaatatgtcctttttgatttattattattgttatttttcattattattgagaaatgttggtataaagtgagtgatttgttatgtgtagaagaggaaatcaatgaaaaacttatcgtagaagatgacctttttacaactaattaaagcttcccatctttgatagtgtaatgccctttatttatactgagagtttgttaaagaacaactaattcaatcaagaaaggaattaacgaaatataactatctaacgaatacaaattaattactaattagttaagtaacagccgtacctattaaatagttggttaacatctctcttaaacaaaaaggtgtggaagtcatcttgagtttggacttgagatataaaaatctgtgaatagaaagggactttgttacagcaacaacttgatcaacagcagaaacatcacggaagactttggccaaaatgtgatcgcgaatgaaatgcaaatcaatttcgatatgtttggatcttgcatggaatacagggtttacattaagggagatgcagtgttgaaaaatgatctatagttctgacagaagaaaaactaaccatttcatctttgccacaacatttgttaaggcactgaattcactttcagtactcaaccgagccacaacatgttgtttcttagcgaaccaagaaataaaatttccttcaaggaacatagcatatccaccattggatcttctgccatcaacacaagaagcccaatatgcatgcatcagagtatcctaaactcaacgtagatgttggagtgagatgtaacccatgagaaatagtcccattgagataccttaattagtgtgtgaaagcctcctaatgagtagaaataggtgttggaaagcatatttaactagaatcttacttttactaaacaagtatattgattattactaatctaacatcctaaacatagaaccttaaaataataacccataaaagtttaagaaaaccttaccgtgattgcagtggaattaaatatctcctttcgttcagttctctaacacttgatcctttctgttgcaaagtattgccaagaactaaacctgagtcttctcctccttcgattatgttcatcacagtcttccacaaaggcctaagaatcaccttaaatatttagaacaattttgagagagttatttattatgaatttcgaaaaataaagagaagaagtgacattttttcttaattcttttctctttctttacataggcatttacaaaggattaggtttatatgagatggactaaaataaagacttgtactcatatctaactcatagggccacatatattatgggctttagagttagatttttgccactttatttcaactaattaataaaactaaagtgccttttcttattttaccactcatctcatctaattatttaaatactaattttattttaataattataaataattatcaaataaaatacaatttaaatatatttattaattagacccacaaagagtattaattaacaaataaaactctatttctcttttcttttcaaaattgctcaagcttggtaaaaattctcaaataagacatagcctattttcgaattctatttgaattattaaaccaattacttgagtctacaagatgatattatcctataccatgtggggaccatgggcctatgcaaccaagctcctaataagtagatctaaaatttatcgagtaaatttcctatctcattaattcctcataattccactataatctaaataattaatgatcctcatgattgccacatgaaccttcatgcacttcaatcaatagccgtttagtttcttccttggtgacacatcttagaagtggcattgagaatccacgtttatacataaccctgtctacgatgatataccaggcagctttctcctcatatttatcgcttcatttctgtcctctggcaagactcctgtttagaggtatgctgctattggtgtcatctatgtagggctgtcatcaaacatgtctatttcttttaaaatagtgatgctcgagtctttcaagaactgaatgggcaccaatttggtcttgtttgtcaaggtgctgctggctaaccgggcaagtgcatcagctattttattttcttctctggggacttgcccaatggtgtaccccttgagctgacttaataagttttgaattaatcttgctcaagtaggccaccagtctttctcctcgagctgtgtattcatctaggggcgcaagcccttagccaaagaacttgcacattagttgttcacgaggtgctagatctgtcagttggagccccatcttcttataggtcaacttgaaaagtatgtttaaagaagttccattgtcgatcatgcacctgacaactgtcatgttccctatcagtgtagttatgaccaaggggtcattacgagggaatctaactttagtagcatctctctttgtgaaggcgatggcaggctcttcaagctttaactgtttggaatctctttcctttatagccaagacttcatagtttggctcgtgatggacagtctaagcatagcgctccatagcttttcttgtttctcgtgcaatatatggggtctaccaatgatgaccactaagtgacctcccacatgtggtggcattagatctttgttttaggcaccttgtgcttgtgtcagtttgtcttgtacgtaacaacgcaagtggggatttttccttctgattaggatctcaatttccaattttgagtgcttgcactcgttggtatcatggccaaaattattgtaaaatcgataaaatttggaagtgtcccttttacttatgtctttcttgaggaggcttctgtatggaactatggactgtgtggccgtgtagactgtttcaggagttatcgttaagagagtgaagcacgtaaacctctcctccttctcctttgagtcttgcggcgtatggggattgttaaatttcccatttttttccatttttttggccagagttactactgttatgcttacctccactactctagttacaggaaggctggctagaatttcttgtgctggtaggtatgttgggtggaactaagggatgttcgccattctgggtttttctggcacttgcatgtctcccagtttgtgtttgtcggatagcttctttaagcttaataaagccttctggtcgatcgagataatcgaccatgttttaagttgagtgtggacaaatatctttccatagatcaccaaaggtagtatgccactcatgatggttgtatatctttcttcctttgttagattcttgacttttgtagttttagtcatgaacctttagaggtaatctttcataggtttcccaggtctctgttcgacttcaactaagtcttccagcctacaaggtgtttgtctagaagacgagaatcaggtgtagaactcttttgtgaaagatttccacgaatcgaacttcccagcagctagtttgaagaaccactgttgacgggaaaatcctacaacaggtatcagtttccacattttgcaaatccatctggatctcaaaatattttatctgagccaagggattctcttttcctgtatacatcttccacatggacattttgaacttagttagcaggggtaacgcattgaaacgtgcatagaaaggtgatcctttagtcctgtcaagctctaggtcaaacaactttggggcggacatgccttgtatcatgttcttttgttgatatagctgtcaccactataatttggccgtttagtgacactctttagtgacctgcacaaaattgcgagtcactaaaaagttgggagtgatttttagtgacccgcataatgaaactctaaactttcaatgttagtctcttgtgagtctattacttgtaaacgttacgtatacttgcgtaaaaaaaatctgtaacactttcttgagaggagtatttttggctgggatgaatacaacacaacaatgtgaattcatcaatgcaatcctgaaaaagattcctcgataaagactattcgttgcatgagtttttcatcacttgtgtaactccaagactaaatatgtgcatctctctaaagatttcgagtccaaaattcactaccagaaacaccaagggccaattgtatgaagatatactatgaacaatatagaaagttctttacacttcacacaacatttatcataaagtttccaaggagatatccgaggaaagattctactttgtcactactaattatgtagatggtgagtgtgagatattcacattagaaaaattctaacgcggtccaatacgagaaagagtcttgtactcctcccacgaaggtagtatcaaatgtacctgccaactgattaagagtgatggatatccatgtagacatatatgggcagttatgaaaagaatgaacatcaccacaatcttagattccctactcaatcctcattggagtaagcttgcaaagacaaataacaatatccaatctactacaaataatcaatcggaagcactcgtttagatggatagacatggatcacttatattagataccaacacaatgatttactatgcctccaaatggcaagcctcttaccacacgacaaaggaataaatagctagcctcacaaaacagttcaaggaggatttccaattacattcaagttctaataatcaatctcccaaaaattgtggatatgtaacaacactaacataacaagagaccctaaagttgttcgaactaaaagtacatgtaatcctaacaccactagggaaggaaccaatggagaaaaaaaatactagggaaaggaaatacgacacgtgtgggatgaggggcactagccataatgcacgtacttgccaaaatcgtactaacacggatgcatctcaagccaatccaacaactgattttaattattgcatgctatgtaccacaggtaacacaagatgatcagacgttccacttccaccttagtgatcctgataatgattttgattttacttaattataaaatcatctacttcaactgaataaatacaagactagctaattaagtttttttttttgtatttagtttggaaaatattcattttatttgtgatattgttaccttttatctatatatatttatatatatagatgatttactttgagacaatgatttataatatattatagtgccactactaattacttgattatgcatagtttttggtatgactgcaactgttacattgttttcagactatatattggttgacgttgctttctttcatcatgtactaatattataaagtagtacttaacttattttaaattagtgcttgattaaaaaattttacaaaactaacacaaagtactataatcattaataaataggttagaataggggataagagatattaagcataagataatctaaacacattataatattattgttccctagtcctcctcagtggtgcttccgttttgtaattcactgtcatcatggatgtgggggtcacacgatgtgaaacttcgcggtagcgatgatcttccctacatccgcagttgataatttgtttaatgtgggggtcaaaccaaccctttctgaacaactctaaaataacctttaccaccaccttacaatgatgacaaacgattatgttatgacgaaacttgctaaacaccagagctgctctatgatatgatttatacacaccagctccttcacctttaaaaactacgaagcaaatattttcaaacatggtggttgcttatgaaaaactaatagacatacaaaatagtgtataatgagtgaaaaaatgaatggggatgtggtcagtttggtattgtgtgggaaaattagttcaatttatagggcatgataataaggctctttattaataatggaataatcactttccttacaatgatataactgcagcccatatatgcattaagaatctaataatacatttattgtagcaatagaaaagtcgcctcccttaaaattaatgatataactgaatcgttgcatgatcataaggctcttcatattttatgtgcaacttaggtcgttgagtgtgcaactttattgtataacgttcaagtgatgttgtttgatctaagacaacttttccacctataatttcacgtaacattttacagtaataatccttatctctccttaggaccccttaaaatttgacatttctaaacactttactgttaaaaattggtactattactatccaaaagtgtacaagtataatttgaatgtttctttttaattaaaaaaattaactgatttctcttacctagcacaactagttgcaaacaataaataaataatataatcattggaacctattggcaaaaccgttcatcaaaagtaagggcgggacactatcctaaccccatttgaaataagaagatttattatttctattattaatgtaattatttatttaacttttttaaaaagtatcattctaactatcactaactcaaacagaaaaaatgaaaaaaattattaaaagtatgaagttgtaacaataaatattttataaaaaaaaataatttaataaacaaaaaagataaataaagttgtcaaaactaagtaaaaaaatcgtaatataaaaacatattatattgaagagttgatattgttaagcattttgtaattaatgttttgttatttttatgttgtttgtagttatctttttgttttataattgtttttatgttgtttgttaagttattttaaaattattttttagctctcttagttgtttttaagttattgttgttgttttgttttactcataaaacaatatttttataattttgaaactttaataaattatttttgaaaaacttgatacagtaaaaatatattaaaaaaaatgaccctgaaaatggtaaaaatgacaaaaaagaaaatattgttgtaagattaccttttcactttcgcataatttgctccattggtgatataaatttctatgattgaaggattgtctaccttcaattttgtcagttaaattaaatttcttttgagtaatcaatataattatataacaacatttttctcaaaaataaataaataaataataataaaacaaaaaaaaaaataatgataaatgaatacaattgttgaagaaagcaatgaatagccatgccaacaaagcatgtatatttgttttcttcatttggatcaatatatattatatttatataaatacaaaatgcttttttctttataatatcactaatgaaaaagcaaactaatgataatagttaagatttaattaagcacaagtctttaaagcaacatcttcaatgggcaacttatcctgaggaaaaggacaatcaaacttggctggcttctcaggcaacaaatcacacgccttaggtataacattactggtatgaccctcaacattggtacaattccacaacaatttctgtaccggttcagccaatgtcatattcacattcgaaatacaaatccccttaaatgtgtctccatttattccgtcgagtttcgccggaaaagtcacgtttttggccacccaatcgcggtagtttatgttgcttatcaccggcattgctttcgggtcgaaacccttggggtgtgagttgtatgcgccggtcatccaaaacacgtacttcatggtgtcgatgatgtatctttgtacgaagatgtccttgacgtagccaccgcgacccagcgcagttttgattctcacggcggattgagtgttgagggccgtgatgtcttcgactcttacgtcttggattccgccggacatttcgctgcccagtgcgatggcggcgctgtcaggtgatatgcaggtgacacgtcggatgacgaggtgttgggttggcattgccattttgattccgtctgatcccaaccgctcttcacggctatgcaatcgtcgccggagactatgtaggagtcttcgattctagtgtttgtgcatgaatctgttttataagaaaaaaagaacaaaccatctttacattaattattcataaaaactaattttatcattaaataatatattatgtttgtttttataagaataggaatgagaataaaataaaatttaaaaaatgtaatacaaaaaaaataaaataaaaaattaaataaatttttttttatattaatggaatagttttttttttatttt

SEQ ID NO: 381058 - DNA, 2474 bp, Cannabis indica
tgagcattggatcgaggtggttttaatgataatatattctcctcagtacgcacgctaacatgattcagtcgttacgctaatctaggtgttgcacactttcccaatatgcttgaagttcatagaccaagaagctaacgccaagtgtgatccactcggtagaaccagaaggctcataactatccacaattaaaaattaaagaagttgaaaaggtcaccccctttttaaatttcacacgtgtccataacgattcgaagggaagaatgcaagccttaacaactctcaaattttagaagcttgggggtaaatgttatcagtgtttttggaaaggggaaacataccatatccaagtcaaagatagtcaactaaagcccaaacacgggcccaattaaggtaacgggctagatccccacgaagagatggactgcaagtccatccaaaatacagagcacttgcatcccgatccggacctctctagtttcgggaaggcatcacacccaataaagaaaaaatagaagaggccctccggatgagccattgggatatttctggaaaggcatgaaagtcaaggctgacgtggcgatcctctgacaccaactcccacaatattaggactttctcccctgcgtcaatccataagagtgcacacaccaccaaagggaacataccctttgttcgaaggccactactctaaaagctacagtacacataggaggcacacgcatgccaccttttccatcaagtggtccccaatcgtacgaaagattacagccccatggttgggcctcagcctgtgggctcaaagtcaatatattatatgtatttaccccattagtggatcatgtttacacgcaaaccctagcgggtctcgagtatatctataccctaatcctagcctataaatactacattataccttcatgcaaagggttaaaaattcattagttaaatactataatagaaagttagggttcttaagcttgtcacgaatattggtgtaatacctcaaggctatttagtccaatacaattgactagtagactagggttcattaatactcgaactacataaaaatttccattttgatacatttttttagcttttatttgatcatattgagttttcaaaaatttcggtaaataatatattatttatgtaatgtgtatatattaattaatatattatttttcatttttgaaatattgttgtttgataaagattttaggtaataaatattagtatattatttatttttaattaaaaaataatatattattttattgtatatcaaatattttattatttgaaatttaaatgataactaatctttttttaataaaaacaaaatattaaagtttttaagcaaaatgtgatattacttggtaaatataaagcacgggtctttaacaaaaattgttgatttaataatttttttgttattttttcattaaaattaatactgctacaaaaaaaaaaaaatgatacaatttaaatttaaagttaaattttatatttaaaaaacgatatcattgaattagatttatcttttacttttattaaacaaaaataaacaactcgtaatatttactatacttgtcacaatttatacaaacttttatgatcatcaatatatgtaacatgcttacatttattttaatattttttttcaaatgcattgtaagttgttattacctagtgaataaagatatacgaaagtgaaaggatttatgaaaacaacataaacagatgaaatcgacaataaaagtagaggaaattttaaaaaatgatacaaattcatgaaacgccgtaatcgacattaattaattttgaaaaatgacatcacttcatgaaacgataattaacgtggaaaaacgacacgttgaatttgtcaaattaaataatgtcattacatgaatttaggaaaatagcgttttgtgcaccttgaatttgtcaaattaaatatccaaatagaggctcaaaagtcaaaatcttatcaaatcacaaccttatcaaataatacatttaatttactaacaacaatatattacactgtttgtcccatcctcagcaaagtgaactgaatctcattcaaaaagaacgaaaaagaaaagcatgatcataacaaaatccaaggtcataatataagcatcaaagactgagggtggattgtccaatataagaagattatttattttccaattatccctatatttatagtgtatttggattttattaagtgggtaatgaaaagagttggggggcttctagttgataagtccttacattgtacttacttttacagggaagaagttaaattacgaagatcaacaaagccagatagcacagcccgattgcgttctttcaccttacgtttgatatatgaccctgcattttcagaagcaccaatattccatatccatgttactaagtattcaaacttatgcttgttgtgttacacaactcacccaaacacaca

SEQ ID NO: 381059 - DNA, 2280 bp, Cannabis indica
agaaaaaggtgaccatgttttttttttcctattaaaaaattatattatttttttttcttttgtttttggagttttttcttacaaaaaaaaaaaaaaaagaatgaagatttggtgaccaatgtatatgggggatgttaaagttgattagttacttttcttttttgggttatggatttagtttgaggaaaatttaatgggtatgttttggttgctcctcgtactcaaggagaaactacaatggttggtttcatcttcttttttcaagtgtatgatcagttgtagacaaacagcttgacagaagttctaatcactgatatatcgatcgtatataagagataaatatatatttttttgttcttgatcattttctgtcaattttcacatatttattcacatgtatatataagatataatcatcaatttgtactctaggttatactagatacatgcatatatatatattttgtttttttaattgaagaattaatacatgcatatataaatatatatgtttgtgttgttaaaatgtaatatgtatgtgattttatgtgggttcgaaagcatttgcatgctcaatttccttccaaagtttcaaattttccactaaagaaataaaaccaataataataaaagaggaaccactgcacaaatcaaataattattagtctctgagtggaatggtcatcaagtatatatatcataattatgttgttctccaacaatatcatgtattaagatttttttactttaattaatgagaagttaatccaactttaactattttttctggattcactaagaactttgcaattaattaataataacgataggaaatgtgacgtaccaaaaaagttgaccccataacttgcgcacaagtttttctctaaactaaatgttcatggccatacatatatattatttataaatttaatttttctttaatatatcaatgttactttaattaaaagaaattacaatatgtatgtataatgtactacaatatcttgtttattgaataaaatataggaaatattcatataattaacggttttttattttcatttgtaaaaatgctcaataatgtcagtataattgatacgagtctaatttgcattcttataaagtaattgaacagagagaactgacaaataacttcaaatcataaccattatttaaattctcatataatgatgggacgagtagactttatgttttggaggtatgtcaaccaatttgtaaatgttaaaaaaagaaaaaaaaaaaaagaaggttttactgcactgttatttccctgatattatccccatgatacagtgattcattatttattgtcatcacatcatgtaattataccagtccaaaagataaaacaaaatcagacaccaaagcttctttttactacaaaagctgcctctcatcgatccattaacattttatttatacatatatctgcctataatatatatatttataggatcatcatcaccatgggattctacgtaattgatgggtactcaaaacattgttatcattctttctcttttcatttcttcttcttcttttttttcttttagcaattaaagcttcgttatgattttgggtctccattggattctactctgtattattagttataatgataagacagttaagacttattagatgaatatgtagatgaattcgtacttgtataaatgtgaaaatgatatgtatacaaccacttatgatagagagataggctatgattaattatgttttaactaattatgatgcatttgtgtttataataatgtttggatattctttgtaattatataattggtatatatttatcattcaagtattaattaatctttctcaatggaaaattcattacaattagagtagatcgtaatatattattacattctgaagtggcaaaggaaattctatcatgaagcaaacaatggccacaagagtcactattttggctataatttggccaagcatagagaaccgaaaaggtttttatacaattatgaccattctattattactgtttttattttattgtatttatttgtctcagatgttggaaaaattctcattacaagagagaatagaaggattacaatcaaaataatcaaaatacaaataaaagtatttcatcaagattacaagaaagctagagaagaagaagaaggataacacacaaaaagcttgaccaaggctcaaggacctttgtcctaaaagtcatttcctccctcatatggacacttagggaaactctagaaatgctct

SEQ ID NO: 381060 - DNA, 2975 bp, Cannabis indica
gaagcaattcttcaccaggtacaataacataactaattcatttatatatctatatattcatatttaattatatatttacatgtttaatcattgatttggcaggcttgagaaggacattaggttcagctatttttgggtcagatgtgccagacttttatctgtaagtgaaattttttataagcaaatagtagaagtatttaatggttacacagtggatttctcattaaaaatgttacataattttgtgtatggaaggtgacattgttgttagtgcactgtgctggatgcctttactatttgctggcagagttgtatcctcaccaagggaagacatggattggagctttgattccgaatttcccagaaactaacctttggattcgatacatttcggccttgtactggtccataaccaccatgacaactgttggatatggtgatctccatgcagtcaacaccatggaaatggtcttcatcatattttacatgctcttcaatcttggcctcactgcttacctcattggcaacatgacaaatttggttgttgaaggaactcgccgcactatggaattcgttagtgtttctttttcttcttcttagtctacctgcacactcatttttgttgcttttgtttaaggatatgaaatgaattagtttccttcttcattatggtttttgtttgtgtatacagaggaatagtattgaagctgcatcaaattttgtgtcgcgaaatcgtttgcctccaagattaaaagatcagatattggcttatatgtgtttgagattcaaggctgagagtttgaatcagcaacagttgcttgaacagctaccaaaatcgatttgcaagagtatatgtcagcaattgtttttgccaacagttgcaagaaattatctttttaagaatgtttcaaaggaaatacttttgctcttggtatggttcctcactttgatacttcttccaattgcttgcttttccctctgatcttagcaaatcaattacaatgttaacaatgaatctgcaggtagcaaagatgaaagccgaatacataccaccaagagaagatgttatgatgcagaatgaggcacccgatgatgtttacattgttgtctcaggtgaagtggaaataattgactgcgaaactgataaagagcgagttgttggaactttgcaatcaggagatagttttggagaagttggagcactttgctgcaggcctcaaggctatacttatcgaaccaaaacgctatcgcagctcttgaggcttaagacagcagctctaattgaagcaatgcagacaaagaaagatgataacatacaaatcctcaagaacttccttcaggtaatagtggtctctttttcttttactttcaatttctttgaaacacaaatgaactagaaaaatgacatgtttttgtgttgttttttatacttattattatttgcagcatcacaaaaagttgaaggatctgaaaattggagaattattggctgagggggaagatgagggtgatactaacatggatgacaatttgctgactgtcgccagtacggggaatgctgctcttctcgatgagcttcttaaggccaaactagatcctgacattggagatgccaatggaagaactcctctggtatgtattgtgtttgtgtgtgctttcatttcaatgttctcatttgaacttccataaaaggcaatagaccaaatggtttttgtaaaattaaataagtttcggcacttttttcagttaagccttggatttattgctaaactaaaatcatgtcaactgaaggatgtttatgaggccatttcatagatttttcttttcttgtatcagcacatagctgcatccgaagggcataaggagtgtgttctggtgctgctcaaacatggctgcaatgtgcacttaaaaggtcattttaactagcttcatgccagtgctaatttcttattttacatgttattgactaaaacatggcactccaaataagaaaatatggctaaaaatataattttaatgatgcagactttagtggtagcacagcattgtggaatgccatagaatccaagaaccacaccatcttcaacatcctctaccacttttctatcctttcggatccatatgttgctggtgagcttctatgcacagcagcaaaaagaaatgacttggcggcgatgaaggagctcttgaaatatggactaaatgtggactcaaagaaccaccatgggcaaacacctctacaagtagccatgtcaggaaacagtatggagatggtgaacttgctggtgatgaacggcgctgaagtggttaatgaaaattcgtacgagtttccttcgacgactcttactgaaatgctgcagaagagagaggttggacatcagatcagtgtgcctgaaaatgcaccagaagaagtggtttccatacagttgaatgcagaaaaggaaggtagtgggagaaactctgttagagataacaataatccccatagagtgagtatttataaaggtcatccaatggagaggagagagaccttttgcaaggaacctgggaggctaattagattgccagcctctcttgaagagctcagaaacattgcaggtaaattttcctaaacacatttcatataaatatatataggtggtgtttggtaatatttttatctttaaatttttaaaattttgttttgaaaataaaaaacattttctataatcatttttgtttttccccttattattttcattttaatttgttaattttatttaatttggggttggagccagggtctgggtccagggccgagactagtagggatgttcaataaaatttacaaaccgtctaactcgaataaatcacccaaatcaaacaaaataaactgacaaaaaatacaactcgaataagtttacgaaaaattcaaaccacctaatgaatatattgggtgggttgaatattattctaattcgcccaaaaaactagaa

SEQ ID NO: 381061 - DNA, 841 bp, Cannabis indica
aataaaataaaaacataattagattagattggatttttagatggagaatgattgagtgtggtattcaatttcatcaacctttagtcggagtccagtcactaatattggtaaaatttctatttctatttctattttattatttttttacgtacaaatacatataaaatggaaagtttgggtaaaagtttattttgatatagataaatttaaattttgaaaaatagagataatcatcattaaattcgagattgtaaatatatttagttgtcattttaacagatccgttagttgttcaaaaaatattatatattagtattaaattgtaacataagtttctaaaaaatttattttgatacaaataagttcttaatctcgaaaaattataataatagcctcgaacgcaaaattctcgttcctccataaatacccaattaattgttccatttgttactttaaaaaacagaactcattaggtgtctatagactaacgagaattttgacctttaaaacttttactataattttttaaaattaggaccttatctgcatcaaagtaaattttttgaagacttatgacacaatttaacatcatcaacacgtgacatttttggagcagttaacgaatttgttaaaataaggagaatttcgaacttgtagactgttactgttatttttcgaagttagcaacttatttatataagttaattttttgagaatttttgccgtttttttttattattttatttgaaaaaaaattattttattatttatttatttttcaaaaatttcaattttattaacaaaaaaacacaagaaaaaacacacacacacacactctctc

SEQ ID NO: 381062 - DNA, 2283 bp, Cannabis indica
gttccctgatgaatgatgacatgaactagaacagtttattgttagtgtatgcatgattagagtgaaattcttattaaatttttattgtcagttattaataattcaggttttattctctctgtgatcagtgtgtatggtatggcctactctgacatcctgaatttgttgtttgcggttggggtttggtgttttgcctatattgctgctgcagttcttgaatctcttcgaatcttcaattttctctgcccaacttgatttggttattgagggctgtttgaaggtgtcatggggtatgctcagcttgtaattggtcctgcaggaagtggaaaggtgattttcagcgtttaaaaactgacccaaaaaccatgtccttgtcaagtatgctgtggttttcttaagtgagttgttactttaattggtgttaattttgatgttatgtttttttttggtaatggtgatcagtcaacatattgttctagtctttaccgacattgcgaagctgttgggaggagtatacatattataaatcttgatcctgctgcagaaaactttgattaccctgtggcctttggtaagtacaccattttcttttctttacggttgttccaggttttttttttcacctggatttgtatttttttatttataaaattgatttttgttatcttgctttgtgttgcactaccagaaattaagtcttttttcttcttcttttgcttgcagatattagagaactgatttcattggaagatgttatggaggaacttggcttaggtcccaatggtggccttatgtactgcatggagtatccttgatttactttctaaatttcatctttgatttttccaaacatgtttgttctcttatatcatttaaaatgctattttctgatttcaatctgtttaagggggaaatagttttggtggaactattttgttgataggatttttaatggagagccttaactttcatgtttagacatctcgaagaaaatttggatgattggttaacagaagaattggaaaattacttggatgatgagtatctagtttttgactgtccaggtattcattattgtccaaattttactttaaactatatttctagtttcataactgtgaaagtccatgtgctgcggtgaaaagtagaatggaaggaaaagaaaatagggtattttgttgtctttccgtacgtatatcaatgtatcatatttgttgtcttgccctttcaatttttgtgttttctctatagttgattatagcttaaatttatgacaatacatttatattttataaactctgtaggtcagatagaacttttttcgcatgttcctgtgcttcggaattttgtggaccatttgaaaagtagaaactacaatgtttgtggagtatatttgcttgattcacaggtaaatgtgattcttcttgttcttccttttcatttttatgctacccttttttatgttccattcatggcagctataccctgctttcttttgttttttaatcatactgaggaagtatttaattctttctgaaacgatcagtaaattgatgtctgcacttttgtatatatcacaccgagaaacttttctattcctgctgaaatgattgttaagttgatgttctagcagactttgaattcccccgccttggacctccattacagaaataatcatccctctaaatttcctaattttgatgctgttatcagcatgactaactagtttcctatttcacaaaacatcatacaacttatgtttgattgtaatcatagttctaactttgctatcaaatgcaaccctatcacttatcttatttattttactacaggatgcttttgctttttgttattttttcttcccttggttagttttccatgtgttgtttgtttattcatagcgatggtgctcatttttctctcgtatcagtttatgacagatgtgactaagttcattagtgggtgcatggcatctctctctgcaatggtccagcttgagttaccccatgttaatattctctccaaaatggatcttgtctcaaacaaaaaggatattgacgagtaaataatttaccatccctttcttcaatttcgacaattttatatacataattattcctattaggtagtgtcctaatatgtctattttctatttgctcttagttttttggaaccagagcctcagtttttgttgtcagagttaaatcaaaggatgggtcctcaattcgcaaagctgaataagctttgattgaactggtgggtaggtggatttgatgtacttat

SEQ ID NO: 381063 - DNA, 1756 bp, Cannabis indica
tttttttttatatgctaacaagtacaagtatttattttctcggtaatgttttaagagttgcccttccattctcaagaacaggaatacacatttatgattgtttgttggtttaggaattatcaacccacttttcaattatctactggttttgtagaatcttcgcaagtgttggacttggtttttccgaaggattttattctcttactgctcttatgcactcaggtatcttggacagatgctaagctgaaattggagaaggatccacaaggtcgcgcagccaaccctgaacttgattcatccgagactgaaaagctttttcgcgaacacattaggatgttgaatgaggtaaacctttttatttttatctattcaaaatcaaattggcaattttaatgctactttaattgaattaattccacagtccacacatttcaataattagttttgcggttatatttcatttcgtggaaaattgatgtcttactgttgtagtgtctgtcagttcgtacttcagttggattaaactcaagcattttatcaaaagaacaaagaaaaaacttggattgtatttgtttttgtctccccttttctatctaacaagtgaaaaaaagtttgtttgaaaccattaacccaactcaaatatgtattgagcttaatatttgtaagataaacttgtagaaggaatttctcatgtgctatgaattacgttctcagcgatgtgcacgcgagttcaaagctctgttggcagaagtgctgactgcagatgctgctgcccaagaaacagacgacggtaaaacggctcttaattcatggtcaacagctaagcgtcttttgaagtccgatcccaggtataacaagatgccaaggaaagacagagaatcattatggcgacgatatgcggatgacatgctgaggaagcaaaagtcagaaaaaatggaacttgattccaaggacgacaagaaagtagatcatagaagtagaagctctggtgattatgggaggctgtcatcaggtttgcgaggatcgcacgatcgaaggtagatgctttttcttttttgatttagagaccaactggctcttgatttttctttgttagttttaatcttgatagttttgacattgtaaagggcataacaaaagtagagttgaattctgtaatgatactcaactgaatttacgtttgttaattacaaggtaaaaatattgtctaagtttttcttttctgatagctgtacattgtatcagaacaagataaattaattccaaattttctctcccagtttgataatttcaaaaattattgttattttttttttgtttttaacccttttattacaattttttttagttatatgttgaaatattttttttttcataaaggtatttgttgtacttacaatattatctttgtaaattttttaatttttttaaatagtttataatattgaaaataaatttgaagtttttttgaacacgcatggtaaattagaatatcaataataatgtaaattatttgaaattatttaaaaatttacagaattaatattgtaactataagtttaatgaatacccacgatgaaaataattgaaaagaaatatttcaatatgtgattttagatatggaggttaattaagagattgtaattagtatttaaactaaattaacttattaattatttactatgaggttgattaatcaatatctcttcatctttaaccaatttaatatgtagtcacaatgtaattagatttgtgt

SEQ ID NO: 381064 - DNA, 2057 bp, Cannabis indica
ggccactcatcgctcaagccccaatttgaaaaaaaagaaaattgtaacaaaattttttaatgggttgaaaaactcaagaagcacaattatacataggtcacactttatggggcaaaaatcataaaatcttttaattttagttttaaaatttatttttctcccgtgagtaggggcttcaatgtaatttttcaagtacactttctttttgttttcaaaataaatagatattttttccttctaatttctttatagatttttgcatcttgaattttttttgcagtaaaaattattgcataattatcacaattattacaaaaattctatttagttatattttatttttcaaaacaattttcttatgtggctttgaggtacaggtagtacaaatgtctatttaacaattttattctattcgaaatttaatttattaaattaaatatattattattaacgataaaaactcctcaacgaaattattgaccaaaaatcttgaattacttgttaattacaaagattaagtatgggctaatataggtgcaataattaagggtgtacgtcagtcagttttgtcgggttataatatatttattgatcgacctacacgtacatgtactgtgagctctcgctattctgctccgatggtagaattttcgtagtgtgagcttggacattctctattggatttcttctagcggttgatgctagagtggtagggaccggagcgttggtgaccaagtttcttttgcagtcattgggatggcgagaatacacttataccaaaaattggatgttttgatttagaaaaacgtagctgaattttgtctttcctacagacaatgccaaactattaatagtggaaactcgtcaacgaagttaaggacaacaaacctcaagttattcgttaagtaggggggttaagtatgagctaatataggtgcaataatagtaacataaatctggttaaagaataaatcttaagtaagaagaagatcttgtatttgaatcatagttatttttcttacaaggtttcaagcccttccttttttgttgagatggaagggtatttataagggactctcatggctcttgattacaattttgattccttaagtggtctcctatagggaccagacaagagacaaggtagtggggggcaagtagtggtgatcgagtgtcaagtcatactgccacacgagatcatgctcccactacttcgtaccttatgtacgtccattactttgcctcaaatgttgtaagttttatggctgagctcaccgatccgtccatccttgcttaagcgtgcctcccatttcccttgtagattttttactaagtttgacccgagactttgttgaaaccttaagttgttggaagaattatcatctcttgagaccgttttatggtgagaaacgatgtcttagagagaatctcattttgtttggatcgaagagaggtggcaaaagtggactctaacaagacccttgtctcgctaagttagaatggtgcgacacaaaactaacaaggttccccttgttctatttgagcgctggtgtgacacaaggccgctatgtctctagcaaagtgacacatgcatggaaaacgaggctcctcgcctcttgtggccttctagcccctaacagtgcaggtcgcaaccgtgagactctacctcacacctcttcctttcctttcttccttttctttggttatgtcctccatattttcacttcacaaatctttcggggtcaacaattactattattttttttcgcctcaactcttaaattagacgtaattaatatcacattaggataattaggatttttgcccctgaactttgacatgtaccaaatcatgtcccctgaactattgaaaatgttgaatttaaggacttttgtcaaatttcattcaattttactatttcaaagattgtttatgtattaaatcatgctccaaaactttgatatctaccaaatcatacccttcgaactttgacatgtacttgttaggttataattaacctatattttggatctttaaagttagcattatctcgtcta

SEQ ID NO: 381065 - DNA, 4872 bp, Cannabis indica
acttggtctcgtgaaccacaaatcaagaaaattttataattggaattttaatttctttaattctaccggtgccatttgatccgaggccttagaaactggctcatcccccaatgtcaaatcaatctcaaaatcaatttctctttttggtggtaatcctaataactcttttggaaacacatcctaaaaatcgcacactacacgatcttcttccggtcccactggtataccttcattgtatctaatacactggccaagtactccatacatccttctcataaaaaatctctggccttaagttccggtatcattgggattcgagatccttgaacctttcccataaaaacaaatggggtttcaccatctggctcaaatgtcaccatctttcttctacaatctatggtggcattatatttggccaatcagtccgtccctataattatatcaaatcttctaagtcaagttcaatcaattccactaaaaaatctcttctttataccaacactagaagagattaaacccacctcctagagatcactatttcttctgtaggcaacaaagtaccgaatgcactagacataacatcacatggtctactcaaattcttaatgactatacttgaaatgtatgagtgcgtagcaccagaatcaattagaataacaaacataataccactaatagagatctcacctgtaacaatcgaaggactagcctctgcatctacttcggttaaggtaaacgcgcaagacggaaccatagaatcttctttcttcgcatcagccttttgtaattgtgggcaacttctcttcaaatggcctactactccgcactggaagcggattttaacctgacactcacccaagtggtgtctcttacgttttggacattcaggatatgattgccaatactcatttttgtcccaacaaaaccctagttaccttgaaacctttagttcagatgcaactagtggttcatttggcttcgttttccgatcattgggattatggcccttactcattccaataccggattgtgccctccacgcatcccttctcagattgctccttttgtaaatcagatattcagccccctcagtagctaaaggtaactctacaatctgagcatataagacatccaaacccctagtagtttggctaccacgataacatccctagaaatgtgttttgccaagcctttaatgaacttggcttttcgtgcaactttagtggccactttattagaagaaaacttggccaatctgtcaaacttggtagcgtatcctgtcacattcatgttaccctgaaccagccatataaactcttctactttggttgcacgtatgaatcattgtattacttttcataaaataacgttcgaaatgtatcctaagtcatggtattcagatcatgtcctgagataaaagctaccaccatatctgagcattatctctcaacatgtatacatcacatctaactcagtcattaccctcaacccgcataaagtcttaaatagaggtaatcatacttatccactgctctgccttcagtagatctgggccaccctcaaacataggagggttttgcttcctgaacagctcataaattagttccatacaatctcccacattctgctgtattaccataggtgctagagctatcagaacaggtgcagggcaagcctggtgctctctcaagtctcgaatatgttccccttgctgcctaattgtatcttgcatagcagtaaatactcgttccaagttctgaggcagtagaggattctgttcctcaccacctgcctcgagcctcaactcgctattcaatcggttcgattgtcgtggtgtcataacctaatgcacatgcgttccacaacatccaaccatttagaactcaacgagatattaatgctaataagcatatcccacacacataaacacatcacaattattactatgttacttttctagcatacttcatagcaagtaaatagttaatcaaatagcaaataaacacataacacttactataccacgagtcgacctgtctccacagtaaatgtacatatctgaccaatcttcaagacctttaaaaccatgacttctcttataccaagtagtaacgacctagctcctagggacgccacgtgtgtactttagaaacattaatttttgtagtagtagatctttacaatttaataaaatatgtgataatagtaaaaacttcactaaaataaaactatactaatgaacaagattacatcgctaaaaatttattttggggatttcctattacaaaagttttacaaaagagctatataccaaagcaagtcaagatacacatcaggtgcaacataaaatatctcatgacaactcaaccatacaagttggataagttgatatgtacatttgtcggagaagactgtcatctcgtggctatcctagtttttatttacccttatctgcaccacaaagtacccgtgagtcacaaagactcggtaagaaatgtaaacataaatacatatgaaatagataaccaaatcataataatataattaaacagtaatgcacaagtacttgtctaataagacaagccatatttgttactttgaaagtaatcatttcttttgttgtctaataagataaccttgatgccctaactcggtatctacacatcacttgttacctaataagaaaacctgtattccctatcccgacatccacatacctttatcattgtctataagacaatcgacaagtatgaagcctaacaatggtttcaattgacgtctggactttctcttgcttaacagtaatcaccgtatctttacctcaatcataatcgagtcataaacgatattaatcgcatctatacattctatgtggtacatatgtattttcttacctcaagttccaatttaggtatgttggtcgacccaaaatggagagagatcaacgatctcgaaccttatgtcacaacaacaaaaaagaaccaattaatcaacttgacctaacccgttctaggtctttaattcaccaccataagctcccttattgatagatagcatggaaataccataaatattgagaaaatacaaaattgggatcttgggacaagtctcaaaacgggtcgtccattataaaaacgatcgacctattttagaaataagacggtccgaaattcccctgtttgatcttaaaaagttcatatatcactaaatcttgagcaaaaccttaccaaattttgtaaagaacatatacacatcataaggaacattttttatgaagaaaccacagctaaattcccaataaaaatgaagttataaagcatgagccatgaactcaaacttgcataacttttgctacaaccaaccaaaacacatcaaaccaatctaatcagtcttaaacaaccctaggaagccttttataacctccctagatttcctcaacgagtcctacccaaaatagccactaaaacctactaaaaccctagaaaaccaatgaattaaggttagggtttgccttagattgctttggaggatggaggagttgtttcttctagttatcattagctaaaataagcttcaaaaaattgaggaaagcttgctagtttgttctggttttggagggttcaaaaatagagagaaaggatgaaggtgagttttgacttttcttttcactttgaatttcttttgtttttatttctatcttaaacctttccaagctgctggccacaaaaagtttggtgagtcacaaccacttttcactcaaaactaaggtgactaatcaaatgacaaaaatactaaaatgtccttacttccccgctaagtaacctcgtccctaggggtagaatagtccaatattgttaccccgctaaatcctgatattctaaaatcatcttatcataataattctattgaaatcacactcttaaatcattgtgatatttttggcctccgatcgggtccccaaggtcgtcgaacctaaaaatatttttattccacgaataacatacatgatgcccacatattctaataaaatcttcgtaattaataaattacacttatttgtctactcatgaaaaaaatttcttaattcatactgaattaaattagtagaatcatttaatccttggcttgaagatgtctctaatccttggtttacaactactactgctggaatggagaattggaacgttaataacctcatggtgttgggccaaagagagtgggatttggaagtagttaatgacattttttaagagagggataaggagctaattttgaaaacaaatgttagtcaggaggctagtattgaaacttggtattggcacttggatcttcatggtgcttatacagaaggaggcatatagattgatgcacaatgccgatgtcactaatattagtgactttgatatgaagatatggaaaattgcttgaagttatgttcctccaaaagtgcaccaacttttgtggcgtgctttgactggttgcttagctacaaaagttcaactcactaccaagcatatccctcttgatcaaatgtgtcctacgtgtaaccaaatgcctgagaccattatacatctattagttcattgcccctttgcaagttcttgctggcagcgttcgatattaagcattggcagtaggtctacggtggatttttgggactagtttagccatatgctgctgtagcaatcaaccacgacccaggaggaattggtgatggttatttgggcaattttgcatgcccagaatgagctggattggcggggaaaatctatgtcagttgttgaggatattctattggcaaagtagtccttaatcaatggagaaatgctcaacaaaggagattggggtctttatttgttccttcagattcaa

SEQ ID NO: 381066 - DNA, 2448 bp, Cannabis indica
tttttgtttctttttctcaaattccaaagagagggcatgtatacaatgcatcaataaatcacaagggtcccaatttactaataagatgtgattagcctgttagctgtccaattagtgttccacaacatttgagaatcgtgttaaacattgatatatttctgctgagaacctcggtatattctacttcaatgacaaagattgaatatactcaacaagctaattgtcaagacaaaaagttaaaaagaaacccagagttggcagctccaaaatactatatgaataacaccgtaaaaacactagaatttcaacaagaacaatgcaaatcaacaatctaacaatcaaatgttactttcttgtttgacaaataaaccatcacagctatttgtgatccaaatcacgcaaattaaatagaataaaagtcaaagatgaaaagaaacgtaaatttatatccagaaccaagatgaacaatacatgaaaagagaacagaaaactcacatgtccatggtgggtcttcagccctcgatcctccactctacagttgccatcaattaacattgtctttattggaacctaataaaaattaaaatacaaaaagaccttttagtgtgaatgaagctcatttgattcttcctatccaaaactaaactttagtgtctctccctttaaaaaagtgagttcataagaataattgctttgaaataaaagataaacctgattatcctgaggcttcctcttgtagtaggcaagtaagccgagactcaagaacaaaatagcgcatgtgaatgaaagaacggccgatcttccttcgtccatagcgaaccatccagccttcatagatcactttagacgacatcgtttacgactcgaaaatccacagtccacaaacaagaaaacgagatattcccgctaactcggaagctctgggattgcagcctcagcttctagcgagatcagcaccccaaaacctatgtgacctgatcagtcatcgtctaaaccagagaatccaagattgggcaaatcgagacctagaattggaactcactgcattgccttggaattcctgaagatctagttcatcaaattccgcggcattgacaatttgacagagtcagaaaaaggagaaagcaaataaagaagatgttaatggcggaagtgattgaaacgcggagatcggtgtagaagacgattacaacgacaacaaaatgtaggtaaacgacgtcgttgcaggtgagaaagagtcagcggtacgatagagaagagagagattctagtgagtgacggctgaaggtggggaggagatccccacgtacgtaagaaaggcctgtgtcctcgaaaggagcacaacacgtggcggatttggattggttggtgaaggttgaaagtgtcttggcgccgtgacgctttcccaaatttttaaaagattggaatacttgtgtttgtggagtctgaggcaacgatagtacccggagtgagttagagagagaaagagagaaatgataattagtaaaaaaaaaattgtaaattttcctattattttttttattgagatcaaatttattgaatgacgtaagtacccttgccattctattatgtattttgtgtgctttccaatttgtatggggtcattttcgttatggatgttgtgtgactgtgaggtcatgtttttggccggctgttatagcgggattttctttcgaaaagatgaagaaaaagaaggagcagctgaacctgacacgtattttagaaagataatgaaaactcataaacgataaaactttacttgcagtatatcaatgcttaataaagaaactttgccaatgtgacacatcagtctttttctttttcaaccaaaaataaactatcacaaagaaataaatgtaggaaccaaaagcaagagatggaggggttacatggaaatttgaccctcgcggtgaatggggcggggtgggagacaattttgtattccggggaccggttcaggctagggtcgaaactaatattaaagttaggacattgttataataaatgatttttcatatcgtgttttacgtattaattttgatttttaatatcttttataatttaatgttaattacaaacttagcattaatatatgtggtttgatatgttattcactatttggcttttaaaatttataaaatatgaatctataaataattgggaaattctacaatacacccttttaaaatagatacattgatgcacccttatttgttttagcacccgaaataatttttttgtcaaattttttttcatggccatgtacgttataattatttaaggggaaatttaaattaatatacttactaatacctataattttttccctaaatgcaaagttattaaaattggctacgtatgaccacttttccaattttcctaaactacccccctcatttgtaaagaatcagcctctctcttcctctc

SEQ ID NO: 381067 - DNA, 2759 bp, Cannabis indica
aattgagatgtcaatggcatgatgttgtagttcgtgttgctgttctgttgtagttttatggtgtttgttctcttcttggtgcctctatgaggatctaatcattaaaaaaaaaataatatatatctctatcacccgatatacataaagctctacgtatccactgacaaaatacatggcgccatcacctgtgttaaaatcatcctattttataattcaatcaatgttattatcaattacaaaacaggatcattacgaattaatggataatgcattcatttaataacattttcattacttcgaatcaatgagatcgaattacatgattcctctattcatatattcataaactacagataatgcagtgcatttctcattttaaaagtagggatttgaaaaagttgctaaatcaacacgcaaggtaagaatctttaacatatatattgtgaatatgtcttcttttttgatgttgaaagatccttgaatatgtgtcaaaggaaagccatgttaccctgccctccaccaccaccaccaccaccctagaatttattataaatgagaggtagctacaaagaatatgagtacaataattatctattacctttctttttctttttcttctgtcactttaatatttgtctttttttttagtaataatctattacctaatatcaagtggcctaacttttaggattccatgtctaaaataactaaataataaaatatagaaatgaaaaagcatggatgcatattcacaatatataaagcccttagcttagttccctgttccccaagctgatcaaacaaatacacaagaaaacgaacattagtagtactagttcaactcatattgttcccttgttaaaacatactgcatacagactcaagccagatgtatggtcctgtggtttatgagaagaatattgcagacaactgctgtgtgagtgagaccaagggggtcaaagtagtcccatacagcgaaacgacattaaaaagcaagtttagactgagcgacgccaacggcgacggtcgtctcagcaagcaagagctcagaaatgctttcgcgagtttaggctcttttgcacccggctggagggcctttcgtgccctccgccgcgctgacaagaaccgagatggctttattgacgaggaagagttagataaagtggtcaaatatgccgcaaaacgtggctataccatgagagattagatacatctactgttagactgtttctataatttcctacctgttgtcttgtgaacagagtatctctgtttttagttccttaaaaggtttttttgtttttatttttttcagtttggaaggtgtgtaacactgtatagactagggtatgtagtatacataaatggactaaaacgaagttaatgtaaactatttgtttcatatttcactctcagaagtagaaaacatatatgtacttttgtaattgtttctttcttttttcctttctgctacctaactgctacttgaaataattattattagctgcttttttatttttgcagtttaaaataattttttttttagttttatgaaattctacgaaaaaattcctattgcaactagcgctacaacctaaatcgcaacaaaaaatcgtatagaaactcttattgcaactagtgctgcaaccactttagaaacccaaattgtaaatttgaaaaaaaaaaattaaaaaaaaaaacagtatatatagtaatttcacttattattatcggttgtataaataagtattacaagcattcaaataattaataattaaataaataaataactattaaaactttactttaaagtaatttattttttagttttacaaaaattctcacagaaatacaaaacaattaatagaataatctaaattacaactaaaatccacatagcaccctacgtagaaactagcatagcaacacaaacagtaaattaaaaaaaaaaaaaaatactataaaataatttctctaatattaaaccatttaaataaaaataatactcttattttatacactcatttatcaaaacgatttaaagtagattttgttttttaatcaccgctcattcttattaccattcaataaataaagagaaataacaacaaatcaccttccatctaattataaggtaagttaatgtcaatttttcttagacaaatatggtaaatggcttctttaaaattgtatgacctatttatttccaagaaaatattcttcaccaaaagcctccactattatctcttccatttttttttggggtatatacgcagggttggccctgagttgaaataggcggtaggcaaaaattatttttttggacgtttattataaaaataagtggtatttttaaaaattattaaatacatatattaaaaggtgttttttatttatttgggctcctaaaatgagtaggccctaggcgtgggcctagttcgcctatgcccagggctgaccttaatattacgtcatacacatttcagaattcaataatttgtattctatttgataaaaattttatgttttttttaattggatcacttattttttattaattattaatagattcataatatttatttattagagtgtgttttaagaatatcacatagcacaaaataaatatactaaaaatttaaattaatattttattctattattataatttatagaaaaaaaatagaaaaggatgaaattttcttagtgttataaaataatataaagtagatgagaagaaagaagaagaagatgaagag

SEQ ID NO: 381068 - DNA, 2990 bp, Cannabis indica
aaataaaaaataaaaaaataatctgaataagtctcatagttattgtgtcgaaaattttggttttacattcgaactaaagtttgttatttcattctgcctctgatttggtaatatattactgtcagaatatatttatataaagcacacattgcttttattgttctccttgacattcattttgaatgttgttctacagcattgtattacaggatttattgaaggtggtttctctaggatgggaggaatatggagactcttggcatgccaagagagaaaaattgttgatgatttatggtgcagctcttgcatctaattgtagatttctcattcaaatgctacaggtatatttgttttcatttactcattataaatcagagtggtagaattcttggcctgggttggtaaatgcattgccaatacctacctaataattccaggataaaaggagtggtattttatgaaacaaatgcattgccaaagattacatggaagtttatttattacaatttaagggctatattgaactgataattgatttccgcaggatctccatgatggcttgcttttaaaagagattgagttgtatcaatctcttgataataaccaaattccacctcctttggaatgtttccaaagatttgttaagaaattagactttaattctgatttacataataaaactctgcccctaaatgccgcggtcagttcttgcatgagagacgtgtgtcaatatgctcgagtctctggacagcatgttcttgagtgtgtcatggatactgcgttgtctgctgtgaagagaaatcaacttgaagaaactagcaatgtatgtctccagttttatgtttaattgaatatgtgagtataatttcattattttcgtcagtcagttatttaattgtacatgcctgaattactgattttttattggaaaaccttgcttgttttcctgtggtagatcttttcactgtttccacgtctcctacccctggtagcttgtatgggttgggatatattatctggcaagacaacagaacggagagaattaatgcaacttttttggactagtaaatctcaagtactccgactggaagagtcttctctttatggaaaccaatcagatgaggtacttctaattttcaatcgttagtttgatgttttcaggtgttaaattgttactagctaagaactatgagattatgatttatgtgtttttattttttgacagatatcttgtgtggaacatctctgtgattcgttatgttatcaacttgatatttcctcatttgttgcatgtgtcaattctggtcgagcttggaattcaaaattttcattaatgttgtctggaaaggagcaaatatcctttggaagtgatgatgctcaattagacccatttgttcaaaattttgtgctggaaagactttcagttcaaagtcctcttcgggtaaggttgtaggtatatattattgatttgaacaaggatgggcatagatcaaccatgagttttgccttttgatgaccatcattgtaactctatatctttttggcttttgaaaaattattgtaatggttctgttatcatgttaatatgggcaataacacaccaaatataagcaacattgaatttaaaatgtcttcacctgaaacactttgttcttcagcaatactttttttaaatgcccactttgatatattttagtaggggcaacatgctatgtcaaatttgtttaacaaaaagtctgttccccttatttgtcgcttgtttgaatgtttgagcattgagcacatatataaccttccatcttaacagttaccagaacagtgcctctgcgaaacctgagtgaaagttgcgaatgccaaatccaactttctcaagatccgaatttctaatatatataatcacatgttaggcgaacttctttgatctcttttcttcctattattcctcatattaatacaaaggtgttcttttttttttcctaaagaaacatgttaggccaacttccttctgtccatttgatttttgttaagttaaaatggtacaattattctttcaaaaagaatatccaatagaagtggcacattgcaaatgaatagatgtgtaactgggaaaattgttttaatttgaaataacaaggtggtcaatcagcaaaaaaacattgaactaatggggatggttatgtagtttggaatttctaaattgttgtagcgatgataaatgaagaatgctaatatgtgatcatatgattgtgtacaggtattgtttgatgttgtgccacaaatagaatttcaagatgccattaagttgatcagtatgcagccgattgcctctagcttggctgcctggcagaggtgagtattctaacacgtagcatagagattttggtgagggtgcttgtttaattttgttccattaggcttgtgccacaagtctgcacatgatagtacaaaatagttgggtatattggtaggcattttggcatagtgctgcttactggttgtcttttttgcttgctctcgactctatattagatgaaaatgcaaatttcatcaatcatttttctgatactgatgctgatgctgttatgtaaggtttgcgtaatagtattgtaatgactaggactttgatgtatggttctcatttcctacaacatggtttagttttaataaatacatacatgtcctttgattgcgtgttctaacttataaggctgcttatgtgtgttgcatccgtggtttgtttggagatgagttaatgctggtagtaaacttgagactaattcctagatttgttcttgatataagaacttgagcattatagcttagatataatcattttcatcattattcttccatatatgctgatggtgctttctttttatttttcctttcataggctgcaggatattgaacttatgcacatgcgctatgcactgagtcagctgttcttgcacttcgagcaatgcagaagagcatgtctggtgaaagagaaa

SEQ ID NO: 381069 - DNA, 1033 bp, Cannabis indica
ttatttttaaaaagattccatttttttttttctatatcttcccttgttttagtcagtttgtaaatcaaggctttttttatttttctgattattgatcttgatgaataggcctaacatgtaaaatgagacccttaaagagtagaactatattgggccaaaagaaaaagttttttgatttatccactttttaatgtatataattggtttataccataattattttcttttatcattttataagatttattactaataaaccacaccaccatatatttcatagaaaagttggtataataaacttttaattataaatctattggtatgattcatagtttaaaaataaatggcatttatgagattgaattattttttatttaattaataattaatattaatgatgacaggaatatactcagtgaatgtggattatcatcaacagaaagtaactgtttggggaatatgtaacaaatatgatgtgttaacaactgtaaagagcaagagaaaagatgcaagattttggaaccctagcgaaaacattgacttttcggaagagtcaaagttggaaccaatttcttcacaatctccttcttcaaataatcatgactacatctctactatttcaatgtccaaaccttctttggctctcactagggttaaatcttttagttggaaagcaatgaagaaagttttcacaagatctcactccttttaatcataatagtaatttaagtgttgtttaatgacaaaagagagtttttcaaagactaagaaatgagtgtaaatttggcctattaatggacttcatctcaatcttagtttgtacatattttgtctcaattcaagtattaatttatagcgagttttgtcaggcattttgttacaaaatgtattgtaagctttgttttatgtaatttggtttttatttactctattttctatttatgaaatgtaacgttcctgattcaagtctccattgagtcctcacacccacggaatgaatgactcttatacacgagtacgtcactctggctgc

SEQ ID NO: 381070 - DNA, 2559 bp, Cannabis indica
ccctccctcaacacccctaagtctgcctatttgaacgaaacttaccccaccttaaaataaggatatacagacaacaaagtcggacaatgattaaattccccctcagccataaaaacaatctcagaagaataaatgcttatatttattatattactatgtaagatttgatattaaattagaccattaatagtacacgatataatattcttaagtagtgacctttaataattctcttgaataaataaagaagaaaaaaattattttaatattaataaagaaaaaccattaattataaaatacaaccaataacaatttattacttttaaaatggaaatattgggaaacaagacatgcatgcacatgtataatacaagtgcaacctcttcccccattccttattacttgaaattattcattatctttaaatagaaatactataaggaacacccattccagtcacaccaggctcagaagatggcttcaaaagctcataaggagcaatcccagctccatttctattcctcaattcttgattaccattcctttcatcaataatcccttcaatctccttcaatctcccactaaattgttcaaaagtggcctttatgtaagtatcatcaccccaggaaggctccaaagcctccccaagatactcttcttcgggcgaatgagtagacaacacattcaaaaccgccattactttagccgcttgaagcttagaaggtaagcattgcaagagagtcccttcaggtttgtcaataaagtatttccactcttcatctgtgggatcttctgttgggacattggttctagctattgttgctcggttagggaaatatcctgcatacgtgtattgaccaaagtttacagctgcatggtgaccggatgtcacccaaactatagttgttagaatttgaataaggtcttctggtgtctcaagagtaggccaccatggctcatctttcttatcttcatgcccaactgttcgaatttctgtccaccaagattgcaactcctcatctaactcaacttggcttgaatctgagtagtagtggttcacataactagtaacccattgtttaagggcatcccagatgaggaggccatcgttggcaaaagggtaatcttcgatgtttaatttcaggccatgtggagagtcagggtcctctgttgctattcctctgcttataagatctgctggcaaggcctcatgatcgaatcgccatagtttgtcataagcagcagaacttatctccattgagaatttaccaggtgagaatgtgctttctattattccatttgaatttattagtagttgacgagctaaggcattgatttccattgtgtatctaaaatgagggtgcaacaatctaaatatagggtgcattgcactcagttgcctttttgttgctattatgtatggttctgtcacacaatgtgtccttaacctaaaacaaaaacacaaaattaatattaataatgtgactcttaaatgtaatttagcactgttaattaaaaaattgaatttatttcacgttagtgtgtataatattttggccaattagaatttttccttttaaattttgacatgtagtaaattttgtctcctcaacttttcaagcctttaaaaattctcttgaactagtgagattgttgaatttaaggatttttatccaattctattcaattttactaatgtggggattgcccatgtgccaaattgtgcctcagaactaattgatatgtatcaaattgtatcccttaaactttcatccatgttaagcctccattagtaaaattggataataaaatttgaatccaacaatctcaatagtttaggtgacattttttacagtctacaaaatttcacgggaggggggggagaaatttggtacatgtaccgaagttcagaaaacaaaatttttaactaattacctaatattttagtataatttatgagagcatatgtatcatataatactgaccagtgactaacgagttggtgaacaccagaatcatgagcaagaacatgagctttcgcgagcctccatagccaatcaccagttgcattccaagtaggtgtaaagacttgcttccattgtggcttatcatccatttgtggtctagtgagctcaatagccaaaggccttaatgtgccttcttcagttaggaaaaacaatgctcttgatccatacaatgttgttccttcaagttctcttactttttccacaaatggtaataacaaatccatgtagtctaacataaacaacttcttttgttctattgcctgcattataaattgttatatttttatttatttattatgaattacaaaatattacatgtacaaatacatatagtaattaattaattagtgtacctcttcaacagtcatgaaacctttgatctctttatcaataatttctttggtgattgctgattctgctgagccatacacatttggatcaagtttactttttagtggccattcctgcacataaatatatatcgtttatatataagtataattaattacagtattaaaatatacaactaaaa

SEQ ID NO: 381071 - DNA, 4257 bp, Cannabis indica
ttagcgggatttaaaatgtgtaaaaaatgctctttgaggagcctacttcatagaagtttatagagttttgctcttctcatctcaaacgactactataatccccagttggttatcacactcaatggatcctgcagctgttactaacatgttccaggatgctgttcagatttcgcacgatgacatagcatttgcccttaaccctagtgaagtggacgagccagaggaggccaaccaagtcctactggggaaaataatcagccggtataaactaggtaaggttgcgattcagggctctctcaaactttcatggaatgcgataaagggatggaaatggaaggaactcgatgataacattatacagttcacatttgctaatcgtaatgatgctttgaatgtcctagcccgtcacccatggttcgtttgtggggctctcattgtaatcatgccatggccatcatggctatctccttctgaggtaagatttgataaaacacccatttgggggaacatcaatagcatccctccattctactggaacctatccaacctgaaggaactcgcatccaaagcctctcctgtgtatgagcttccttcgggtattgaggatgtcgttggtatgagttctctacgatttagagccacaatcgacctcaacaagcccctattctctggattcttcctccgtagacaacgtctcaaggacctgtggttgcagtataagtatgaaaaactccccaaaatgtgcttcaaatgcggtgtcttaactcacgatcaaagcctttgcttcaaaccacccactgtaatcaaggatgaacaggggaatttatacccaatgtatggggtgtggctaaagaaggacgcaaatgaaaaatcaacattctccacttcccttgccaaatggttccaggattggacactccagaagaggctaatcaatgacccaactctacggaaccagataaaagtgcagaaggcacttaaaaatggcgattcggatgaactgagagaatgtcgaagacaacttccctccaagaaacgaattgtctccgacgacgaggcggagaaagacggaatggttattacccagctccccatggtttatctcccaggtatcggagaagttgccccctttggataatacaaaagctgttttaattctggaactgcaacttgcccgctgtactgatgctttaccagaggcaactctcaacggtactttgggaggcaggccagcactggaggcacaagagaggtcgatagagacagaagctgaacatcctattttggagggggcagatggtgatgaagagaaccatggcttggaacctagccatttcgagaagaggaagttgaattcaagcgaaggtagttctttcgacttaactgtgaatttagataatcactttgtcgtaattgagaagaatgaacgacctagcaataactgcatcatcactgaaatccctgatgtgtcgactagtcaagacaaccaagttaacagacatgaggattttcgatttggggctacggagacttgcccggaaaagtctccaaagtcgccatgaaaatcttatcctagaattgtcgtgggctcgggaattccacgacagttcgacaactggcggcgcttgtccgtcaacataatcccgaagtggtaatcctatctgaagttcggttactaagcaccaaattttctagaatttgcaacaagttgaagttcgagaattcacattatgttcctccatttggtagtgcggggggacttggattatgctgaatgaaaggagttaattgtaaaatccaattcgcaagccgtttcttaataattggtgaaatttcttctgatccccctggatgccactggaagttttttggtacttatgggccaccgcatagcagcgataaggaagaattctggactcatacaggggagctagctctgggtgcgggtacaccaatattactttgtggcgacatgaacgggactctgaaggactctgaatgcttcaattatgttagaagaagcaattcatctagatacgcattcgattttaggcgaatggttcagagagttggattggttgatcttggccatctgggccctggctttacttggatcaaagatggtaattgcagctacctgggaagaactactaaaagagcaagacttgatcatgggctggcttcgccagattggcgcattctcttccctaacgccgtcatcacgcacctttcagctaccggttctgaccacagaccgcttctcttggatactacagctggtgtaaattgcaaaagacgttccttcaaatatgaaaatatgtggatgagggatcctagatgtgtttgggtggttaaggaagcttgggctagtcagcggcaccacaacccaatggttagcttcaatagaaaattaaaagctactcgagacaagctcaaatcctggaacaaaattcaattccaggaagtcaaaaagcaagtccatgctgcaaatgatcttttgcaaaaggttgaaatggaagacccgtttaatggatcgacgattgaacaagcgaaatttcagcttaatgaagcccttctcagggaagaaatacactggaaacaaaagtctagagtgcaatggctgcaagagggggacaagtgctctaaattctttatggcctctaccatagttcgtcaccggagaaactatatccaatgcattaaagacacacttgacggggaatggattagagaccagcaacaaattgccaattgcttcctcaagaagttcagcgatggctttcgaaatcaaagggatggctctgcctcaattccttcagacctattccaaaatgtaatcagtacagaggaagggaatattctatgttcaattccgtccgagagtgagatggaagaggcgttatctgaaatgggaaaagacaaggccccggggccagacggattccctccaagcttctataatcaccactggaacacggtacactctgatctcttccaagtgatctcccattttttcaatcataatgatctgccgcgctatatcaaagatacctccattgttctaatcccgaagaaggactccccctctcttgtgactgattatcgcccgattgcgctgtgcaacactacttacaaagtaatttcgaagattattgccactctattgtgaccttttcttcaaaagattatttctcccaaccaagcggactttgtcaaaggtcgatacattgctgagaacacaatgatcgagtaggaaattgttcactctatgaagaagagaaaaggaaaagggggttacatgctcatcaaaatcgacttagagaatgcctatgatagaatgggttgggagtttgtcattaaggttctcggtctgctgggttcccaaatactttcacggagtggattaaaacctgcatttcggtttcagcagttaaagtgctgctcaatgggtccattgcgggaaaattcacacctgatcaaggtttgagacaaggtgatccactctccccttccctatttattcttgcggatgaaactttatcaagattgctattctccaaagaaaaggctggcctcctgaagggatttaaactatctagaagaggctcggcaattactcatctcatgttcgcggatgacattattctattcgggcaagctaccatcaaagaagcaagatcattccttgactgcctaaacacgtattgcaactggtcgggtcaggaagttaatgaggctaagtcttcaattttcttttcgaagggtgtctcatcaagaaaagctcaagctatttctcagctgctgggaatgaagaaaatgaatagcaaagctacatatctcggactgcccctattccgatcgctcaaaagaactgaggatacgaatcacctagttgagagagtgcttaagggtgttcaaggttggaaggctagactcctttctagcgccggaaagacatgcttagtcaaatccgtgggatcaacactctcaaattatgtaacttcttcagatgttatcccggtcacaacggccaatcaaattgacagagttcttagagacttctagtgtggagacgtggatgacaaacgaacacttcacactgtgtcatggggaaaactatgcacccccaaggtggctgggggcctcggatttcgatcgacacttgctactaataaggcgttcctgttgaaatgggcctggaaaattctgatggatgagaatagcctatgggggcagctaatgaagaacaaatacttt

SEQ ID NO: 381072 - DNA, 4799 bp, Cannabis indica
tcgaaatgagttggtgagatacaaggacaactgatacacagttccttaatatctaacatatagatcactttcataaatctttcttgaatatcttctaatgttccctatttgattacatccactataagaaaatggagaatatacgacactcttttaatggtggtttattcgaaaccgctgttaaaagacactttagtcggtgattctgagtgaaccgccgactaaagtgttctttaattgtggctaccgaaaaactaccgttaattctctaattttaaaaaaataaaataaaaaaatttagttatattcggtggttcaaagttaaccatcaactatttgtgtgataattgacggtttaaaaatgtcctcaattttactttaagaaaatacccattatgctccattttctttttatcctaaatcttaaataataaataaaacaaattgaacagatgtgtatatataattcttttccctcgttctttctcatttccctctcttttcttctctactctgtttttcttgtcttcactccaatgctatcaatctttattcgatgtgtataaagaaattagggtttgaaacttgcatagaattctctttctgcattttgaccttagttcactcgtcgtgacacactctccacattctcagtatataattttctctatgacaaaatcttgattaataaggtttggtttattcctcttttattttctgttaatgtatttaattttctttttagatgaaattacatttttatgttttatgggttgtaagaaatttgggggttttgagttcgtaatgtgatggggtcaatatgattaatttgaaaggttttagagctagttttattaattgcttataaattgtttgttgaaatgtctttaatcaaatattatttccggtcgaaagttctttttccattacgttttattctttctaaggcagtatacactaagtgagataggtatgttctaaaagtaattattatgaaaatgataatatattttattgtgtttcaagttatataatattatgattctaccatgatttttttttttcaggtacattgttaagtcttggctgaagaaattaattcaccaactattacattgcaagaactttctatttcacaaggtatctttctgagttctttttcaaatattgtggcttttaattgctgtaatgtagttataattttactgagatgttggctcttgttaattcttttccttattgaattaatatttgagtaattttctatttagttttatgtctttttatgtagtttatgttataaagatagtctagccaatttagatatataattattggtaaatgtaaataataaactgtgattgattataattttttatcaatttttccgtcatttacattatagtaggcatgttcatttccttcttctataaagaaatgaattatagatcattaaattgatcttgaaataaacaaagattatcaagagtatcataattagtcttttcttcagtttttttctcagtcttgatcatctttaattttctcagcccctccctttcttcctcagatgatttaatttgactaactttttaaactagtgacctctttaaattagtgatctcatttagttttcatgttccagtgttcttatgtgaatgggttgacaacaataatggtgtgaaagaagataggttagggttcaagttggtcaatcttaacaaaataggtcataaagatgacccatttattgtggcatctcaagcaagacaagttttttatgttgatgatccatgtaatagtgaatggtcaattgtattatcaagtgaaccgagaaacctaaggtcaaatgatgagattccagaggttgaagaagttgatgagttacaagtcatagagaaaaactttattgacattgacgagtttgattctatagaagcaacaactggttcttattatcgtgatgaccgtgatggtatatggattgaccacgaatgaatataaataaagaaaggttgacaatcaagataataatgaatggtcaatgtttatgctttcatgacttgtttgaatatataattataatttgtttgattttacttttatgagttatttgagtatgttgttacaacttgtttaattatgctcttattacttgttatatatgtttttatttcttgttttattatgattttctgaattattttctgataatacttctataatattttgtgtagataatggagaaacaagaggacaatacccaacttgaaaataataacaaactgtcaaacaataagaggaaaacaaacactgtggcagaaaagaaaactagaggcaattctgtgcgccaagctgtgttgaggatgagggcacaaggaagaaaggttcatgtagactttaacttgcatggtcaatcactaggcaaatctggaaatttgctacaatcatatcttggttggcttgctcgtagcaaggtgcctattacactagagaattggtcaaactgtgatgaaaatattttgggccaactttggcaagatatcatggcaagaaataataatgattttggatataaatgattatattaacatttttttctatgatttttaatagtacatatttgcagcaaacttttgacgggatcaacgagaatgcgggacatatgatatttaagtcaattggaaagaaatggagagatcacaagtccaagttgacctcacatatttttaactttttaaatgaccctgagtatagagaggaccaccccacacattgacagagcccccaaaagactacatcattagtgcagaagaatggaaaaagcttgttgcatcaagaactagcaatgtctttaaggtataattttagaagactgcaatattatcatgtatatttaggagtatgcatttgaatttgaatcttaccatagcatatatatataaatgaaggaacaaagaaaggtgcaacaacaacgacgttcccaacaaaaatatgctcatcggacagcacgtaaatctattgcaaatatagaatacgaaatgcaaaaggagcgaaacacgactgatccaatagatcgtggagagctatggaagcgtgcaaggcaaaataacaagggatcttatttaaatgatgagacaagagaaaaaagagaactaattgtaagtattgggattcttttaatatgccataatttttttgtagcaagcatatccaaacttccttagcttggaaaattacatccttaattaaaatattttggcatttaaatttgttttttacttgcaactgttagtcatatggtttctatacttctttttaagattatctttacttaccattgttatcaaagaaattgtgttgtacattttttttcttaagttaaatggcttgtgtgagttattatttaacttattaacaattcattatgtgatgtacgctgaattgcttggaaagaaagaaaggggggaactaactgttatcggccagaacgatgttcttactcaagcattgggtactccggagcacccagggcgagtgcgtggtaaaggttttggtgttgtgcaatatgaagtattcaagaagcctccaagggggtttaagactctacaggaggagcaatttagatatgaaaccaaaaatgcagctgcctttgagagtcaaataaagaacttaactgaacacatcaagttgctacagagtcaaattgaaaagatagcattacaaaaacaacctagtcaaccatcagacactaatgatgttgacgctactgtgcatcacaatatttctactaattcttctaaagatattcctactccagaatcacacctacgctcttcaacgccatcagtaaaggtaattcattctattttttggatttttcctatagcttttcaataacacacaaggccatatatgtaatctaatttgttgtacagggtattccttgtagtttgcttgttgaaccagattttaagttggttgcaaaaggatatattatagagaccatctcaagtgacatacatgggaaacccataggtgatgacaaaagggttacaatatctgaggccattgttccaaaagcaaagctacctgtaaaagttcctggggtgatggagttagttgaagaagctgtggactcatgtgttgcatggcctacacatttggttgtagtaagcaatgaggaggtgccaaaatagaaaaaactcttctaattataaatggctatgtttttttttagttattgtaaagttcactaaaagtattaactttttaattataaatattatatttctagataccaaaaaaagcaacttcaagtattagccgtaagagaaagattcctacttcacaaaaagaattttccattatcacatccaaaccaaaggaacaaccacctaagttgtctgcccaactatctctgcaaaggaaaagccacacattgagacacttatccatccatctagtgaaaaggaaaagttgtacatcgagcaaccaacaagcatcccctcatcttcatccagtgttagggaaaaaccactattggatttatgtgaaatcccaaagaacattcctgcaagcctaaaatcattaataaagtctactttcaagcttaacaaggagtacatgtatgaggttccaattcctaaagatatatgtggacttggtaagcagatcttgtacattggagtaaaagaccttcttgagcttgctaagtttaaggaaattagtgcttctgtgatcactctttacatcaggtatatttaatttgttcgttttttttcttcaatttattttta

SEQ ID NO: 381073 - DNA, 5794 bp, Cannabis indica
gcacccatacacatatccacaagtctaaaactgggtcactcacgttcttgactaatacgactaaccacaaaaccacatgcattaagtaatagtattggtagcattagttcgtactttctgaaagcctagcatatatctgtcagtatctcagtgcaactctatgtacacttcaccaattccctgatatgccaatcaaatgactatatatgttgcatatcatatatctatcagtatctcagtgcaactatatgtacacattaccaataccctaatatgttaatctgatggcaactaaaacatgcatgttgaacatgtgcatatatatatatgtgtgtgtgtgtgtgtgttatactaatctaacttcaatttcacaatcaagtgtgtcgatcaaattgagtgaaagaactactcgacaatcagaggttttatgtcacattcacataaaattggtaattttctcgctaaaatacttttggggactaaatagcgagaaaatacaaaaaccaaggcacctaaaaactaccccgaccagtggaccaaaatgtccaaatagttcactattttttggggtcctgcctgaggaaacagttcatcgtttcgtagaagaaaaacccaaacctcaagttttcatccccaaatctttaacaaaccacaccaaacttttcaaaacaccttaacatcaagttctaaacataatccaataattaaatgcatcaaaaaccctcaaatcaaaattactactggagaatagtcacaaacaaacaagaatcaagcttagaaacatattctaacttactcaaactcaaacagaaacaaattctaaagatcaagaactcaaactaaaccttcatcaagttattcaaagaaaagagaagggcttagggttaccttgattcttctttgaatttcacttgaaacactatctgaaattcttgttgttttggtgaattagctcaaaattacccatggtttttctctaagttttcttaaggttgaaggaaagagaaagagatggttaggtgggtgagtttaatgtaattctttgatgtctacattaaattcttaaataatccaatctaaactctaaaagcttaatctaattactaacaaataccttagcaaaaagcaaagtaaggaattaaagattacaaaaatgcccttaattcaacactaattttctcccaaaaccagggataaaatagttataaccgaataccccgcataatcttaatattcgaattatcccccattcttgccccactaattctaagataataaaccgtatctaggtgacactgttagccaaaacgtcgattctactgttaccgggcataaaacatgaaaatgccaaaattcataaataacatgcatggtgcacttgaaatttaataaaaatttgaaaaattataatactaatagtaatacatatttctcacaatttgacttattttctgttaatgcacatattatcataaataatcatataattcactgataatcttctaacttccatatctacttatgtggtcattacaagggcccacgacctcctaaagcgttagcgtacatctgcccctggttcaaaacttagaacaatcatttttaaaagtaaactgtaaatattaaaaattaaaatactcttgttgggatgatttaaccataaaaaaaaactaaccaacactttgttaataattatacctttaattataaatatattatgtaaataattgaaatatatctaatttttttgtcatgaaaccctggcctctatatgtgttcgcttgtgtatatggcccactattaaattaataataaaatttaaaggagttttatttacatcaagtacaactcaatattcaaaaaataaaaataattttgaaaatactcttaatatttttaatttttttttacattagtttgtgttaattttaataattattttaagtttatgtttatagtatttttaaaccttgtatagtttatttttatttttttaataaaattttacactacaaaaaatcttacttttagtcacaataaaatttgttagtaaaaaaattataactaattataaattactatttttatgttgtgactgaaaggttcgtgactaaatgtattagtcacaaaaaatacaatttgttgtgactaaatgtagttttagtcacaataatcattgtgacttaaactaaattagtgacaacttgtaattaaatattatgttttagtcacaagtaacattttgttgtgattaaaagctacatttagtcacaaaaaaaaattatgttgagaataaaaatttgtcactaaaaataatagtttttgtatataattttttatttttattttttttcctaatatttaaaatacaatttattttatttgatagatatatatattttaagaatataaaaaggaaaaaaaattaaaaaaaaaaactattctaaattaaagatatattttatataaaataaaaataattaggaaaattatcctatatactattttttaacgtttttttttttttttcaaattaatggtttgaattgttcctgtggtttctctaatggtttctatgtgagttgttatacgaattttagttgcgatttaagttgctccgttagttgctataggggtttttatgtggaattctatacaaaaaaaaaaaaaaactattttaaaatgtaaaaatatatataaaaaccctaaaaattattcaaataaaatatatttataagtttttagggtacaaaataaaattctcttaaaatttaaagatgttggtaaaatgcatgtataatatttaaaacaagatatccattattactcttaacgtttctcaatatttgataattcttttgtacattatataagtactttttcttttgtagtctatctttatgaaagaaaaaagataaaagaaggattgaatatgtaaagaataatgggaagagttatacatcaaataataagtacggtattatttaatataataacatttataaaatatgttaatcatagcctaaaataccaatgctctacaaaatttaatttgggtggggtaaaaaggacaatttaattatgaatttatgatgagtacacaacaagattattctcttcaaattttacctacacatgtatgtattatcacattttcagatatacgtgtgtgtatgccatatatataaaatagtgtattaatgtacgatgttatatattaaatgtatcatgcagcatcgacttttggatctcaacaacaaacattaatcaatttaatgttcttcaatccaatctccatcttcctccatatattttatctattctttcttacacatacatataactcagatcgatcaaccgctccaattaggttgcctacataaatgttgttcattaaattcaccctttgaaaatattactctacacataaaggcctgacctaatggtgagacaaaagggacagtgactgaaggcccctcactccggaagaccctacccaaatatataaattaaaattattttaaatatctttatctatttttttttttaatctttcattttctaaaatttttttatttacttagaattctctcattaattattattattattatactttatttaactaaagatcattaaataattaatttttgggagaattatctatatgctgtatttttaatttttttttttttataaatttacggtttggatttctaaagaggttgcagcgctagttgcaataggagtttctatacgatttttttgttgcaatttaggttgcagcgctagttgcaataaggatttctatgtaaaatttcgtaagaatgacaaaaaaaaaaaaaaaaaactgtttaatttaaagtgtaaaaatgaaaaaaaaaaccctaatattttttctattttcttttattagagattattaatattaattaattaaaaattaaaaaaaaactatataaccgtacataacaactaataatttacttaattaatttataacagaataattcatctatgtataaaagttagtacttaccgaatattgtttgatttattttatgtacaaaataaatttactaaaaatgatattaatgatgactacaaattagacacggttatgatagttgttttgaagagatttctttacgtgttcttttttatgtaataaattgtatgatgatttctttttctttgcgcactttttttttatataagaaactgtgtgatgattttttttctctagaattctttagagtactctatgtatatcgatttataatttttttaagaaattataaataaaaatgtaaagcccgtacttgaaaattaactaatttgaaatttaaacatattttataatatttacaaaacttcataagtcgagatctcgaatttaaaactgttgttgaaaatgcagataccataaatatagctacataatgtattattatattttttttttcaaactacaaagcgacaacaaaatatgactcaaaatacagtacgaccggaaccctgcatgatgcactgcagcgatatgtacagtccttgctaagcccgaactcactgctcctctaccttggcctttcccttacctacacaaggtagcaaactgatgagtcgacagactcagaaagatatgcataaaatacatgtagacaatgcaataccaactttgtacttaagccaaccagagccaaattctaaggctcgccaaatggttaagaacgttctcaacggaagtacgaccactgtatcacatgcactagagtaccgactccgtactcgtgttggtagggccattattgtactttcgggagttactaagtgttgtaccacatgcactccgtaccccctggtactcgtgttggtaacaccgtaactacccttaaataccctacactgtactaacacccttattactatgactataccagtgttagtagtgtaaataattaataacacacattcattcatgcacatatatactttatgctaatcttaccttatttttaagttcaggtgtgccggtcagcctgagtggaataacagctcgacgctttacagggtcctatatcaccataattgtaattttgatgagagaacgctaaaatacttttcggggacttaaaataaaatctaaagattttcctatcgatagataacaaggcaataacctaaatattacaaaaacaagaaaaactagggttcacaaattatcccaaccggtaaaccggttccccaaccacaattctaatttagtggggtttcctggggaccaaccaatcaaccagttcctacaggtcctactgaactggtcgaccgatttagaggaaccaccaaaaatgtccccaatacttcaaattaaccccaaactctttaataatctccagaacacctgtatataccataatagactcatttcaagcaacacaacctaacaatttacactgaatcccaaatcaccattaaagcactaagtttgagttctcaaactctaattttgctcaaacaacacaataatcacccaattcaacttaaaacaacataaataatcacaacctaactccagaatacaaaattaaacaaccttaatacatacaacaacttaataccgaaattcaaacactaaaacttaacttgagctttaggaaaaccaaagaggaagaggctagggagtgataccttgaattaacacacacaaatcctgcaagaactctttgaaatgagctaagaaaattcaaaaccctagcttgcttcttgaaaatttgagagagagagagagagaaga

SEQ ID NO: 381074 - DNA, 4055 bp, Cannabis indica
tctggcccattgactcgtacctacgataaagagggtgcacagaataatgtcaagttcatgacagtctgcatattgcacggtcgttgaatttatccaaagatgggttggttaacaagcagtactccaggacatgttaaggccccatagcccttcttttttgatatatatcatgtacataactcgggaaatattctattaatgacaagacaaatttagtcggctatactctatgttttctttattttaacttgatagcaaacagataagataaacttatagacagtttggtaaatatcagttctatgtttattttaattaaaaaactataaagaaatcataaaaatttgttaagcagaataagagaaaacaaaaaattggaaatgcaaccaaacagtaccttaatgtttcaaacgatttgaacaacagtgttttctagcatgggtaatagagagacagaacgacagaaaaatgaagaaatatctaacacaattccaaaatatctagttcatttttggtctccaaatgaatcgttattgtcttttctctattgcctggatttatttgtctacttctgagaaagattatcacatacattatcagagtttccaaaaaaatctaaaacattattaacaaaaatcagaattatgtcgaatatctagaagttttgacgcttataatgctacacaagattgcaactgagcctcaaaaagttttgaaaattcgacctacctatatttcacacggaatcatgtcacgtcaaagataagagggctgtctaaaaatatcactccttcattttcaagtgaagaaagtgaaaggataaaaggaacgggaagtaataaaatagtgacagcagttgaaagccaaggtttgtacgatttgtaaactacttacaatcgaggatgtgaatcttccctttattcatgagctttaatcaaactgaagtctaggagaattagactatgctgaccaactagacttaaagttctttttggagaagtaaaaacaaattgaaaaaaaatactcgaaacattttttcaactcaaccatgcaaacgttcaagagctaatcaatactccttaactacaccttcacataaatagaagtaatctgaagaggcaaaacaatggcttttagaataatgatattaactcaacttgttttcctttggattgtctttcctttaaatcctacaagaaggctcaaaactcacaaatatgaggtgaggtgcagctcaaaaaggaggcataaggtaaaatcatatgagtaagaatttgatacactcctaacaactaacagcttgacaggatttacttccaagccttttgtttaaacaaattaaaatgaaagctaaaaggttgttttcattttcaaattttaaagtaaaaatatgtgtaagatgtacgtcttttacttttcaaatttgtttaagaacacgaaattacgataaattttttatacctccttgaaaattttggtaacaatttaaaaaaaaaagtttgctaagcaaaccttttttacacacacacatgtagacaacatgtgtgaatctaagctaactgtaagtatattacaaattgtgtctcgtcaatttttataataacaaaagctaaccagcaaaacgactcaaagaaaaaaaaaagaattaacaacaaaataaaaacaagattgcaccgtagacaattggtaaacaatgatcttatggaggaaaaaattgtaattaaaagctcttttatgtattacaatttctttttaaataaattgtatttttattatcagatccattattaattgaaattttaacatatgtaaattgtaagtatcatatacaattgagttgaggacatgaatatttaggtgtttaaaatttatgtgtataaaccagggtatgattctttcgttcttcaagctacagaagagtttgtcccactgggacacgccattggtcagggttccttaggttccaatgccaacggtagcaaatctagttagtctacgaaagaaactacagaacagttctgtcccagaagttaatctactggttcctcaagagtaagacaagtgggtgagtatcacactcaagatgaacctcagcctctcaagtgtaataggtttctatgatcatgtaagatccaaaaccgttaaaaccccacatgccacacaaaatttataaaaatcttgcatcactttctttcttgtatagtgatctgcatgaactctaaacccacctacgtacaacgacattcaatattataattagattttcaattaccttttgaaatatcggatattcggccttgtatcgctcacaagcaaatttttgagcatcctcactcgacccaggctcttgctttaagaattgattgcaaggaaatgccaagacttcaaaccctgcaactcactcaagtatataaggcaattcaatagcttatatttacacgaatggaaaggattagtgataacttgacatgaattcatatatggaaagtaaacactacatcaatacaagctaatcaaataagggtttcagcttaatcataaatataacaaaattgaaaccatgggaagaaaaagactcggaaccttcaatgaccaaaacaataaatctagcaacacatataaaaggaaacattccaacaaaagtaatgaaaatttcaaaaaaattattatattgcgtgttaatacgaatccgtacacactttccatacaagactccgaaacgtacatacatataaatctctacgtatagtatatagatataaaagaaagacaaacctttgtccttgtatttgttgtaaagctcagtcaactgtgtataattcgaatccgtaaagccactgcataaacattattgaaaaaataaaaaacaaatcaaaaatcagattcgagaaataaatccaaaaaaagaataaaataaaatgaatcaaaagggctaagagaatttaaccatttagaagcaacattaaccacaagaagaaccttccctttgtaactgctaagttcgacatctttacctctggcatcctgctcaataataaaaaggaacaacatcacattttcaaaagaagaaacaaaaaaatactttgattttcccgggaaaagaaaagcaagagaagaagaaaaagaaaaggaaagtacgaattccagaattaaaaacgaccttgactgtgaattcgtgaatggatttctcagatacggattgagcagcacccatttctccttctctttctctgtgctgtgtctcaggtcgaaagaaacagattataattttaactgttaactaatattatttattattattattattattattattattgtaattacacaaaataaataaaatgattataattagagagaaagagacggtagttttggggtttggggaccaattaattatccgctgttgaatatcgtcgtcccacgacacaaccttaattcgagggcaccgccttagagaatttctaattgtaaaatttcaagaaaaatgctaattaggatcttctattataattttttagtcaatctctatgtctgaaattacatgttaaaattttttttttttcatagttgtattcgttaaatttttgaaaaattccaaatagtatacagtaccgaaaatagaattcttgatattataatttaccacgcgtgttcaaaaaaacatcaaacgtatttttggtactgtaaactatttgaaattttttaaagaaattttttaaaaatttgcaaggataatgttgtaagcataacgaacactcacgtgaaaaaagaaaatgaaaaaaaaaaaaaattctgatatgtgttttcagacgtgaaggttgactaagaggttgtaacaggaagttagactatagcacttcttcaaatattatgtagctaaaatattgagatgctatactactagtagggtaaatgaatatcattctaaaaatttatatgaatgttatattgtgacattgatgttattcattatttaaataaaaaattgaaatcaaaaagctattgtagttaaaaattaagatatatataaagagtaatttgcggcataaata

SEQ ID NO: 381075 - DNA, 1287 bp, Cannabis indica
aaataaaaatattttcaaaaaacttgttctataaaagtgttttcattttttaatttcgaaactgagaatcaaaaattaaaacttataaaaaaaataactttcaaaatttatttaaatagtttttttttcttaattataatttatttgtactttctataattaatattttggaatctgatcccggacctagacttggccacaacccgaattcggccacaacccatacccaaacttggacccgaaccaggccccagactcggaccctaaccccaaccccaacctcagagccagactcgaccccgacccaaacctggacctgggccctaaaccttggatcccggccctggacgacaacccaaacccgaatcccaaactcggactcgaatcctgaccctggaccatgacttcaagcccctcaaccaagactctagactcgaacctagaccttgcacctgcacccgaacctagaccctgggcacaaacactggacattggaccctggacctagaccccaaaccctggacccagaccttgaacccgtacctggaccatgaccggacacggacactgacctaaaccctgaacaccgaacccagacctggactcaaaccgagaactagacccgaactctagaatcgtaccatgactcggatccaaacccggcctcgtagccggaccctgaactcgaaccctaacttgtattgtggaccccaacacggaccttgactcagacacgaaaccagacccgaaccccaaacctgaacctagacatgtaaaagaaatagttataaaatacatttttaatttttattttataattacaaaaataaaagtagttatctaacacacttttattttttatttttttgtaaactaaaattccacttttatttttgtgattacaaaattaaaaattaaaatatttaccaaaggtggccaaagtaaattattattttcttaattgacattcaatagtatattatctatgtgtgggaagataatttttgtcacttaaaaaagtagttttgtaacttattgatataaaactgtaatttaatttaagtttaagtttattattgtatttgttacaataattagttagtaaaggttttgaggagattgagaaggaataaacagaggtaacagaacaatggttttttttttttaaataataaaaataagtttgatggttgtgagatttatatttcagtattttggtaatttaataaagagaaaattacgtggggagactatttttgaaattaaatactgtatataccgaatata

SEQ ID NO: 381076 - DNA, 2618 bp, Cannabis indica
ccacctaataaaaataccatcttattatagtgtccaatacttgatttttaataataataataatcatgtgtaacgcatatatatgagagtaaggaaaaggtagagagataaaaaggagaaagtaagtaattctttttcaacattatctgtaattcttttgataggtacattcttttatttttgggtacatagattttgttttgtctaagttgtgagtttgaaagtggactttgagagttgagcttccacaccttataatatgtagctgtgatttaggttaaatgatagattataggtcagacgttgcctaaacccgcgtgaccgtgtacacaactttttcacctactttgcctaattccaacttaattttatctttaaatcttacacaaatattatattggattataatggtataggacaagtgaattattcattggtttcagtttttatgtgtcttcatttggctatatttatatttaaataatgggtagaagaaataaaaaactaaaaatcagtttttattttgtttatatctctttaatataaggattttttttaaaaaaaaatttattctagaagccttttatttgtttaggttggagcacaaacaatatatttttggaagtccaagtttcatttaataatggtccacatccacatccacatcataaaatgacttggttatttatttttttgttaaaggagagctagtcaatttggcaattactccttgctgactgactcatgtgtggaattggatgtgtctgtttggtcttattgcgtaatcttgtgcttagtttgcacacgtagctttgtgtacaagactactttcgcaacactcatatttcagatacctaaagaataaacaatataaatttattctgtatttttaatattgcataattgcaatctcaacccgaaataaaaaataaacacaatcgcgatctcttagtaaacctttgtctctcaataaaatacagtatgttttgtttagtattcctagccctaaaagtctaggtccatatagatttaggtctaacgtctataaagctacgtggcgagagatttagttggaggtcagtagagctactattcacttatttgatagtggtgttatcttggctgaatttaatgaaactacaatctccttgattccaaaagttggtaatctttcaagggctattgattataggcctatagtttgttgctcaactatttacaaatacatctctaaattgttatacttaagattaggaacggtgttgcattctttagtgaattagaatcaagacgcttttgttaaacaccgatcatttgcccacaatattctcatcttctaggatctcattaaagattatggcaggaagaatacttcctctaggtgtgctatcaagattgatctcaagcctataacactgtagattggtgcttcgttgacgatctcctaaaagctatgtgtttttttagctaggcgcatgggttagataatgacttgcttgaaaggaactacatactctttaatgatgaatgagaggcttcagggtaagtttaatggtgagaagagtttaagacagggtgatccaatttcacctctcttctgctttttgtacttgatatggaatatttaactagaaagttgaagtttgaaacccaagagaaatcatttcgctagctatcacccaatgtgtaaatgaagctcactagcctttgttttgcagacgatttaatttgttttgcaagggcactttacaagtagtgagacatttaaaacttgctccagatgacaccagaaatgctttgggtttgatggccaataaagaaaaaactcaacttttctttggaggggttgctgaagaagttaaagttaccattatgtaagaacttcaatttgagaaagttaagtttcctcctaagtagttggaagttcctttaagtcctactaaatggagaatggaggattatggtataatccttaagaaaatcaagctcagaattcaaacttaggcatctaggcatttatcttttgctggccgaaaaaactactggatgagtatttttgtgtttcctcaaagtataatcaaggaagtggagaagctttgtcgtgagtttttgtgggggaaaaatagaaacagaagcaagattcacatagcctcttgggagaaagtctgtctccttaaggcttatggaggtcttgggtttcaggaaagtactaaatgtaacagagctattttggctatgtgtgtgggctataatggggaaacatgaactattatgtgtcaaatggataaattcaatctacctcaaggagtctattttctgggacaattagttaagacaagatacaagttggtattggagaaaattatgtcacttaattgaggcaagcttttagcaagagtaatatttaaactgctgtatggaatgttaaattcagagcttccaaacattatagcagtttgctgcaacaaacttaagtgtcttacaagaaagttgtttggtatcgattgagcattccaaagcacatatttacgatttggcatgcagttaatttgtgacagtcagtagtctcgtgatccataaggggaaatactgggtaagctgtacaatcccacaccgcc

SEQ ID NO: 381077 - DNA, 1046 bp, Cannabis indica
aagataaagaaaataaaaagaaattaacctgagaccaccgccgctcacaggtgcatcatcagcatgaacttggcttgaagaagaaagaaccgaattaagataacccatgttattattgtatggattcccagattgcccagcagctcttttttccttaggtcaaaaatcaagaaaacgaaatcctaatagctaacaaaaacaacaactgctgctgttgctatatagacaaatttgacgataatatgacctatttttggaatattaataacaaacaaaccaagaatcattacgtattcatgatcgaaaaccccaatttttctgactcactaactgacctgcaaagtgattcatataaaaacaaaaaaaaacagtaaatccaattttcagattcattattttttcttgatccaattcacagatccatttctatataactacatgccaaaatctcaagaatccaacccaaattaaataataaaaaccaaattaagaattttcttaatacattcaatgatttagagaaagaaaaaacgtaacagtaaccctacctggagatgaaaatggccgagaaaaagatcagagattggaacgaagtgagatgaaaagagccttttcaagagagagagagaaagagggaatttctagagagagaaagagaaagggattcgatttctggttttggtttttaatttaaaataaaaaagggaaaattaattaaaattgttttgtaataaaataaataataatttattaattatggaaaaaggttattattattattagtaaatgtgggaaagaggggagttgagtcggtcaatgagccgaaaaagccgactggagcggcttatatggtgccgccgtggctacaccacacacgtgtcgcacatgcacaaacaatccaaaattattattattattcactatagcatcactgttataaatattattaattatgtgaatgtctaaatcttttatttattaccattaattgtaattaacattcatcttttttagtttcttttttttagtttcttaatatctcactc

SEQ ID NO: 381078 - DNA, 4305 bp, Cannabis indica
aaaaaaaagaaaaaaaaagaactttttgtaattttagtacttgaaaagagaaaaagaacaaaaagtgaaaaagaaactcaaatttggagtgataaaaaatttatatcccatgtgtaaattgaaaatcacattattccaccacttttgcaatctagtatatcaattcttatgtctctacatcaatctgtcatgaatcagcaaaaagtgcttaaaaggtaagaagaaaagcaatctcactttttcttttttcttttgctaaactaagcaatctcacttaagatgtgagaatcttgtttaaatcattctttcaatcacagctatattagtgctttttctttgttcaacacagattgtcagtcttaagcaagttggaaacttgaatatatgtcaactttagaagtagtatggacttttatttagaagttatttttggccatgaaactcattattgtaggttcgaaattcaaaaaccaaatttacttgctatgctgcaacagagaagcttcacggctttaaaaccgtcgtcatcaattgatacagagctgagctgtttcagcatagtcttttcagtacacttgtcgaattctgaccttgatttatacaagaagtaacctccacactcccaagcagaaaggaaggaagagtctttcgacttctgaaaccgtaaaagaaagattaggtcagaattaacaaaccaataaatcttgacaaaatacaatgaaaacaatataattttccagtaaagatagtataaataaaaagttgggtttccatttagtccatgacattaatgagaatcgattttgtttgatctagttatccttggcaatcctttctgaacggaaagttgatcagggcaagtgctatgtaccttacctcctaactcttattaaagcctttctagtttctttagcatgagatgagaataaagaggtggcacataaacataagactaaagctcatttacctgaagaaataaaaagatctttttgccacaatcagatatcagaagactgtaagaaatgctcaaatcctgaagacaagagcaaatattgacaagaacctccatcattattttaaacttgtgactgctctcaagtaggagggtcttaattgggtaatcggtgacaactgagatatgcatccaactttgcaagtcaccaaaaatcgtatcaacaggcatgagctcaacggctaaagggttgggaaaatagcaggcctgcacacaaatgaattttcagggcatttgcaaacaaggtcaaacataacagaaattaagtaatgcaccactccttactccaccaaagaaaagttagcaatgataacattacaaaatacttgtaaaataaaaggccttataattggtaggttcattagtaaaaatatcaacacttgttttttacttcctgaatgaaagaaggcatgagttggcaatatatgaaacaataaatcaaaaccattacccaccaaaaacatcgaaacgcaggtacacccgccagttatcccaaagagaattacacgatgctactctatgtaaaaaaacactaaagggattaagtgagtttatacctgaaaatgtagatgagaaacatcaggtgagaagtcataaaacaaccggaaacagcaattatttatttcaacagcaaccctgacagccatttccaagatgtttacttccagaagttggtagaaactattattgagatatggtaccagcaagacatggccatattccaccggagatgcctttaaaagttcaaatagattagtaaatcactggctagcaaaaagaatatgcaagcataaatagaaagctacaatttttaggctttgtttgcatagcaaggatcaaagttggcgataaattggacataaacacacacaagttactaaaaccaaatccttacatttataaagatcaaaaaggcattatcaggcacaacagctgaagaaattaacacaggctttgtttgttcgctgcttgcaacacagaaaagtagctcatcatgctgtttcacggaattaaatggaaatacatcctcttgatagatagtctggttttctcctggctttggaaaatgacccagattccatccttcattcaactgggcaagaaactttttcctgccttcaacagcctgtacagttcattagtatttacaaaaataaataaccatgtaataactatgtcaataagctttaaaggaaaatacaatttgtttagaaacaaagaccttaatttcagaagctgtcacatcatatcggaagattcccttcatcactcgatcttcccactgccaatcagaatgaacatagaagtaacagctagaactttgttaaaagccagcatgaaattagtagttctctatacctgggcaagaagaagagtgtctaatatgctatctccatcctcagagatgcatgaaacttctccaaaggattcatgatcgattagagattggttaccaaagcggtaaagagggactttgatacctgctaattatcaattaattaataaaatttacaagaaaaaaaacgcgtcggtcatgtaattgcactacaaacataacaacctaggaaaaccaaacaatggtacacttgcacatactcagtggatggtcatatccattaaatagtgcaccattattattcaccaccttgcatgatcttttatgtatagaaccaaagtatgatatcaggaaataaactatcccctaactaagtacttccgactaaccagtgaaggtgagagaatacacaggtcggtgttgcaaggtagacataagtattactatgcctaacacttcagtcagtgcaactactaactgtatagtgttttgtaactttctgaaaccaataagactctagaacaaaaactaatatataatagtgtcagtaccaaccatgtggagcaaaaacttattccacaaacctatgattaaaacctcatttagttaatgaatattacgtatgaaaagaacagccattatatgtaaacatctgggtttagcacatcacactagcgtataagataaaagcaatagaacaaaaattagacagataataataaggataatctgaaaccataccttcaaggaactgaggcaactttgattgcttagatttcgccaacaaattctcatcttgaagctgcttgatcccaaccatttttaaatagattatttgtaccaatgaacaagttaaccaaaagaaaactacccacaaaaaatatcagtattcttaacaagtatagatgatccaaaaatataagtttgagtgcgaatttcagcaaccaccaccagcaaggaaggtaagatccgccggatgcccaccagccgaaggtagggcaccacgaccaccgtgaaacgtaggggatgcaatcaagaatttaggaacagtttccttgcattgtttacccctattaatcttcttagcacaagtctctttacaaagagccgtggtggaaattacccagctgccagccctaattggaccagcaaactctcctttcttccttcaagaagaaaccctaaatcaatcaatcataattgaaaagataaaaacaaaaacaccaaaaatattgacaattatagcaaaattacataatttggattaaaaacccttactttagaatgataatgccagagaaaaactccaatccttggtagtcaattccaagcagaaaattgtcccggatttcgaagatagaacaacaaagtttacaactgcaatgattaaaggtcaaccgaaattcaaaatgaaagcgcaataattggcgggaatgaagaggtgaacgcaggaaaatgaaattaccagaattgaggttgaggttgaagatgttgggattgagattagcagaagaaaatatatgaatttttgtttgtgggtttgggtattggtatgggtatgggtatgggttgttgtaataatatattatcaacacttgtcctcttctgaattctcttccctatttcaccaatacaaattcgacatctgtatctcatcacatcatctttcagattttctggctcgtgttaactactttttaaggttcatttttaaaagagaaatgataaaaattctacactggttaacacgtttttgatgagttaatattattattcgcagggccggtcctgaaaatacatgggcccaagacgaattaaattttagagcctttaaaaatatgtaaaaaaaaatatcaaaagaaatgttacaggatttgaaccatgaacttagacattatgccatccacttcaaccaactaaactatgaatatttgttgtttataatacacttaaattt

SEQ ID NO: 381079 - DNA, 3120 bp, Cannabis indica
tgaagctggacaggaatgagttgactgtagttaactgcttggaccgcatgaagaacttgcctgatgaaacagtaatagaggattgtcctagagacgaagtgttgagactgataaggagaataaacccgactttgttcatccatggcgtgttgaatgggaatcacaatgcgcctttcttcttgactcgtttcagagaagctctgttccatttctccgctctgttcgacatgtttgaagcgagtttaccaagagaagaccagcacagactgatgtttgagcaggaggtgttcggtcgagacgtcatgaatgtggtggctggagagggtataaagagagtggagaggccggagacttataaacaatggcaagtgaggaatttgagagctgggtttaggcaggttggtttggatggtgaacttgttaagttagtgaggaacatggtcaagaaacattaccatagggactttgtcgttgatgaggatggaatgtggatgttgcagggttggaaaggtcgtattttccaggccatgtctttttggcaacctgcttaatctttcgagcttccatagcagtactacgtagtacgtactacgtagcttttggaaatgagtgcatgccacaacactacacgttggctcggcaactggtttgagaatacctggaatattacaagtgatcaatcaactcatgtttagctctggcactgatatcttgaaatggatcctcaaccccagaacaattttggcaacacttctgtggatcacaaccactttgcccatttagctggtccgttttttgatgcaggagaccttagaatctttgtggatgcagcaatacactgcatctccccgtttagaatctccatgcaaatccagtgcatcttcaccgcttggggctgaaactaaagccctcttctcagctctttctagcctgcttggccgtttagcttccttgtttctttagtgccttttcatttcagttacagttgtttgggaacctagagctagaaaaacaggtcagctcaccatttggccgcatgagctgcctctgttaatcactctggtttgattcagtatgggaggtagattcttttgtatctactatttaccatatgcttctttggttaaaaataaaaaaagaacatcacacgttgtgactatgtaacatacttaattcatgatataatcgaacttatttgcatgcatcagtttcctatagtcggtgcaatccaccaagtcaatgattagtagaattgagttgagtttcaagacaaaaagagatttattctcaccacatagcttcttcaataaatggtaataatagttaaactagagtaaattatgcaagtatcatgcaaactttactacaaacagattttaagactcggctcaaacgcctagaaaaagatgtctaaaattatggtttcaagtgaataaattcttccaattccctggtgatgaatctcatccttaacaatttagaagacaaacttgactaactggttggcaaaattaaggatatatatatataaatataatgataactagtttacaggtacatgattggaagtgattatcaactatggatgcaacgactgaatcaaaatcattgtcactgtctatccttgttaactatttgatcgtctaaggacgctccaatcaagccttccaccctttggtttcttgaaagcaccttttctgtcacttgatggtgactgttgttcaacttcatcactttttggagacatgttcggatactgttttcttttatagtttccattagcctcgcaatttggtttatgaagatccgagcactctccttcctccattggtggttcgttttctctgggaaatattaataaatattaattctaagattaagtaaataataaccacagaagagaaaggactaaacaacgcatttcaggtataagaatatactctaggagagatatcctatcaaatttactagagttgcatcagatcaaattacgaacagaaaatgtgaacaaattttgatatgtcagacctagatgattcatttccattttcagttcctttagaagtggcaaggggtactggctgactaacttgtgttgcttcctcgtttaatttctaccatgaaaacaagttttggcggattaaaaataaatcttaaaggaacacagatggtgaatattcgttgatcagactagtacatggacatatactcacatcaatagacgggttgaaacttctaaaagacatccgaccctttgttgctcctggatgggggtcaccttccattattaccacactacataaataataaaacgaacagttttgatatgggcaggaaagaaaaagttcagtaatctatggaacagtagtcaacaaaacgtaaaatattatgaaaacaaacaaagtgtttagcataaatgataaatgaatgcagcggtactgcctttatgccattcgtgaagctgtttagaaaagcaatgaagggcaaacttatattacttatagctactaatggctattgtgcctcaaagatcactcatattcagcttaacctctcacaagatttaaacatctatcagcaaaacaaaccagcacaagagaaatacatcgagaatagtaatttaacacaagcaaaaagaaagcatttacaattttggggaggggaggcaggcaactagatcaatctgagaataacagtgatcatgtttccaatttccatagacccgaatttgtcaaacatcttaggattcatagtactaattagtaattatggaaaagcggtaaatgtatgtaaactaggctacttagctttaaacatcaaatttcactttaccaaggatattgtgcttctcccagatctgtttaggagtaattgcaaagtcaaacacatttcaaaattgtctaacttacaataactaaaattgtctaactttcatgggtcctttcctgcagaggttgttgaggccttgggggttaaggaagcactcagctggctcaaagacaaggattggagcgtggtagaggttgaaactgatagcttactcactgtccaagcagttttcagtcaacaacagatgacttctgtttttggtctgattacccatgattgtaaatctttttt

SEQ ID NO: 381080 - DNA, 1603 bp, Cannabis indica
ttctttagatgttacgcttggagttcctcgtatcaaagaaatcattaacggtgccaaaaggattagtactcccattatcactgcagcactagagtgtgacgataatgtaaatgcagcaaggatagtaagaggtcggatggagaaaattagtttgggccaggtatgtaacatttcctatataattttcaaaagtattgacaaaattattgcataattatttttgctatttgacatttatcatagcttcttttcagttccacagtaaagctcttaaattggtagatttgttattattatttctttcatttcctggatacaaatctgagaagtcatcagttaaccgaaaattccagaatttcgatttttttaaaaggcttctctgttattgaaatatttctaacttctatattcaaatgttttctacagaagtatgttttaaactatttttctcttactctgcagattgcaaagagtataaaggttgtgataacttcaagatcagcatctgtaacggtcacacttgacatggaaatgattaaggatgcaatgttgtctatagatgcttacttagttcaagattcaatattacgaactccaagaatcaaattgaagcaagaggtgaaaatcactcaataatatttttgttgaaaaatcttcttattgtttcggttaacacttaatatcatatcttgagttttgcagcatattagggttccagatcctaggaaattagaaatcactccttatgaggcagatagaagcaaacttcattttcatctccaccatcttaagacgatgcttccgaatattataataaaggtgtcgcatctaaacctctgttttgttgaaacacgaaagaatagagttacttagttttatatttgaatcatcgcagggaataaaaactgtagaacgtgctgtcattagcaaagaagatgaataaaaaaacgcagacgagcaaatacaaattgttggtagaggggtgagtttgttttgtgcttcagcacttctcctttttttctttgtgagtttcgggaatatccccattcataggtccgagatccacatctatgaattgaaaggtccgaatgatcaactctgccatcagttgttagaatcaataggtcttcaaatcgttcatttaaaaaaatggaaaccctttttattggatgatcatgatacttcccaaaaatcgaaattcttgatcaatggaggaacaatatcaccatttttgttcaataagataccaaagtggatgattgactcattccatactagaaataatcgcaggaaatcttttgataacacggattcctatttctcaatgatatcccacgatcaagacaattggctgaatcccgtgaaaccatttcatagaagctcattgatatcttctttttataaagcaaatcgacttcgattcttgaataatccacatcacttctgcttctattgtaacaaaggattccctttttatgtggaaaaggcccgtatcaataattatgattttacgtatggacaattcctcaatatcttgttcattcgcaacaaaatattttctttgcgcggcggtaaaaaaaaatatgcttttttggagagagat

SEQ ID NO: 381081 - DNA, 3665 bp, Cannabis indica
aaaaatattgaaaaaaaagtaatttacataattatggacataaaatttattgcacacaatgttaaaaattcataaataaaaaccaaattcattcaataagcttaagacttcgatcttatttagcaatagtaagagtgaaagtatgaagagaggcattaagcaatgtcttagactcaacattgcttctcgcaacattaattacctagggtttcccttgttcagatctcgtctgaaggatacagatttcaacttcatggtagaaaatcttctctcgaagcttcatggatggaatatgaagtctctttccaaagtaagatgggcaactttgatcaaatcggttggcctttctttgcccatttagaccatgcagactatgaagctgtcaaagaaacttgcctctaaaattgacggtatggtgaggaatttttagtagggatgtgaaccgagcaatcatggaatttattttaaggcttgggatcatctctctctgcccaaatctcggggtggccttggctttagaaagacttttgaaatgaatcaagccttgttggcttaatggggttgggctcttcttaatgaggaccaaacattgtgttgtaaagtgcttagggccaagtatttgagaaataaaccattttcgcagtgttccttcaagaactcggactcttggttctagaagaacatggtgagaataaaagccatccttgttaaaggtgcttgtaagcttattgttgatggtcaaaggacacatatttggaactagttgtgggttatccaatgtcaagacttctaccctaagcctaactcttgtaggattgatggtgtggaaaaagtagcagacctcttggagagtggggattagaacattcctaggcttcactccctgtttgacccccaaacgactaggaacattttgaaaggcaggaagcccagtggtaagggttctgatagatgggtgtggacaaaagaactgaggggtctgttctattctaaatccgcctatttggttcaaaatttggatcgtgctcctcttggcaatgttaccccaactttatggaacaatctttagaactaaaaagtcctggagtggcataagattctttggtggagcattctctctaatgctcagtctgttcatgccctcattgcaaaaaggatacatattgacgtggtcacttgcacaatttatggagagaatgaggaatccatggagcatttacttttcaagcttaagcattttggcgacacacatcctattagaatggtggtccttaattgtccagatactttaactcacgataacaaatccttctaaggtgcccaataatcagctctctttgcatgtattttactatattagtggactttttacaaaaaccctaggcgggtcataggcatgatcatacaagccttttagcctacaaatacctttctatttccatatgaagaggggattacgaaactagatagatgaaaatcaactaaaattactctaagctttcttattcttcaagagaaaccaagagtgcagagttaaggtttcttgcataaacactgtaaaacacatcaaatacgcctttaatggctaatagactaactcgtagactaaggcttgttaacttgtggactaactcatttattattgcattttactatctcttaagctcttattatattagtttctaaaattctcaaaaacacccacatatcaacatgtacatattccaatggtcttttagactcatgtactacagtcgcaaatttcagcctatggtgcttgcccaatatgcatgcttcatataatgggagtgaacttgatttgaattttcctaacaaacgttgtttgttcacttccttgattccttgctcacacatgtgtctgattctcttatgccaaacctccatttctaattcttggtgtctcattgtgacaacttttaagaacaaaatggtctacgttgcaagatgtacaatcctttcctctttccacctttcatcactgtaagtgatgcttttgaaatcttcatgtgagcatttgtagatttataactaaagcctacatcttctagtacacaaagtgacagtaaattcctccataaatctggtatgtgcttgacattattcaacatcctaatagtaccatgaaagtgcttaatggccaccgtgcctatgttaatgaccctggaagaattcttatttctcattagtatagtgccacaatcaaccttttgataatcaatgaaatttactagggttggacacatgtgaaatgtgcaactagaatcaagaatccatttttttagtgattctttgattcgaaaccatgtgtaagttaccattagaggaacatttgtatgtatgttctgcaattgaaatagaatcttttacaaaataacacttcatgtctttgtggtattttcccttgggttttgatcttgattgagatctgtgatgcccgtgggaatgatctcttatatttggatcccttcctctagattgatcctttcctgtagcttgatcatttcctctagccatgaacacttcatctttcatcttgtccttttccttgttcattgttgttcctttaaattgagagctcaaataacatcatcatgtgtaagggcatcccttccatatttgatcatagcaattagttcttggtatgtagctggtagagatcaatggagaatcacagtttgagtttcttcatctaaaatgtattttagattagctaaaccaattataatttcattaaaggcataaagattatcatcgaaagacatattcaaaatcattttaaagctataatgatcgattgactttattataagaatttgtacataattagggcttattgtaagaaataggctttaaattattacttttgcaattttggagaaatttaaattcaaggtgtattattatgtttgtttaccaagatttttgtaaacttattataaataataagaactgaagaaacaaataattaaaagagaagatgtaaaaggacacaaacaattttttattggtttggcgttaactagccttagttaactagccttagtccatgagttagtgttattcagtagttctttaccttgacaagcctttaggagtacaatgaatatatgttcaaaacttttcttgagctagttttgcaagagaattgaaccgttaatctatagaatttgatgggtatttatattagtttgataattacatttagttttcattttccctctattggggagcttatagtgaataacacacttgggctaatttgtgaaatccagcccacaaaggagaggattttctgacttggaaaatttgatttggtcaacactgtgtactatgattgtgggtaattaactgttaattaattgcttgatgtctattttaggaagtttccccaattatcattatacgatcctctatcaagatctggtggctattgttttcttatttatgcgaatgaataaaaagggaaaccggattagtcttctaggaacacacaatctcacccttctagcctcatgctattagacttgcttacagttgtgttgtcaatggcaaaaggatctatggatacgaagctggagtacgtttctggaaggacttgtccaagtgggctttagcccactttatcttctttgtggggcctacta

SEQ ID NO: 381082 - DNA, 954 bp, Cannabis indica
tttatttttcgggatattacattgaccttgacctagaacgagacctcgatccttaattaataatgaacctcaacctcgagcccaaatctagaccgagacctcaatcccgaaccttggcccccaatctcaacctggaccccaccccgatcttggatccaatcatacctcaaacttcaaaactggatccagatcccacccccaaatctgacccggaccctgtccttgagtttaccacagtacaacttatatgttaaatattactatacaagttaatacatactattttttatgtattgaataatatgatttgaattgaattaaaattaatgtaatacaaaattctatctaaacaatgttcttatataatacaatataacccattatacaaaaaatcataataaacctgaattaatcactataaagtgatgccaaaataatgttatgtggttcttaaatacatgaaattggtatattttcatgaataaaatgaaaacctcatgtcgatatcactttaattatgttttgttctatttgtgtcaaaactattatcactttggcattgccattagtgactaaaacataaaatatttgaatttcatgtaaaatagttttgtattttttaaacgatgaatactggatcgatgcgaatcttcttagtctcctttttgaagattagcctgcactccagatagatagttcttcatccagcgattccctagacattttttcgtccagctctgactttgaagtcagtagtgattctctagaaacagagacacaacatcatcaccactccgaacaggtctggaggggagatctacgacagttcatttaggaattaaaccaaggttggaggaagtttcttccaacttcttggacatacattcactagctaggtgtgttagtgttgggttttgtgccctaaataaaaccctttacaatctgattagttat

SEQ ID NO: 381083 - DNA, 2113 bp, Cannabis indica
agagagaaaaacagagaaaacccctaatttgaacttcttttaaaatagtttgagttagaggaggaaggagaggaactattgtggggatctcaagaggaggcaaggtggtaggatgaattaacagttaagatcccagaggaatgatggccccaaataagtgaatcctctctggtggggtcaatagggatagtaagaatggcataaataatatactcagagaaaaaatcatggagcttattaagatcccaaaaaccaggatcatttataaaaaaaagacaccgtgtttttaggaggataaatgttgtcttcaaagctgagaatcttgaaaccagggatccaactgctatgaagggtggagatcgatttaccattcccaacctttcagattagcccttgtttaagaaggtccctaccccacaagatactactccaagaatatgaaggattatggcccttagaagcagcaagaaagtcattattcttaaaatattttgctttaagaattctggagagtagtgatttggattagtgaagatcctccaggcttgttttgcaagaagagcttgattgtggaagacaaaagatcggaaacctaaccccccaaaaaacttagaaacacaaagggagttctaatttttccaatggattttaacctcattacctatagaaccccaccaaaattgagcaattagtttatcgagctctttacaaatggacacatgaattctgaagcaagacattgcataagaagggattgcttggagaactgctttaataagagtctctttcccagccttagagaaaaatttattattccaaatatttaatttttcacttgctttctgaagaaggtaattgaaggaagacttcttggatcggccaaagcattccggaacacctaggtatttagacacaaaaggtttattatcaagaccgagagtattataaaacagattcctatcatgagtattagtattgagagaaaaaaggacggaagatttggaaaatttacagattgacagttgatttattgcaaaggaaaaggatgtcttgaatggctctgcaattactaggtgtaactgcagtaaataaaaggctgtcatcagcaaaaagaagatgagaaattggaggagcagatctaccattggaaatgccactaaaaccactagttctggttctaatgcgaatagcaactgaaagaccttcagcaacaaggagaaaaagatagggtgataaaggatcaccctccctaattcccctagagggagaaaagaaagttaggagaacattattaatggataatataaaggataccaaggagacacacttaagaatcagggagactaaactggaaggaaagccaaacttggtaaggatgccttcaataaaattccattccaccctatcgaaagctttttccatatcaagttttagagccacccaaccaactttacctcctttcctattgtttattgcattaataacttcattagcaataaggacgttatcaaaaatgattaaatcactaaggaaagcgctttggttattggaaatcagatcgcttaaaaccaacttgagcttgttggcaataactttggaaattaatttataaatagtagaacaaagactaattggcctaaagtctctaatggaagaagccttattctttttaggaattagaattaaaatggtttcattaataggagagatgtcagtttgattattcaacacatcaagaaccgcagaacataaactactgcccacacttgaccaattcttctgataaaaataggtattcaaaccatcaaatcctggtgctttatcaccagccaattgaaacagagccgatttgacttcatcaggagtgaaaggaaggttgaggaattgaaattggttagtagaaaggaaattattaacaccctaaagaatagaattaattgagtgagaatcagagccttgagaggtaaaaatatttctgtgggaagcacaaaaattgtcacaaataagttgtaaatcatggacaaccgtaccatcatcaagggtaatatgagtaatggagtttgtgttgggttttatgccctaaataaaactcattacaatctgattagttatc

SEQ ID NO: 381084 - DNA, 3542 bp, Cannabis indica
aaaaactaaagaaaagttgtcaagaagctatgagacagaaataaattaccaaatatctttttcgaggttttgtttcgatttgaacatcgtgtttgagaaataacaggtggtggttgtgcagacagctattcgcgcacttattggcttcaacttattttcatgattaactttctgccattgacacaaaagtcaatctgtatgattttcattttaatctctgacgactaatatttgttttggccgggaaaattccagtatttgaaagaaacaattggtcctctatcaagggagaaagataaattactcaacgagtacaatgaactgaaagctaaactcaatcttgaatacgaggaacaatctaagcaaaagatgagttatgcgcaggaggttgattcgatacagaaagttgcttttaaaataaaagagtaagttttgtgaatctgatatgtctggtttttcccgtgccattgattttctaatcattgattttggtcaaccagatttcatgatttgaagaaaggagagaagctgaaggaactgcaagaaaagctatcgttctcggaactagaacttcaaaaatgtgaggctaagaaacaacacatattgtctgagttggaaagaaatagagatgtaattaggagtagagataaattacgacgtaatattgaggataacttgaattaccggaagacaaaggctgaagtagatgaacttacccgtgagattgaatcactagaagcgaacgtactaagggtcggtggcatatccacatttgaaagcgagctggtaaagctctcacgggaaagagagaggcttctttcagaggtatgttcaaatattcttctctggtaaagtcagcttaatcaattacgagtcttcgaaactattagaaaccatcaaacactttattgcctgcagaatataatatttcttgaacgcaagctttcaatatatttcttagttttgctgataacgctcgataattgtgctgaaacggttaacctgttatgatatatttgccttctaccggcatggatgaagccctttgtttattattctgtcttgtggtggtagttaaataggtgccgaggaacgatgtctgtttacgatagcaatatttcaaagaataaagtcgatctaaaacattctcagtacaaggacattgacaagcggtactttgatcagttaatacagcttaaggtagaagaacaactctttagtatttttactgttctttgatcagttaatacagttgtattattaacggaacttatatcacagacaagtgaaatggcaaacaaggatctggaccgatactacaacgctctggacaagtaaaattcttggaacatttatcttgtttttattgatttttttatgagtatgaatgctttaatctatattttcagggcactcatgcgcttccacacattgaaaatggaggaaataaataaaattataagggagttatggcagcaaacgtacaggggacaagatatagattacattagtattcgttctgattctgaaggtgccgggactcgttcttacagctatagggtatgtacaagttcctttagttttcgtttggtatgttgtattataccgtcattgtattgtatagtattacattgaattatattttatgtaaaactatacatgatattcacttttaacatacctattattatacaatacgacccaataccaaacaagcccttaattcattcatttttcgtattcactctctcaattttgtatgaattgcattttgtacaggttcttatgcagaccggtgatgccgaattagaaatgagagggagatgtagtgctggccagaaggcgagggatttcgatacctatcacatgtttttatactaatactgttatttcatagactggttatctcattgcctctatttcaggtccttgcatctcttatcataaggcttgctttagccgaaacgttttgcctgaactgtggaatactagcattagatgaaccgaccacaaacttggacggtccaaacgccgagagtctcgccacagcactcctcaagtatgacaataccgaaacaaatctaacaattcaatcatgacctgcatttttcttacatttccctctttctttttttcctatagaattatggaggataggagaggccaagagaattttcagctgatagttatcactcacgacgagcgttttgctcaactaatcgggcaaagacagcatgcggaaaagtattatcgagtcacaaaggacgatcagtatggcttatcttcatctttctttcattttaatttccctttaatgaatttttcttttccattaatacaatctaatttgtttggcctaaattatcagccaacatagcataattgaagctcaggagatatttggttgaagtcccaaaacttgtcataaaaggaggaaaaatcagagtatctcatacccaaaatctatggccaaaagatatccttgtgagttttcgtgccatattacatgtctttaattgtttaagaaactgtattggtcagatatgaatcatttatatataaatatatatatatatatatataatgtttataatcttgtttgtgtaatttttttttttttttgcctcatttattggcaaacaacactttgagtttgacattatcaactccaatgttagtttcttttttttttaattctagttctattggattttagtataaaatataaagtgatgatattaggtgtttagcaccatttgctttgttcatgtttttttttttaagagaataagaaatttgttatttgtggtattaatattgttaaatgattcatccaattaagagtgtttggaacagaaatgtaccaatttattactgtcaacttcttattacaataacctccgtgtttgaaaacacatactagaatattttttttatggcagtgttcgtaatttttgaaaattttcgaataatttaaggtaccgaaaaaatgtttgaagttatttgaatacgcgtggtaaatttgaatattagaaactctattttttgtactgtaaactctttggaatttttaaaaaattataaggataatattgtaattataacgaaaattgttatgaaaaaaaaaacaacatatgatttgggatgtagaaattgtaattaacactcttttggtttttcgattcaatacttcaaaatttgcaattttttcactaaagaaatagcatttttttgttgaatgtccaatctattacaatatatttattttgtttatcaaaatttcaattggaaattaaagcattttttgtcttggattatactattttcaattggttgctagtgtttttaacttttcaaccaatttaaaatttcaatagtgttccaaagcaattttcactagtgttgttgaggttaaacatcaacaacaattctagtacttggaatgaagaaaatgactaagacaaagcaaattaattattaagaacatgtctatattttagtgaaaaattctcaaaagagcgacatgttgggttttatgccct

SEQ ID NO: 381085 - DNA, 2396 bp, Cannabis indica
ttttcaagaaaatttttttgatttgcaaagagggcactgtaattgaaaaatcactgtaaggtgcctaagtatcagggcgttacagaagccgccactaatttgatcagcgtaagcctccatgcagataacaagttcagtttagaaactgtggcaaatgatcataaaggtataacaagttcagtttagaaactgtggcaaatgatcataagggtattatcatttcaggctttcacaacaacttaggaatattaatcctacattgttaccagtttagtgtaataagacaaattgtaaagctgtactggataaagtctatagtgtttttgactaggcgatatcctaaaaaaattaaatgacaatgaagatgcgcatagattagccaaagggttttggacttgataatgaggttggttagaatggctctttaccttccattgtaaactttgtttgagctcttgcacttctttgaacttttagtagttgtataattaagttagttaaattataaagtaccggttattcgttggtgtactaatctaatcgtaagcatctctaaattattgtctagcaagaatattgacgtagctcaatttagatttgtatcttttttagaaatgtactactttttcttatgctgaaatatactacttagtttttttataaattaatagcttctctgtaaaaatgatatcattgcagaaactataaaatatcaatattttaatgcatacttatattttctttttctttttttgaaagggtattttctatatataacatgtggactggttttttcttttttttttgaaggcaaagaaacttttattagccagcaaattcagctaccaaataaggtagcagatcagttgggactggtttcttcttttagacctatactaattttaagaaaaaaaacatattttaacatgcagtgttataattaaaattgaattgaattttgtttaccaacttaattttgatattggttttgtttttatttattggttgatagatggtcaaaagtaacaagtattagaatatgtagaagaaaccaactaaaagatgtgtgttttttaaatggagaggaggggcttagactttagatctattggatattttttaaaaaaaaactaattaaagctttttattcaaccataataattacaaagaattagacaagtctcgccatttgtacaaaaagaattaatctaaatctacatgacaccaactttttcaaaattatcaacttaaaaggaatgaaattaaaatatttattatataatatattataagaccatagccaaattccaatttgggggttacagctaaacatagctgggatatgcataaacaaataaacacccagcacaaattccccttgttgatggccttgaaagtgaaacccatctttgcccaaacatttaagggcccagaccatgtacttattctcatagccacttgtacttgtccacgtggcgaagacccaccagatctgatctgtattaccttctccagtttacttcagccattatgatgatgatgaggagaattaatgaaggtttcaatggtgaaacaatgataccccatctaacattgctgggcccatatattctatacccaaaatatttttttttctttcattatgttaatgagtttttgaggctaaactctcttgattattaatttacttacacttaactcttaaagttcaaattttggtggtaaaattttttaaattattgaactgttaataaatttaagatgacttttatttttcacaattaattatcaatatgaactgcttatgtatacacttttatacacgtaatatgttatagtggtacacctaatattattatttaaaaataaaaaaaatatttcaaaatttataatatttttttatttttttaatattctattttttatttttataattttatttaattttaaaataataatattagaagtactaatataaatgcgtcacgtgtacaagagtgtacacataaacagtccgtggtggtagttaaccgaatgacatcttacgtttgctaacagtttagtagtttgaaaggttttaccgtcaaaatttgagtttggagggttaagtggaagtcaaacaataattaagaaagtttaacctccaaaaactctatattaatttaattttagggttaatgttattttgtaccttttttaattgttttggactttttattttgtaaaaataattagttatacttttagttttgttaagcaataaattgagctttatattttttaaaattaatactctaaacttaatttttgataatttttttaataaaaataatttttagtacgaataaatacaaaaaaaaaaaaaagattttctatttttacacttcaaaacagtt

SEQ ID NO: 381086 - DNA, 5043 bp, Cannabis indica
tatttttcattagacgattagcaaatcgagtagtacattatgttatacattctcagtatcaatctgattgtaatatttctgatatttttatttctggtgaactcttacatcttttgtattcagaatgctaatttattcagttgatatttcatctaaaaaaaaaatatatcccatcgaccagtttcttttcttgagtcgaccaaatatttcattgtctattcacaactatctatatgtaggagttactgaacagttgataatatatccttttgtacttcgttggggtgatgtaaacagttgaacatgtaagggaatatttttcgtttataaagttacttctttttcttgagaggaaaatcatttgggtcagccagccatttctttttatttgaatcaaatacagaataatacctatctataaatgaactaaggctaatattagtacacatgtaacaagaaagttatcaaaatccaagtattaagacttcacctaccctttattttctttcccgtaaaattagaagtagcaaaagagatgagaggtggaactggaatatttattattattagagatggaatatattatattattatacaaagacaaaaatctaagtccgaccattgctgatactgaaaggttaaatctttttgcttatataaaagaaaatgatggtggtggtggagaagcttacattctcatccttcatgtgatctattctatcatatacaagtagtccacactccacaagctgctgagagccacttcactatggtaacatggaaatggatttttggaagggaccactctaaaatactaagaaatataataataacaataataagaaaacaacaaaaacaaaagagatcaagtctttttcattctcctttccaatttgaacctataaccaattgcttttacagatttaaaagagactcaattaaacatattatactcttagggaacaagttcttaagggcacatgatgcaaagtctgctaaaccatcaaattaaacatacatcctctctttttttctccctttttccttttttttatcaaatcaaaagggccagtgcctactaccaggccttttcactgatatatatttacaacccacaaaaacaattgaggttgaaaataacaatatcatcaacttctcttccaaactttgacttaatgacttttctttctttttcttcttcttctgcaactaaccccaaaacaatacaaatgatctagatataagctgcttgctattttcgaaagatatctaagacccgttaaactctgatgatcctactacctattgcaatgtctatcagaggaaatgaaatgaaaaaatattaaaaatttcattaacccagcaaaaataaaggaattcttccatttttaatcattcatatcatttgatatctgataagtgttgattcatttaccctcgttggttaactgtaaagagccttccctcatcaacttcaagctcaggctgttaaatctttcccgtgaatactgccttgatgcttttctccaatctgtaccagctttcatcattgcagcaaactcctcgtaacttatgcgcccatcctacaaaattacaagataacaaactaaaatattatgacagaacaaatatgggacacattatgcaatggagtcatgcagctgagctccattcttagttctgtgctaatgacattgtgaggaagattattatacaggttcttactactaatgaacacatgtattttcgtaagattgcatgattgaggtccacgtgaaaaccataatactaaccttgtcagtgtccacgtcatgcattatagcagtgatgacttcctcactattagtgtcaacttcgtcatttaaagcattccgaagctcttcaatttcaatataaccactcccgttttgatcgaagaatgaaaatgccttgtgtaggtgctcgtcattagccattcttctcaaatgaactgaaaccgcaacaaactctccataatttagagcgccatcgccatcaacgtcagcctgcgggaatcatcatatgtaatgtatttttaaattaattgacgtagaaacaataagtataagttgtttaagatccattgtgagaaagaaaaacattaaatgtctcctccattactttcctctattttttttttccatcttttagctagctgaacagaccatttgaataccaaattacctacgacttccaaaaaacaatggaagtcattatctacttacgtatcctgatgcataaaagtaatgtttttatgcttttagaaactgcaacactaaaatagatatagtaaaatgatctgtaatctacaaatcttattcaaggttaaagaataaatagtacagacagaagacaatttgatagtaccgcttccattagtatttgaagatccggttcaggaatctgctgtccaagcttttgcaaaccaattcgaagctcctcaaggacaaccttgcctttatttccattgtccatcatttcaaatgcctcctttattccagccacctcttcaatggacaaatgttcagctataacctatagatcaatttatagattaaaagttaaaagaccaattgaaaagacaatgtccaatttatccaagcttttaagcaactcatcttaaaatgccttccattgtattggaaactaaatgatcaatgttgataaagattcaaaggactacccctagagccctttttttgagcttgttcatgacggaaaactgtttgagccttgctctcacagtctcacccaatgggacattcggagctttcttggcattttgtatccatggatgctctacaaaaagaaaaaaaaaagaaaagaaaagaaaagaaaaagtgagggggattgttatacaaaagataaaccttcagcttctgtgtaacgcatcaaatatgcagaataatgaaactgagcattaccaagtacttcctgtgctgtaagtcgctgctttggatcaggatcaagcattttcttaacaaggtccttcgcattatcagaaactcttggccacggatccctcttaaaatcaatcaccgagcgaataatagcctgtgctaccccttgttcagtttctacaggcaaaaatatgtgaacagttatgataataaacctcaatatataacaataacatttaagaaagtatactgacatgaacctatacaccttaaatttaacaagcattgtttataactgtcatagtattcacaaaagaaaagtatagccttctaaaaatgaacccaaacctgcccaaaatggtggaacaccacaaagtaaaatatacagtataactccagcactccaaacgtccacttcggggccataattccgtttcaggacttcaggggccatgtaataaggacttcccactatctcattaaatcgttcacctgtagaacacaggaaaagtagaaacattttacataatgggaacaaaacttggaagatgaaataaacgttacagtaaatgtggcataatagagtaaaaattaaatctaattaatgtccatacccggtttaaaaaacattgacagcccgaaatcaattgcctttaagggggatgtttctttcttgtttgcaaacaaaaagttctctggtttgagatcacgatgcatcactccatgtttatgacaactctgaaaatcataactcatgtaaacaaagaagatgactaaagaaactatagtgtgttcacatctttataaagaaaattacaacatgaactaaactaaatagtacttttgtaaagaagagctggaacataaccataacaaaaatccaacctgaacaacttcaacaatggttcgcataacggctgcagcagctcgttctgtgtaatgacctctcgcaacaattcgatcaaacaactcccctccttcacacaattccatcacaatatgaactgcattatcatcctcataactgtctttcaacgttacaatatttgggtggttccttagatgcttcataatctcaacctctcgccgcacatcctcaatatccacagcagtcttcagcttcttctttgatattgatttgcaggcaaatttgtcaccagttgataactctgtgcacaaataagtaaccccaaattcgccacggcccagctctcgacccagatcataatgagctgtaatgtctcgacctgttggttctttcaagacccaggtgttgttcccacctccatcaccattagtcacaggataatcgccagaaaatggattggatttcttcttattcttccggttgttttgggaaggtgtaccaggcgttgcacaacaattccccatcaagcaaaaccctctcaatcaaaaccttttacaacaaaaaaaactctcctaccttgtccttaagattacaacaacccccaatatagtagctggaatggaatatattcaaatctgggcatggaaaattttatacaattaaaaattataccaggaattattcaaatctctcctacagaaaattcaaatattgagattcgaaacttttctttaccgttatggaaaagtgggatttttcacaattataaagatataaaaaaaaaattcccttcaagattcagatttccaaacactactaatttacaatagatagactatcataagaagaatctataaaatcaacgttgaataataataaaaaaattaaaagaaccaagaaataaaaggtaaaagatagataccaaaagtgagagaataaagaaaaagagaaaacttgttgtttttcaataaaaatattttctttgcgaaaatagaaataaatacaattataacctgaaagagtgaaatgttgcttaagcaaaacgcacctgatgtttgaggattgaaagaaaacctacagacgattgtggagaagatgaggtcggacttgaacgaacaccaaaacaaacaaaaatgaacgtttcttcctttaatgagaagaaggtggagaattcgaaaaggaagaagtatagcatgaatgagccatggatttggattatagagagagagagagagagagagagagagagagatacga

SEQ ID NO: 381087 - DNA, 2387 bp, Cannabis indica
tattatttttttaccaataaaatagaaaaagtatgtgatacaaaaacaaaaaatattataaaattaatagtattacagtaattaaactaaaattataattaataacaaattttaaatattattataattttttataaataacaattaaattaaactttttttaataaaagtaattttgtttattagataacatcataagaaaaactaattgtaaaactaaaaacatatgactaaaataaaaactaaaaatataactaactatacgtgcattacatataatgttaacctattatatataaaataaataaatacaataacaacaaaaagcaatatttgttattgttcaaaggaaacttaaatgggtgcacaaaaaaagtcagaaaatttaacttaactaatataattttttttaagaaaagcatgtttttattagcaaaccaaatcacagtagtactaataaatttagaacaagtatcaatccaaacattaatttctatcgaactattaacacactttaccagtgtgtaggctacacaatttgcatctcgcaaaatggcatgatacaaaccaccgccaacggcagctaaaagagaaacaatctcaaaaataatcggtttgaaagctaaattagagttcgaggaattcacccaatttacaaacaatcatcaaatctgtttcagacgcgtacaccttataccccagattggctacccaatgtagccccacacgaagagccaagagttctgccacctcaactctgaagtcacccacagctctaatagcccaagatgcctaaacagtacctgtgcgatctcgaaccacaccaccaaacccagcaaaaccacgccctggggtaaccgttgcatcaatagatagagtaaaataaccccacgcctggggagccagcatctcacaccagaacccccctccttacaaaatagcagcaaccccatctcccgccccacaccatctgccaaaacaccaacaccagtaacatccaacctcacaccagtcgccacaccatcaaacccaaaccagctatgcccacccctacaccaaccatcaaaccagccactccctcatctccaccagtagctccaccaaaaaacccaaaaccattaacaacccaaccccagcagaacctcccatcccggccaaactagaaaaagaaccagccgcctgaaactcatccaccacagcagcagccaactattctaacacatccaacctcgattgtttcttcccaaataaaatcgaatttctatcaaactaaatccaccaccacactattgccaataaagagaattcatcacgagatatcttgtgaaaaagtgccactaacagctcagccaaaagcccaaatcaaagctgtgatagtatattataacaccccgcacaacgggattaaggagccacaaaagtaaggcatgctttggtgtttcctcagcctctccacatctctagcataaaggatgaacgagtattttctgtttaataagttgtgttgtcgctagtatagcacgataaaacatgcgccaaatgaatattttaaccttttcaggcactttcaaacatcgtaaaccattccagcacttactcaaatctggcgaaggagcagcatgtccatcattcattaaattaagaggcaaattgtacccacttttaaccaaataacagccatgcaaatcataatgccaacaccacgaatccactgaagacccaactgctaaaggaacatcgagaatagcctcaacatccaaaggggagaagttttgttccagctttcaacctccccaatcgcttcccttatttttgcaagaaatacttccaagagtcgtgattctcactgtcaacaattgcaaaggcaattagaaacaaactggttgtttgcatcgtacgctacatcgactaacattgtgccaccataccttgtcttcaagaacgtgtcatcgatactaatcacaggatgacaaaacttaaatcctcttctataagcatcaagtgaccaaaaacagaacttgaacctgttgtcctctatgacaatgtccgtaatagtacttggattcttctgttccagcatgtacaagtaaccatgtaacttcgtataagattgtgctggtgtacccctaacatacataaataccttctccctgtacctccatgccttttcataactaattttgattccataatcatcaaacatatccatttgtatatcttttgccccgtacttagttccatatgatgtgtacttgttcttaataaggtggtcagcaacccacggtgctgcttaatgattatcagcatgtctagaatccaggttacatgtgtatttgttgtggaacacagtgacctcaaacatgtcacaacatgccttcttcctcccc

SEQ ID NO: 381088 - DNA, 2686 bp, Cannabis indica
tacaacgaaaacaatcgtatgtattctttggagtttacagttctagttctttgatgctgctagatcctaaaaatgaaaaataataataatgattcagtgatctaatctttgttttttttagtcgtttgttaggcgaagacttaagtggaatgagctcgaaagaattgcagcaccttgaacaccaactaaatgatggattaatttcggtgaaggaaagaaaggttcattgcttttggtttgaataactcttattgttattcttattgtgttgttgttgactttttctctgtattacaaaggccttattagttgttgttcttatgatttcaggagaaattactgaaggagcaactagaacaatcaagactacaggtaagtgacaagactctagaacttgctaatcttcaatttaatcgaaactatcatgtataaatgcttatttgtaagtgacaagactttagaacttgctagtcttcaatttaaccgaaactatcatgtataaatgcttatctgtccttctattattcttgttgttttctcttttaattatagaacaaggcttaaagactgttttagttttacatttccgaaaaattatatgctcaaagctaatgattttcttgaagaaagcctatgaatggtgttggtttttcccaatgtaatatcttgaattgtagtttggatatgaaaactttacaattcttatgctgtacatgattgtatcattaatcctttcaaatttttcggttttccaggaacagcgtgctgtacttgaaaacgaaacattgcgcagacaagtaagtttgtgtgtgagtttgtaacattagcttgtctctctttacaataatgtatctgattttttctgctttaaattgtagattgaagagcttcgatgtttatttcctcgagctgattgcacggttccatcttaccttgagtactatcccattgaaaagaagaattctagtgctaatcatagtgacattggaccagaccagaactccaattttgcagccgagaaaggagactctgacaccacattgcatttagggtactaattcttctttatgagattgtataccagagtcacttagatatgcattttcaaatttgattatttaattcttcataggcacttaatgattaggcgaagattcttatgtgagattgtttatggaaatttgattattgagatacctgatgtggtagctcaaatggtcagacatgtggtttattcctataaatgtttgagtccttagatacttacagggtcggccctgaacttttgtgagccctttgagtaaaaaagtatgtatttttaggagggaaaacttttttttggagctctggctaggtgggccctaggcgcaggactagctcgccttaggtcctagatacatatacagaaattgttatgatttcccacaaatgtttgagtccttcttagatacttacacataaattgttatagttttctagtcccgtaatatcgaacggttgaggctatgtcatgtttactcattgatttgttattgttcatccaggttggctagtgatgtttacagaaagaggaaatctcctgagcaagaaatgcactccacagactcaggaagcaacatgggcctactttgattgattcttttaacagaatcacatagcaaaaccgaaatgaatttggcgatttgttttgagttttaaaatttttgttgataaccacccttcctttattgaagaaaagttgtgtagaatcgtctatgtcagatagatttgttccttttaggctttgattctgttctagttaattatgaagtttttaacattcttatagaattaaggtgactaactatggacattggcatactatatatagctttctcttttagtatgcatcaaaataggaaggaactccccaactttctctttcttgcaaatatattcttctttctcatctcatttggaattggatattctggtggacttgtgttcttgttacattttttttttttttgatataattttccttcatttcatgtatttaaagtaaaagatggaaagaaagtgtaattactaaaattagatatatattttaaggattttttcatttttacactttaaaatattttttttttacaaaattttacacagaaacccttataacaactaatagagtaacttaaatcgcaatcaaaattcgtataacaacccagatagaaattacaagagaaaccatcagagcaactcaaactgtaaatttaaaaagaaaaaaaaagttaaacaaataatatatgagataattctcttatattttaagggtgcttttttgtaatacttttttaattagaaaagtaaaaataatttctaaaattatgttttataaaattgttgtcattttttaattttttaattgagaataaaaaaattactttcaaaatttttttgaataattttttttcttgattaatattttggactctgatctcatcttagactttgggatccaaacttcgactcagaccctagacccaaaccccgacctggacgccagactcgacttcggacctcagacttgaccccaaacttggaccccgacttcgaacccaacttaaacaaaattaacaaatgaaaattaaacttacagaatacacttttattttctatttttaaaattgaaaaacaaaagtaatta

SEQ ID NO: 381089 - DNA, 1133 bp, Cannabis indica
aatcatcctgagtatagaacaaactcagggagatttgggcacagcaaatcctggaacaaaaatgtatcaagtagttagcaagcttaaagctctaaagctggtgttcaaggaggtcaataagaatggtttttctaaccttcattctgctgctttgaaaaccagacttgatattaaagatattcaggagaaattgcagcatgaccctttgaaccatgatttgattgctgttgaacaggaagcaagatccagatttgtcatagtgcagaaagattattcatcttttctgcagcaaaaagctaaggcatcctggattcaaagtggcgattccaatactaccttgttccatgcaagcattaagcaaataaaaaaggcgaaactaaattttctcgatagaacagcaagatgggaccagagtacatgaaacacataagattactgaaacttttgttacttattataagtccttattggggtcccagatggaaggaaggaggacaatttcaactaaaataatcaataaaggccatgttctatctaagtctcaagctactatgctaatacgaaaatttactaaggagggagtgaggcaggccttatttgggattcctaaaacaaagccctcgaccttgatgggtactgtaataaaattatttatagatttaaacttaaattagatatttgctaataactaattattttgaatattatatatacaatatatttttttttcaaatacttctatcaatttcttcttaattctcttatttttctaatttttttattctactttaaattctctcctttaattttttctattttttattcttttttatttatttagagatcattaattaattgtttttttattttactttatttaattaaagatcactaattttatcaaaaataaaaattattaattaattaaaaattaaacaaaatatataactgtatatgataactaatggttcatgtataaaaataaatacttacagattattatttgatttatttacagagcaaatctactgaaaaggatattaatgatgactaaaagtgagatacgatgatgatattgattttaaatgtagtggtgactacaaatgagatatggtgataacagttgttttgaa

SEQ ID NO: 381090 - DNA, 1463 bp, Cannabis indica
tctctctctctctctctccacttaacacacatacacacattagtgtattgggtgttttccaaatctcaatcacagtgtcccataagttgagaatatactgtgatcaaaaaattatttcatctcgttaaatctaaaagcccactcttttcctgagtgttgatgctaatctagaagactggtatgaagtcttcgatgagttcttatactcgattgaatgttcattttgtttatatgaaaagtagtgaggaaatcctgattagcaacaagaggtaaatctatatactaattaattaggtttgtattatgtattattgtgttaagatataggatttaaggttcatatcaaattcaacaaatatttttttaactaaatatggttctgatctttcgttgcgactttgatatgaaccctaaaaattaacaggtagacacttcctagggttcgatctccaaaacaacaataaatctcctttttcctaaactacgagtattgccacaaagggatggtcagtacttgtgtggcacattagttccccctttaagggcttctctcatttgttaagcgatcattgagcttgagaaaaccatttagccaccattctccttggtcttcaccttgggcaagcactaaccattcttaagtatcagtgctcgtgtgttatgtgagtactgccccttgggaagtgtcagtactcgtgtaacacaattgttctctatttcttgtgtaactatgattttaaggttcaattcttagtgcatgcatgtgatattgtgtttagagtgtcaattctccttgagagtgacaccaaataatgcgcaatagtcgtgtatgacttattcttttgtatttgatgatgtcatcttgtcctttgtactcttgtactcccaacaagttaagtacttttagctacttgttggtttcttctcgtattaaagtttcgaggtaacttaccttttcttggattgattagaagataaaccctaggggtgcgattattgacagcccattatgggcagtaatcgcccatgactccttctatgtcacgtggcacttaattttgtcttttgtcacttggtcgatgtcttcttttttaaccttttggttttcaaggtgtattcttggcgtgtgggccctcatggggtataattaattttttgccaaacttgggtataacaatttaatttaacaattgatcattggattggattttgaagcctaattagattggatcagatgattattttctagtataattattaattggattggatttaatttgaagaaaaaagttggaatgaattagacgcccactctttcttatacgaaaactcacaaacagaatatgttgggatataatttggcaaaattatatttctaggaacattttgtagttctgccactaaaaaatcaataagactatcttcaatgggagatgtaaaaattgtgctatatttggcacaaa

SEQ ID NO: 381091 - DNA, 1928 bp, Cannabis indica
gaatcatgataattgttctcacttttaagtttttgggtgacatatcatatcagagcagattaagcgacgataaagtggcctctgtacaagctgtcgttaataaggtgccccatcaggtaatttccatgcctttgtagttgtaattggaccccttttttttggacttgaaaactggaaatggttcattatttttagtttgggtgtttaacaggagacgggtttggatttggaagaagtgactcacaaagtttattttgatatagagatggaggggaagcccattggtaagaataatttgaatgtatttgatttattattgattctggttctgaaaaaattgatggaatgagatcattaagtttgaaattgaattcaataccatctggtttcatattcattaagaagaaaagaatttcggatcttgcgtgatttaatataatcaacacttctttttaatgtttgatcaggtcgcataatcatgggcctttttggaaaaacagttcctaaaaccatgggtaggcttctgaatacaatgaaagtagtatctttcttaacattgttgggttctaattgctctttgctgtgcaacatagtaaccaattttacatgttgatgcagaaaattttcgagctctttgcactggtaagtggaaaccaactaaattgatgctttcatctttctattgtctgttttcaatttttttatgttgaaggcctcttgtgcttatgattatttactggctttagtggccgggaaggtaacaagttcggcattgttaatttcgagtttgatgagccgctcatttcaggggaaaaaggaactgggaagagcagaaagcctctccactacaaagggagctcattccatagaattattcccagctttatgattcagggaggtgattttactcttggcgatggacgaggtggagaatccatttatggtgctaaatttgcagatgagaacttcaaactaaaacacattggaccaggcaagttaaaaagtccctcttcttgactgttttcgtgttgtatcgtcacactctatacataaggaacttcttattatcattagtaaaatttctccttatgttcatccattaggaattttatcaatggcaaatgctggaccagacagtaatggatcccaattcttcattaccactgtgaagaccaactggtaagtggtgattatatgttgataattttgtttgaacatcttcattttcatgacatagcttagaagtttgtagcttcttgtttgttgcagtagtgtaggaaaagttcgttcttctctgaacaaaatagtggtattttcggcagtagcaccaaatatttgttaatagttgcatttaaatgccaattcaatttttctgacgacaataatatcaaatatttgcaaaatattaacactttaagtaccgattcataagagaaaattcaagttcctgtcccccccccaaaaatataaaaagaaggctaatttgctccctaaattttttttttgctaaagaaaaagacttcattaaacaggaactaagagtttagtgagcacatggggactcacttcccaaaaattaagcaaaccattacaactttttaggccattaagaatttctcccgaactacttagattgttagattcaatgtttaaaattgcggatttaagcctcgtggcgtttttttttctgtgaggcgaggcgtaaacttcaaggcgcattgaggcgtaagcctcaattaatgaattaaaataatattttgagtaactaaaaataagaagaaaagcagcagcaatttcttttttctttctttgactgtgcaattgagaagataaaggagggagtgtctcagggctactaagcctaagaaatatagttgtgttttagtttttagttgggctttttttagttatttgtttgagttttattg

SEQ ID NO: 381092 - DNA, 1637 bp, Cannabis indica
tccagcatctccacgcagaagctaaaaataggacaaagacacgtatgagactaaaaaagaaatctagtaaaatagtcaaaatttactggctgaaagagaaaacattcaccttagaaactttgtaaatgttcggcatgatttcatcagatgcggatcgacctagagcaacttgcatgactttgttggacccaaggaaaaatctaacaaaacaataaggcaactaagtaaaaaaaaacattaacctactggttagctgaaaaacagagctgacttcaaaaagatgaaattcagatcaggcatttaattcagtaattcactcaaacaaattaagcaaataagcatcatgataaaaaaaaaaaaaacatatttaatatatatacatatatatctacacagctaattgagatcaagaaatcactgaacaaccaatataactggtcatttttttgttatttcattttctctttcttcagcagaaaacacacccaagaataggattacaaaaactactgaagcaccaacttaaacatataggccttattttatgatgtaacatcaaagactaccagtatgctagtaacaggaaattttagctatctaacatttaaaacctcaaaatccttcatgaatttaatgaataaaaatcaatatacacaactgatagatcattagaaaccaatatatataataaaacacccttagctattatcaccaagttcactggatttcaaattttaagtacccaacaaaattcaaatccgaaactcaagttgacaccagatttttctttggctgtccaaccaaatcaactaaatattataaaaaactacctgctatttgccttaagctgctctctaaactgcttaaatttgagatttctcatgttctcgaaagagaatacatatatccaactgtattcctccacagccttccttatcgaatttacaacagcttctttatgctccctacctttcttctttgtcttagataaggtaactgcaatgtacaccagaaaaatcattcaaaagcacatttcaatgagtcaaaaaatttcatatgcaaaggttctcattacaaaaccatatatcccagaaaaaaaaaatgaatttatttccatgaaaaataataaatggagcctcagaatcccattccaaattcaagtaactaaatttagtagtgtgactttgtttatacagaaatcgcattctgggcaccaatatatagtcataattaaaactccaaaacccaaaataaaagaaaagagaaattacgagctaatttgaaaattaccgagctgaaattcatacatgaacagcaacaagaaaacagtatgttaataaaaataagagaaagaaagacgaaccaggtctatcacgcttagacttgggcatggtgagagttgagagtttgagaaggtgaagtgcggctccaacagtggtgcaaagtctaaaaccctaatatgaatatggaaccctctcttcttctaaaagggttttcttcaacggaacataccaatatttgtaccctcttgcctctttttctttttattcttatttttttttattgtattttatttttgaaagggagagaaatttctctcaataatgatagtgttgtaaattcgtgtgtgttgtgct

SEQ ID NO: 381093 - DNA, 2518 bp, Cannabis indica
tatatatatatataaatggatgaggaaaatgaatctgaaggaggagatgagggtgattatatagacaatagtcaagttatgcaattttacttttcaaaagaaggtaaagatgattaatcgactttaacatttgagtttgaaccttatatgaatttagtttatcatgttaaggcttaactagtactgttcatgaattttataactttgttatgaattatgtgttgtttgttatgaattttctgatattttatgaaggatttctttttattttgaggtgtaagcctattttatgaagtttttgttcttattgttgaggtgcacgcctattcacctggaggcttatgcttagcgagattaaaggaaaacgcctcggtacttattaaagaatattatctgacacagattaaatgtaaatatatagagctatttataaaaatatgagctactccacttattagcaatgagttttgagatggaatctcatatttctcaacatagtattcgagtcatatctttagctgggcttcgatctacataaaggcacttgagatccaaacaaaaataaaacgagcaaacaacacggcttatgataaagtgattcaagattggtgagcaaaataaattaccatcttaaaaagaatattaaagaacattgtcccacatatatacaaagataagtctacttattccattttccaaaacaaaatatgcaattccgacagtgtttttattactagatatttgctggttctgtagttggagattgcaacttacaactatgctgcaaaaagagtattgttaaggatactcatactctcttatagtactcaacaccaatcaataatgttattgttattgatacattcaatatcaaattaaaaagatataccaaaacaaaatcatgtcaagagttacgaacgcggcaatgccaattggatttcaagaatatgatctcaacaaatataccaaagaagataattaaactaagatcaaaatgaaaaattaaaaccaatctggtagagaaaagtgagagcaaacaaactagttctttctcaatgcaagagacataggcgaagaactcttcttggttcgagcattagttcttgttcgttgtcctctgcttggcaatccatccttatgcctaatccctttatagcactgaatctccaccattctcttcatatctctctcaacacaattcctctgaaacatccccaaataaaaggattcataaacaagaagaaatgtaatatcgtaacaaaaagagaatgatttgtattttgtactaaatttagggttttaccaattcttttccaataacgtaattggaaagttctccaccaagaagaaagatttcccttttggttaaatccttggcgagtttgttgttatccatgttcagttcagatagaatttgacgagctctggctctaccgatcccatggatgtacggaagtgcaaactcgagtcgctttccgtctggaatctccattcccgctttcacactgatgagtcgagctcctcctcctgctccattgatctgtaatctcattggagtgaatttaatacaccacatcaatctcacctgtttggttgctcgaaaaatgaaataaacaaccaaaaaaattctaacaataattttggctgaacttacccttgataaagattgaagaagttgaattcgaatattggagagagctgaattcctcaagcaaaacattagttgaggatcgattttgaggagattaatggggttatgagctctctctctctctctcttggagtttaggggtttaatcataaggatactaaagaacaaaacacaacgacagcagtagtgaaaaacgacaacgacattaactatgaaaaagaataagaagagctgaaatctcaagcaacattcaaaccaaagacgacaataaagaagagctagctagaaataatagcagaaaaacaataatctcatatgaaaaaaatccaacaccaactgaaatatccacggtaaactcaatcaaattatctcaaaaaactattttgtttatcatttacaacttagctagattagaacaaaagaaaattttgatcattgtacattgatatccaaaatttttgagctaacagtagctttggggatattaatatacaaaaccccatctttaacctcagctttaatcttctcgaactggatattctcaggtaaagcgattctacaactatacttgccatagcttttagcagaccactcctcttcatctccttccccattcccattattgatcccattttccttcttcttcggctccttctgtgccttcaacaccaacattttctcttccacccaaaccttcacatcctccttcgtcattccaggcatgtcgaacctcaatttgtactctgtttcaccttctttgatctcccatggtgttctccctcgcttgtacggagtagcctcgctgggcacagtagatgaccacccacttgagtactccaatgggtcctccataattctatccattgt

SEQ ID NO: 381094 - DNA, 6526 bp, Cannabis indica
ccaatagtgtattgctgatacaacatcctgtccaactctctgggtaattgttcttcaggggtatagtacatcatacttgatatttttttttttttttttctcttttctacttctatgtttagatcttgatttctcatagtatgttttttttcttccctttatgacagggctgacttctgctgctaatctgcagttgaagactgctagtagtcaatacgagataattgatatactgggatctctgcagactacttagttataggttattttttcgttttacttctgatgggtattgtttaaaggtggtgagacatcaactagctgaggattttctacaagtattagtattagctgtttctcaatttaatattgaatcgaggagacgctatcttgagcgaagggctcgtttctttcaagtgtcaatatgttctgtagtacttgtccgtacacactgtgcatgccatgtcactgtcttcaagcatttgggttagtaataaataaggttgcccatcagaaagtctctggttctgtgcccatgcatgttgccttagaaaattaatggtggattcagctggaccgacaaggcagttgtgaatatatcgtagtctgttttaaggaccgtcttactgaagataaatgccacttgtcttttgtacaagttttaatacttaaataaatacagagctgctttgtattcaacaagaatggagaggtgagttggatttatgcaatttctttttatttttttggtaatgtttttactgtgtagtcattctcactgttgtgaatataataggtacacattaataaaggaagttggtgatggaacatttggaagtgtttggcgagccatttataagagaactggtgaagtggtaagtcttaattcgtatgtctcttaaatgcatgattatttttctgtctagcttttttttttctcacttttatttggctacaacatacaggttgcaattaaaaaaatgaagagaaagtacttttcgtgggaggaatgtgtcaatctgagagaggtgaaggtattgtcttccaggctccatctatccctttcctcctaaccttcccatgagtctgctattgttcttcaattaattatcgactttgtttattgcagtcactacgcaaaatgaatcatcctaatattgtgaagcttaaggaagtcatccgtgaaaatgacatcttgtactttgtgtttgaatacatggtaaatattacttttttgtgtccaactagccttacattatgttttatttgtcttgtttctgatgctatgccatgttttttttttgctatgccaggagtgcaatctttaccaactaattaaagacaggcagaagcttttctctgaagctgagattagaaattggtgtttccaagttttccaaggacttgcttatatgcatcagtctggatattttcatcgggatctaaagcctggtattatgttgcaataacccatgaaaaacatccatattgctttgggctgattttcttgctcaatttatagtttgcctatgtggcaccttgtttctatatctttcatttggtgacttaattgtgttttcttttgctagaaaatctgctagtaacaaaagaattgatcaaaattgctgattttggtttggctcgagaaattaattctatgccaccatatacggaatatgtctcaacacgttggtaagtgtattttctttttatttgctttttatcttggtcactttctgcttgtagtgttgccaacatcttactgtaattcatttgttcataaggtatcgagcccctgaagtgctgctacaatcatgcctttatagttctaaagttggtgagtaagcagaagtttgatataatttgctattttgtgctgaatctatttctttcgtatcaatttaattccatatgcataaagttgagtcattgaatatcttttaaaaaacaagttgcttatagaattctcaaggggatcttttgtcttcagatatgtgggcgatgggtgctatcatggctgagttgtttactctacgccctctatttccaggcgctaggtatgtacattgctacttgttattgctaatggagttgaagtcttttgcatcatacaatgtactttatcaattctatgatcttgattacaaactaagaacatgtgacaggatgtttattgacgctagtttctgatacttctgttattgtttaacctgtgatgttttcagtgaagcagatgaaatctacaaaatctgtagtgtaagaggcagtccaactgaggattcatgggctgacggtcttcgccttgcaactgagatcaattatcaatttccaaaggtaggtttttctttatcattttctgtaaaaatgtctctgactaaaagaggtagtttggatatgaagcaatttgtttctcaagcaggtgtgccctaaccctgcagtaccttcgattttttagcctttaccttaatgaaattaaataaagacctaatgccttttaataccaataaatcattataaatacaatatgacaacccaacacaatcgtctcattaataggtagtttttccccctgtttcatagctgagtgagcttctcattaaacagaggtagtaccccagactttagccttgataaataaatgatgtacctcctaagggaagtctcatcctactgcgagactcgaaaggggatctataccaatattggattattcttaagtgttttatgtcgagttttatgagctaactatctgttatgatttatgttatgtttgcattgcataactatttacatctactgatgcactgaaattgttgcttctttttactggattaaaagttatgttgcagattaaggtggagattattattttattttatgctatttttgtttacacatttcctcttactgttgcaatatgatctagctacttttactggattattatgttgatgattaagttggatgcctgcctgtatattgcagtttgcaggtgttaatctgacagcgctcattccatcagcaagtgacaatgctgtcaacctgatcaatgtaatttgtacagtccataattagagttctttttgtctcctatctaaatcttccagttgattggttagtttgggacttttttttacctttatcaagtatcttatgctgtctccctgtttttttcattttgaatttacaggcactttgttcatgggacccttcaaagaggccaacagcattggaggcccttcagcatcctttctttcaggtatgttttttttcctacaaagttgcaaaattttaatactgccgtttattttcatggcattcaatgaacaattgtattttttttcagcatgttactaagtatgaaaaatttaactttgttctctgtcacagagttgctattatgttcctccttcccttcgtcccagaccagcgactgttgctagaactcccccatctggtttgtaaatacaagatatgatggattggtagatgagtgtttttatttgtgaacataaatttatttagttactctttaatgttgtgcagctacaagaacaagaggattatcagagcaacaatgcgtgaaaaaatattctgggactttatctaattcgaagccaagcaatttttcttcacctaaagtacatgcatcttcagatcttggtaattattttcttcaggctttgttttactttatggctcttatagtgtaatcaaatcacatctcattgcacgtggtcacagggctttgatgtgtttatcctgatatatatacacatatatatatatatattatgcatgcctgctacatacgaataaacatgagctccatatgcttaattataatttatggatatattgtaaagcctgagaaaacaggtcatattgtcactttgtacgtatggcagaattggttttaattatgtgcttgtccttttaaagttctcttgtaacttttgcttataaattgcaggagtgcagcgcaaactggatatggttagccaggtaagatggaataatttattgttccagcatcttacaactagattgcatttgactatgaaatgctttagtttgcgacggtttttgtgtttgtgcaggactaatgagtttttgtaattttgttaggatgcaaaaaagaatgagaaatctttgaagagctctggaactcaaccaaaatatcgacccccagtaaagagcaatccaagtgagtgtctcttgcttgttttgagaaacagtttcatgtcttgttgttttcttgccgatgttaagaattattatgtgtatttggctggctggcagtgtcagtgaatagggttagaggagcgcgtgaagtttctgatgcatctgagaagctggctaacatgacaattggttcccgtaagccgatggtggggcagcgtcccccagtgaaggccggagcccctcctgtgaagactggagcacctttgttgaaaactggagccccacttttgaaggctggagtccagtggaatggcggggctggtgatgtgtatttaaggccggtccctcatatccaacctggaagaacctacaccaggaaagttgtgggatgagaaggttttagaggtgttgtgttggttttatgatgtcttgaatacgtgagtggtggccctgtttggattttcgaacctaccgttatctacatactgtgtgtgatggcatttacttttgtgtcggtgttttcgttgggtgtcttgcatgctttgcagcttgttatgtatgcagttggccttttgagtcttgactgggattgaaggctaataaataattttaaataaaaaaaaccatcctttctctaatcatgttttctaattacacttttaagctatagtagggagtgatttgaacaagtgattactagagaatggaaatggatatagagtttagggagttttctattttttttgttaatttttttaatattattttaataaaagatttactttcattattttataaattaatttataattcacaggttcaggcctgctggcctcttgggatgccatttgataagagttgtgttttgttattgcgattcgatttttaatactacaattagtttatctttgtgatagttttaagtgttttagttttgtttttgtaatgtggttttgttttgttttgttgttcttttctatttttcaatggctcatcatcaaattattattagttgttagaaataacacaagttctctatgattgaatggttgttaatagtgcagatatttatcttacacaatagttaagtttcaagttacatggttgattgatcttggaattaggcaatctgggaattaagcagttttggttcgttttttaagaggaagatgtcctaaatggattgcatattattatttttgctgattattattaataaaattataagatttattcactaaagtaggaaacatgattgaagcaataacaataaaatgactaatttagctatgaaaatagagtaccattgaagatagtctcataaatcggtgagctcacattttaaattgtttatcattctggatcaagatgatttacggtaaaaaaatcttcgatgcttgcaaaatgttatatttaaatatatgtatatataaatatatttaggaatttattgatggggatttttacacttagtgtctcattttgccattttttttttacatttgtgtctatataaggttatttaaacttttttttaacaaatttgtttttcaatattatattttaaaaagttcgttaattacaaaaatatctatgcatgctaatgtcatgagttttctccaatattacacgccatatttgccatcttgttctctttcattcttttttcgaatttttcctctcttttttgttagttttttcttttctttttgcataacccacgatcatcacctcttaagccctaacccacgaatttcagcctcccatttatgccacgatctcccctctcttgcataactgcatttcttttttcctcttacagtttgttttcttattctataaatgaccaccactaggtcgggttccaagtccccttcacgtgctaaaaattttcaaaaaatactaagaaacttccttcaaagtcctctaaagttgatcctaaaatggatttgaaaggcattgcaaaaaaggaaatgggtgatgttgcagagccttctagttttaaaaaaagacatctttcagctaagattgaatctcgtaaggcaaagagaaccaaatcttcaaaatttgtcaaggatgtaagttgtcttcttttgttttttgatttttgttagtttttttcttgttgttttgtttttcgtttgctgtttttgtttcaatttttttccccatgatgttttaggttctctctgattctgactttgaggatgaagttcctgatttggaattgaagcctaaagttaaacccaaggtttgtttagcttttgtatttttttcatttttttaagttgaatttttttatcaaccattgttttccattttgtttttgttttatctgttt

SEQ ID NO: 381095 - DNA, 1006 bp, Cannabis indica
aagctatcacatttacttaaatgtatattttatgattaattacaaaattttctatttaacagaaatattaatcatatcaccatccttgactctccaaataaatatattatatatcctaaccccactatgtaagatattattcgcaattactgctattccacccggtgaacccactcaacaaagaataagcaggaaacccataacactccaaaaagacccatatcggtgcttaattctttttacctataatattataaagcttctcatttgttttttttttttcctttttatgatacattttttctttaatatgattatattgtgcctcgtgttttgtaaagtagttccgaatttgaaattatggatcaaagtttatcaagataataatgctggattatttatactacattatatttactgatataaatgataacactaattagttgtaatgagaaagaaatgtggaataaagttgtgggaacactgcaactaatggaaatggaggtaagggatcaatacgtacgagtgagggagtacgtgtcagggcacgttttgttaaaatttgtgggttataattatatctcttactttcatcaattatattaaataattattaaacaattttgtttaaagaaggatataagtgtggtataggtttacttgttgcaggtaaggtcactgatcgtcctatctaaatataagttcatctgattttctccactattatctactaataaacaaatttgagaagaaaaacaaaataataaataataacttttattttttaaaaaagaataacaacacaaaaaagattaatatcatatgtatcctcatatattttttacactattatatatttaataataaacaaataagaagaaaaacttaaggaaaaataagcaagtaaaattcattaaaaaaatacatgagaaaaaaatggtaaaaaatgtacaaaaaaaaaacagtattttaataaagcaaattgagtaaaaaatgagagattttt

SEQ ID NO: 381096 - DNA, 7975 bp, Cannabis indica
ttgctacttctttcaacaccaaccaaataaaaaaaatgaaatttatctaaaaaatacacaaaaataaaacaactaaaaaaattacaaaaaaatatagttgtataaaatttgtattttttttttttttactatttttaagtattttattatagaaaatacagtcttttaatgttttcatgatatatttttctgatgtactcttgttattgtatcttgttattgtattgttgattttttgataattgtatattatatttatattatttagatattatttttctattattttcatataattttattttactatttttatgttatttttacagaacaccataaaaatataaaatgatcagaatggactgataataatagtaatgttatgggtgaatgattgagtaagagttcagtgaatgaagatgagatgatcatttaagactcttaggttctccttttatagagtctctaatgatcagactcttccattttgagggatgaacgtgggaagtgatcttgatcttgtagctactgagttctcctattctttatatttaacttgatcttgtagctactgagttcgttttggctctgtaatttggtcaaaggtcaatatattttagatgaatagactacatttactgatttgatttgtaccaaaaatactatgttttgtaaatttccctaaaaagtttgtgtattttgagaaatgaaaccaataataggataattttattttgttatgaaacactgaaatattatttgatttactcttattgataagcattattaattattaagttaatttggcatgtaccaattcgcgtctcttgaacttcatccacatcacactcactcacgttagtaaaattaaacaaaaatctataaattcaacaatttcaatagttcgaggaaacttttaacagcctaaaatttcaatgggcataatttagtacttatcaaaatttgcggagcaaaaattctaattaaccaaattattgagatattttgttttctttttctttttcaaaataataaatttgatccaatacaaaatgaatgagagagagaataagagttatttaattcaaaatagcacgtaatttcattcaatacaaaatgaatgaaagaaataatagtaccaccaaacaagcaaaagaaatataataagttgaaacattaacttaattaatattgtaaatctttaaatataataaaatatggctatattcacatagtttatttattcttttatgattatgtgggccaatttctataccaaccagcccaagcagagaccagcccactaagcccaagtgtgaggacatgattacaaaatggattaggctcaatttcagccaaagcaatgaacaaatcagcaacattagcagccacactcatcaacctcattactctatcaactttaatcttctttatactctcactcacttcatcatcatcactccctttttccttcaaaagctttctctctttctctactcccttttttagcattatcaagtccattaccacaaaaaaatgtacccgaaagactcaccgaaagccgatatgtagctcatcttggtagcaagtttcgggtccaaggtcccgattctggagagccaaagaaagtggtcgaagaagaagtagaccatttctcccgcgttagccaaaacaccgaggaatttgaaagacggggtggcacctgggttgcgccttagggtattgaaaccagttaagaaccgacctgttcgaaaggcttttcgacttagccctgatgctacttcccattgcttgaacctttgagccatgttcgggtgagtggactcggcatgccagtggaccagtttggagacatattgaaaggtcttgacaagtttgtcgattccatctctcttggctagaaatatgaccaatttatctactgtgtcattcatggtgttatgagcttaaagtgagaaagatggaagaaaagtagaagtggaacaatattttgttttggggattaaaaggttggtggtgtagagataggaaatttgttaacattattgatattagaagacaaaatggaaaaaaatagttagagccacacaaaaaagctatagcttttggataatagatttggagtgagtgagtgtgagaagagaagcttgtggttggactttattgagttattgattgagtttgagcctcttattttgtctcttactaatgtcattctctcttgcttattttataaaatactaaatttataaaaagagaaataaaaactcttatgtcataaagtcatattatacttactataatcaccataataaataaaaaaaatgttaaccataaaatataaatcaagtcttttggtgtctaatttagatatcactactaagtattatactgctattagtgtaatcaaatctaaaaaatcgctaactattcacaaaccaccacttcatagtagtgatgcaggtgtccaataacaatgtttctaagtatacgagacgcccgattaagacaagacgaattattaagggattattattaaggaaacccttatagaatgaggcacttatgactcaaaacttgagccaacaaaataggtaagaacataaaagttttatcttttagtgtatccacaaaaccctccttttactattctcttaaatcacatttgtattgcttctgagctgtgttcaacggttacaatttcacaaaaaaaaacaaaacgaaaaactaagaacaagaaatcttcagcaaagaatctgtctaccatcaaaagtagaaagaatatacacaaagcgattttcattcgaaatagaacgatggtttcgagcttaccttctttagaaatgtttctcggttgcttgtcaactgcgaaaacaaaatttaaaaatacctgaaagaagaaagaacacacacacagctgctacactttggcctccccatgagtaaaagctctcttcggttttcgaatgaagatctcctgtatataataatgcctaacaattttgagtaactacttctctacaatatataatctttgaatatgaagacaacaataccagatccctgcttatgatggaaaatgatatattatatatatatatatgccatgaaaatgaagaaatttaataaaccctaacacagaataatgatgtgttgagaaaaacaatatgtgtacatagaaaggtggggcaagtctaaatgttaaaatgtacagaggagttaattcgatatgaaaaacaaaatcagacccgatctgcagcaataagttgaggcgggtttcacaacatacagacaaatgcacgtcttgaaatttaacaaaaaagatatagagctagctagcatggtaacatgaccgaaatggtatgtcgattgatgccactaatgtgaattcatttcatttgcatgagtagtaggagaaatgtttaatgatgatgacttgatatgaaatgggatggatgcatgcaacagctgcaagatgagtagtagtagtatttgtattttgtcgaagcataaggaacagagtacacccccgttcgagctagctactgatatgtcatagccggtggagctccattggcagcagcagccggtacacccattgggaagccatctttcctcttcccaaatggatttttcgaatatgtactcaggtgttaaggaaaagtatagaaaacaattgtaagatagataccaaaagatgaaagtaaatataagatcaaactcctcatgagatcgcattcacagtatagatttaagtctaactcccagttataaaaattacccaagtctaatttttaacgtttaagtgtcaagtcaatgaccacatggcaatttctgattggtctaggttattaaatttttattttttaattgataattcatttaaatataccaacaagaaaatgacacatgaatttatctgcaatcgagagttaaatttaagtatttacgccgcaagttactcaaaaagaaatattatgcagtgaacaagttaaaggatattgtattctcatgccaacagaacctgaactaggaatcactgcaccctgcaaattgtggtgcacatgggttgcagtgttcaaatcctgcaacgaagacagaaaccacatcgttacacaatagaaagataaacatgcaactaacaatcaaacaacaagtttatagcagagaacagataatcgaaacttacttcaaactcgatgaaacagacagtatgccgctcctgtctcaagattttcatttgcttaaaacctggctgcctgtgtaccgaaatttatgacagaaaaaattaagattactaggttaccaaatgacacagataaaattagcagactttaaggaagcccgtacacgctgaacaagcctctcagttcttcttcgtttatgttctctccgagattgccaataaacaaagtattacatggtggattatcttttgtgttctgcaataaattggcaacaaaaagacatttatcaagaatgagaaagcaaactgattctctcaataaaccattcctgaaagaacaaccggaaagtctagtcgaggttaaaaaaaacatggggacattaagaaaacaaagaagacagaggaagcagccgcagaagacagatggcatctacttttctctatgatcataaattcagaaatcaaattgcttttatttaagagttatattaacttcaataactttccaagatcaaagaagaaaggttagacgacgggcacatatgatcatcagttaaacaagaacaaaatattcgtcaaatctctatactatgcagtcatggtactattgacatataattcgctaaattatacaaccaattggaaaacatgtcccaaaagaccaacagaattttttttaatgaaagcagaaataaaacagagaatcacctgaacgggtacatagctgctaggtgctggcacaggagcgggagcagacattggtacgggaggaacaggatagcctccgtaaggatcaaaaggaggaggcggtggagccatatacctgcaccatacaagtatgtaagtaacagaaaataaatatattaaaaatattgaagttataagcagtgcaataaaataataatgctagcaagaccgaacactttgctagtgagacagtgaaatgcgtagactatcaaggcaattagttgaacaagtaatttttacccatgatgtgcccaaacaggtggtggaggaggatgaaaaggagatggacttgtatagccagcatgtgagtagtcgccaccagttcgcatacgcttactttgatcataagcatttgaatctgccactattcctataaattaactgagcttagcacattgtatcaaccaataataaaagataatagcttgggtatcatttgtgttaaatttttttgcagaaatctagggtcctctaccattatagagcttaattaagcatgcttttgatgacatgcataatgttttgaatctcataaactaaaaaaaaaaatagttgttagacctcaagagtagcggaatatggtagaagagagtaaataaagggtgtagatgagtcattgtagtgaatgacagttttataagcactcctaacattttctcttctctgtcccttaaaatacattaccaaaatcctactttatctattttatagcaaacttttacattacatcattcatcagcattattcattcctctaaaaatttatgtaaaatatagcatttgttgtataccatattttttgataaatttgtatcttctcctctctattttaaagaaattaccaagtttggagcatctattgggagtgttctaagtggaaattggaaataggatactataaataattgagtatagggagaaagattatgcatgaatggagtattctctaattgcatcaaggtccaaaagtaccactatccttttctgtcattgctttcccttttgagaaatacaatgaacaaaagccatggctgaaatggctttagtttccctaatgttgttttattgtattttctactgttgcttgctgaaatctgtactcaagaagactggttcaaatcattaacaaacaaaacagttcttgagaaaaattcaaatccaattatcctcactcacctcttttaacaaaaagatttttcttggccatctcagtgtgcaaaaccgacttcgaatctgcatcaaacaccatattctgcaaaaatcccaacaaaaaagaaaatgggttttctcaaaaatactgttttttatgttttatttataaattacgacttaaaatttttatttacaaaaatacaattttaaaatttcaaaattactaaatacgatgttctcagcaaaaagtaaaaacccaactaaaacacgagaattcaatctcacaacaactataaaacaacgaatatcgaacaatttactgaaatccgtatttttgtaaataaaattgttcaaactgtaaaaaaaaaataataattctctgtgttaacatatttttgtaattgttttcaaatttttagtctatcatgtaaaaatttcaaaagaaaaacacttttaacacttaaaaatagctatttgacaaaataaaattttaaagttccaaaattataaaaatacaattttctcaaacaaaaagtaagaaattaatctcacaacaactataaactaactaaaaaacatccaaaaacaacagaaaagaaaaccaacataatcacaactataaataaactataaaacaataaaaaaaaatcaaactgattactgaattccatatttttgtaaataaatgagtttaaatcgtataaataaaattttccattttttctgtctttaacacttaaaaaagctattgaacagaataagattttaaagttttaaaattataaaaatacaattttctaagcaaaaagtaagaaaacagcaagaaatcaatctcacaacaacattaaatcaattataaaacattcaaaaacaacgagaaaagaaaaccaacatcatcacaactataaatcaactataaaacaaaaaacaaaaaaaaaaatatccaacagtttaattgaagtctgtatttttgtaaataaaagagtttaaatcatataaataaaattttcaaatttttctgtgtgtttaacacttaaaaaagctattaaacagaataagattgtgtttcaagctaatgaacacagattagatactaaacctgaagagtatcttttgcagcaatggcttgctgagcagaagcaaacaaagcaaaacccattggcttctcccctttagaattaacttgtgaagcctcatatccaggtaaccatctcaaaagattctgaagttctctctctttaacatcatcaggaagacccgtaatgaaaatcgttctaacctataaacaaaatacaaacaattgcatttaaattttcttcaattgagctgaatttgagcgaaatgcatcgaaaaatactaacctcatcagtagcggaacgattagggttttccacgagtatgggaggaggagctgtaccagcggcgggtggaggaggtggtggggctgcttgtggccattgctggtggtaggggtgaattccggcaccggccatttcgaagttgccgccggcgaattgaatttgtatggttgagatcggaaaccctagattggattggaccactcgaaaaaggtgagcttttttttccctcttttctttttatttgagacaaaaaactcaagagtgaagagtgtgtattattttactttaaggagaaaaatattaaaagttaattttgtcaaaaataaagtgaaactttatttaccaaaattaatcacttcaaaaaagaaaaaaaaaaaaactatttagaattttaggaaatcaccccatatgatatactatttttaatttgttttttaatttttaccatttgatttgagttgctccagtagattctatgtgggttgctatttagattgttctgtttgttgctatgtagattttcgtaaaaa

SEQ ID NO: 381097 - DNA, 2907 bp, Cannabis indica
attaaaaaatttaaaaaatttaagataatttacaaaataaatgcagtgcttaaataatttattttacatgtgtctaaccatttaaactctacttgttgtattacaaattatttcaaatgtctcaaaagtttgatgtatattcatgaaaattataatttacataatttcataaaaaattaaaattataactattcacgttaagaagatgaaagaagtggatcaacattatgcacttattgagaaagtacatgactaaaaggccattttttctcttcgtactcaggtgattttgaactgcttcctcgttccttcgagatttgctgtcggactctgagttgtttcctatgacactgttataggtctcaagccttctggtgtggcctttgtgtcatcttctctcgccagtcgtgatcctgatgtcgattcatgcctccgacaacctttagctatgcctttaacgtttgactagggctttcctctctacgttttttgatattgatgagcccttctaatctcttttgatttttcctctccgtacaaagcgatttggaattttcattatatgttgtagagctaagtgtagtgttgacgattcctttcacttttctcaatcttggagctctgcttgggtccttctccaattggtttgtgttattgtctctagtagctatggaatcggctgtaactctttattttcttatcttgtatgtgctttagttttagtcactgaggtcctagttttttttggagttggttttttgcaactttaaggttttgtgccttgtctggtgttgtttgatgccagttgtttggttttgtggcttgtgatggtttggtgtgaaggggattggtttttcttgtttgacaatgaatacaacagattcatgaatgatattttcttttgagtgggttgtgaaaatgtgccctttatgggaagttggttctattcgccttcaagggcgttcaatcttgaggatagggcagtggttcatctccattctcttgtatttgttggctcattttgtgagtctgctcgatcatgagcttctttacattgagagttttggagtttggcacaaccaagtcttcaagagtccttctcctttcatcattcttttttctatgaaggtcctttcttggaattactgtgggttgggaaacccagagcagataaggccttaagggatttagttacgagagaaaacccagatgtttttttttcttatagagactaaatcgtacacctctagaattacattcctatggcaaagctgtggttttttttttagggaaagttgtctccactattggctcttcaagggatctttgtttatgttgtaaacatggtattgatattcatgggatctcttctgaaacatttattaatttggccaaattttggaataccactattgttcagcttgagtggtttgttgtgtttgtttatgggttgcctgtgcgacaagaaagagatcaatttaggagctacatgactgaaaaaaatactagctttaaatggttcttgggcttgtattagagatctagatatatagtcttactcattctaataaaaaagagggtgttcaagattttactctcaatgagggtcaatgattgaaaagtttccttttttactgtggtggtattgatttaggttgtgtgggatttttcttcacttgaacaaataagcaagatctagcaagcttggtgtgtgaatgacttgataggaatctttgcaaccctagttggcttgaagctttccctaaggctggggttgtagcaaaacttatcatccactcagacaatgctcctttaattctcgatcttttcttagatagagaattggtgaggtcccctttccgatattttgatgtttggagcaaaaacctaggttgtcttgatgttattaaagaagcttggaaaattgaagctcatggggcagaaagttgccgtcttatgctaaaattgggggccactgccaaggctcttcaaaaattgaacaaagaagtgtttgggagatttttcttaagaaacttaaagtcctaaatgactcccttataccaaagtccaaaattgacctcctaatgatgctaatgttgacctcgaggcgacaatttagaaatacaagaggttagtcaaagacaatctgaaatttgggctcaaaagtctagagaattgtggttaagaaataaagaacaaaattaaaaaaatttccacatgtacacccttgttaaaagaaagtgcaaccatatttgagaaatttctgataatgaccaagatttacttcacagtacgaaagcgattagggagtactttattttccagtttaaacatgtgtttaagtctttaagactaggcttctgccctccccttgctaccctaatctaaccatcgattatggatgagatgaatgttgagttgatctgtatcctcttagtgaaagagattagaaagactctttggtcgacacctcctcctaaagcactggggcccgatggcataccaacaatttttttaaggatcattgggatatagttggatcagatgtggtgtgctttatccaaagatttttttggctttgcaaggtttgtcaaaggggtgaatcataattttgtggtcctcattttgaagaaagacaatgctaaaaaatgtgatgatttttgccctattagcctttgtaatgtcatctataagattgtttccaagattcttgctaataggcttaggcctattctttcagagttaattttgtcgttctatctgcctttgtgcccgatcagtggatagctgagaatacctttcttgcacaagaaattgttcatgctatgtccaaagagagcaagatcatgaaatttgtgggtataaagcctgtcatgtctaaagcttatgtgttggaaatattttacc

SEQ ID NO: 381098 - DNA, 3407 bp, Cannabis indica
atgggattcatgttgatgaaattggacaaaaattacaattttactaatattggctacttataactataaattattaaatttatgctgtacttatgtcactattaaccttgaaataaatacgaactcatttttgatctgcaggagcttattatttgtaggtgactgattcaatgttcacaaccaatgaaacttagcgtagcctgtaatgctgtattttagttttggtgaggagagaacatactagcttgtaaagtgaaatttttgtagtcaaaatcttagatagagcataacaacatgagaccttagtatttttccatcagcagactgtgaatgctgaatgcaaaagccaatgttcactagacatggtgtcataaacacaattttgattcgcaagtactagagaaaagatgttatttatgaagatcagagataaacggttgttgttcaagaatcgattttcgctaataataatactgaaacagatgtaattggaagaaacgaaaaaccatgcattgtaaatgcaacatgaaaaggtacatttttcgtttctagattcagtatacggtgcagtgctatatatataaatactataacagatctttaattccttaatatttcctaaacctttgtaatataagaagggtatgaactatgaaggtcccttcaggtcggttacactagtattatatagtaacaccataacatggatcatgatacaaaaggcatactaaagaaacagatccgaaaacatttttgcttgatggaatatccaaaaatatcaagcaaaaaatacctaagaaccgaaacccgggggcaacaacgagtatcagcaatactatatgttaaacttttctttcttgggtgcaatttacagcttaaggcgcaccacattctatctttacctttgtttttaatatatttgttttcttacctttctccgcttcttggcggaaacaagtattgatattcatcttgggcaggcttcaaagcaaaataaaaaacattgttaagagttataaattagaacatgaataacccccgaaagaacatatgtggtggaattagaaatacctttattaccttcttcgtatgcgagtacgatttgactacgatcgacaattgggagtaaattgatactttctacttctacatcacagacgatacacttgtgtgaaaaattacgagcagccaaagaagccttcattttacagtcggagcaccacaacaagtgtcgacaaggaaggttggcccacaacaccttacgctgattgcagccaaaacactttccttcctttatacttgccttataattctgcatcaacaaaatattggttatagcttaaatgaaacgaacaagtgctataactgcaacaacaaattattcttctgtacttaaaacgcaaaacgctcacgctgtagaaatcatattctcgaagaaagtagactgattggttgtttctttttctggaaatggcctccaaaaccagatgtcgttgctgaacagcctctaaatactgtcccattttgtcattttgtagccagggacgaaagtgaaagagaggatcttccttcaagaactgtacgaaacttggttgcacattaaacggtgttctagtctgagatggactcaaagcggaggagaagcttttgaggccttcgccaacattttcatcagaacttgatttagtgtcacggtcacctccatttttaattgactctgcactaggtggagcatcgggtgtggtaggcaaatggcatacttgttgctgttgaggcctggtattttttggtaaaagaaccatgtgatttgcaattccacgtcttccaattggtacaaccttcacacaacaaaggtcagagaaacatttgataaagtcgctgagcttagagtaacctatagaggcgtggtccaaatccaagccaaatttatccttgaaatccttcttcagagatgagagagcatattctccttcccttggctgctttgataggttacgtaagaagttcgggagccatttcctgaaaatctttagccaagtaggcacttttttattctctttaacttctttgcaacaaatcgtggtttgtccagaaattaatttattggcccaagaacctttctcaggcaagtcaccatccacaatcttctcacgggatatctgtgcttgaggttggcatttgccatttttctcttgactgtcttgacgagtcgagactttctgggggcaattttctaaaatccattttgggacaacgcttttaatttcgactaccttgtctgatatggtgacgtaatgtgcttgaacagcagccagaacggatttctcatctctgaaggttacaaaaccaaagcctcgggaatgaatatgagctcctgtttgtgttacaagaactaaagcatcttctactggcccaaacttttcgtcaaagaacttgcgtaacgaatctgttccaaacaatggaaacacaaaatttatctttgtctaacaaactggcaatccataaaaatcatttgttaacgaataaatagaagttacttactagagttcacttgagggggaagtcctcccacaaatattttctttttgagttctgctgcagaaggagaacggcttttctggggtcccggcttcagttgtctatgtccttcttcactatgtgaataaaagcacttttctcctctaatacatccttgaggagaagcataatatttacagctctctgttgttgtgcttgagcaaatactagtattgacaagtgcagtataatttaatgagaaagaccatactaatgaatacaacagaaaaatatcccaggaacttagaagagcatttgtagcacctttcacagggggtctctccatctgtcatgcttaggagtgttcctccggcgtctaagaaaaattcggcatcttgtaaccattttggatgtttctgttgcaaagagagatcacgatttactgcatgcagataccagagaagtgagattaaatgattataattgcattacagataaaaagtaaatggattaaaattcaacttaccatgactgatattggttggatttagcataaaacgcatatcttgcgattttgctaagtctattggtctttgtctactggtaaccataagttgaagcgcatatcaatgttccgtccataagtaaaaaataaataaaatatggatcagaagtgcatataggcgatggtccaattcttaaaaccacaaagttaactagcatagcttcgatgaacaagaattaagcattttcctaccgcaaattcagaacttcactgtttgccccccagcgcaaagaaatctccgcacaatccatatggtcattcttcactgtcaaaaactaagtggtgtttctttctatctctgtcttgtagttgtataccactcggg

SEQ ID NO: 381099 - DNA, 753 bp, Cannabis indica
gtcagagcatctctctctactttttctctttagtacttagagttcttgccttagaaagttatcctataattattatgagcaataataactcaaactagacgtaactccattactgtcgcgacacaagagtgaattaatataaattttcagtgtctctctatttacttatgtaaacttatttctcctcttaccaatctagtgagctagtgttagcccaatttctgcattaaaaattgttggttgaaattatgcacatatgaaatttatggaattaaatttggaataaaaatcaattttaggcttgttggctgtggtatgggcgtgcagcagaaacctagccgagaagctctcttgcacgcatgtctttgaccaatgattccaggagcccaaaatttcttggttcatcaggtgcttccgtgtgtgagatcctcccactttgcaggcctttctagatgcatggtggtactcgtgaggcttgattttggacaaggtgactggtaaccagtccccttggttacgagttagtcactattccaaaaataaagtgatttttaattagaaagggaattttttaattgattaattgcctaaaaatttcaaaattttgtataaaattatatttttcaattttgaaccgaaatatcacttcaaaattaattatatttaatttttttaatagattattattaattttagatattaattgggaaatgacattatatacttaaaaaaaagcataaggtgtttttatat

SEQ ID NO: 381100 - DNA, 2021 bp, Cannabis indica
taaaaaaaaacaaatcacacacgtatatacaaaagaataatcacaagtgtaatatataaaatatttaaatttattatttttggcatataaattatttaaaactctctaaaaatttactgtaaattatgtgttaaatacttacaacatatataataataataaaaatttcttgaataccaaaaaagtaattaatgtaccgattggaaccacgctgtttaagagggtattgtataaagttatatgtgtggttaataaattaaggaatagttttttcttcttcaaattaatatcaacttttatatttgtaagtaaagaaagaaagatatttgtaaaatattatataggaaccatttgatccgaccgcaataagtactagcttggtagggagcaagccagatcaggagagaagaccagaagtagatactattaaatattattattattattattattattattaatattatataaaaacatgaatatatttatatatatatgaattggtaacaatgatcagtacttttgtttggtatattacatgagatggatctggttgagctcaaatcagaattattaaatactacgcggattttgtttgactattgacactggaaatgggccttcataagttcataaattaccgtacagactactacagtatgtactagtatagcactgtatattattaattactattaatactgtcatgttctacccattaccatactatatatggctaagcacaactgaacctctttgatgcacataattttctattaatttccttaattcgttgtttggccaatgtgagtactgttgtttaatcatatcgatatatttaaatattgttggaataaatcctcataacattacagtacaatacgaatttacaacagaaaaaatgaactattacacatgtggccttcgtccttaactaactaactctcatcactctgaatcaaagttagttgcagatgaacatatgctcgatccactaatatataatcaaatataataagtaccgttttatttcttatctttaattaacaaactactccattatatattagtaaattgaattccaaatccaaggtataatagtaggaacggtacatctttaatctagcgtgaagctaactaaaagttgagaagaaacctatcatgttcattgctaaatggcattattattggtgccccggcccaaacaccaatgtataatctttacaaaataaaatataataaaaaatatatacaatgtatattaataatgattcaatacactaagagttaatcatatatctagtgatcagttcttgataattaattgaattttattttatcttaatttaatccaatttacttttaaagatggagaaaatgaaatgatcatcgagagataataaaagtacatatatatatacgttatgatgagtgagagaaattgcaacaagaggaaagtgagagcaagacgtaacaaacttattatactaaataattcatggtaattaattaagttatttctgtataatttattactcattacttataagttaaaaccatgcatattgatctcatgtgttcttcatcaacgtatttggctttgggggagattagatggtcatggaaagccttgggcctgatcagtgatttcaccagcacaacattccgtacaacacgacccaggtcgaggtggactgcagcacacacaagcgggacatatgggagtcgtatctgcatatatattatatacaccaaactcatcatcatataaatatgcatggacttcatatatatatatatatgatatctaattaattttaacgactaattaatatagatatatagatcattcatatatatatcatgatgatgtgtaagctgttggacaccacaacacgtgaaaaacgtaattactttattattgtaaaagcaattacaccaagacttgaacactttaacttgaccacaatacacactaagcactcactctttatttaatcactagacacctttactacaca

SEQ ID NO: 381101 - DNA, 1288 bp, Cannabis indica
aattttataaataatacttaaatcccgtaaataaactctaattatttaataacccaaaacattaatcttaggcggtctttacataattaatgcacagttaattaattacaatcaatggacacagtaataacagttgcgaccgtgatcaaaatgccaagtcagcatacagtcattgcttgatggactgggcttcactcggtaagcccaaagtactgtattattggtaaagatccattaactggaaatagtaactaagtatgacatctattactttataaatacacattgaatccttcatgcaaagggttagaaattcttaactcacaaacttttttagcctatactgactcgtggactaaaacttattaacgcatcaactacgtaaaaactctgagtgctctcttcctctttaatttttttaaatcgtattttctttagttttattattaaacaatttattttttaaaaatttagataaataaatatcacctatattttattaagagacaagaagaataaaaaattctaatgtataaaccccctctattaatcatgcatagaccaacttggtcagggcaattgtacctatatattatatgtacagtatcaatttttattagtaataagtgtattctaaaattatttacttttttatatgcatcccacattaaatttttaattatatatatacacatatataaaaacatatggaggctcaactgttagtaaacttagtatagacaaactaagcctatgcctagatccacctaaccaaaagctcagaaaagaaatttctctatattttttactaaatttgaaaatatcatatttctttttaaaaaaagcctaacttattttaattttctcatagtccactaaaattcaggaccagcctaatgtagcttcagtatcattttttttttaaaaaaaatgaaaaacttccaatatataaaaatgttgttccattaggtttcatatataatcactataaaacaaaagagaaaagtattttattgggcctttgaatagtaacctatttttttgggctgggcactgatgtctctactaaacaaaaatcaaagcccattgtaaatttaagatgagaagatattattttctgtctctaacttaaatttctttttttcagcaaaagaagaaaaaaaaaacttggaacttttttttttttggtgacatcactaactaaattttcgagaaatttacatttgggactgtttctagcaatttaatttcaaaaatatatttagaagagtaatttgcggcaaaaccc

SEQ ID NO: 381102 - DNA, 828 bp, Cannabis indica
agagagagaagagaggaatgataccgccgcaatggtcatctccgtgcggtaaccaatgcactcagaaatacgcagctctaactcaaattccatgtgtgtatatactcattctctatgtcactcttcttcaatttcatctctttaatatataaatttcagttttcaaagtttgggaaatttggggctttctttttttttgttcttgtttgtaattggagtatgaaatgaacataattttgagctttgcaactaagtttcagttttattcaataatggtaatattaattgaaacttaagctaataaattatggatggtgtttaaggaatttagctagaatgtgataaaaatgcttactttaacactatttttaacttgtgaatttttacttagtcccaaagattttatgaagtatgagctaagattaatactttggtttagatcattttttccccttttgtatttggggtactgaaaattagagtattagcagaataatctttatgaaatatgatctagagtcaatcttcaacataacctttacgaaattttatcagcaaaataatcttgtatgatcgtaaaaacgattataaattacattgtgtgactataaaccattataatctcaaaacgactatagatttacaatgtgcgactatcgtgatcgtatagagtaaatttgagattaatttacaaattttagtatttttcattgttatttttggcaaatttcacttgttatagacttagggttcttgatttttttgttcttaatagaacaattttgtttaattagagattaattaagtattaatgctttattacatttt

SEQ ID NO: 381103 - DNA, 7186 bp, Cannabis indica
gtgtacataatgtgcacatggacagtctatcatcacgttaacaattaaaaataaataaaaagaaaacacaagttttggagggatcttgctaacaaaaaaataaattttaaggttaattgctaaggaagtaaaacttgtaaggattttacagcaatttactctaaactacaccaattgacaatagcatctcctccttctaaatgtgtcaaaaatctttacatcaaaaaaaaaaattacaatcttatattttatcttctaaaatgttgcttgaagccttttttttcctctctaataagtattcccattacatgcttgtcgtggaacagaaaattgtgcgaggctcgcgggcgactggatttgtgccacgtcacaatttcgaaattgtactcactggtgagtggtgatcctcatataatcatttcaccggtccgaaacaaaatcttcttcattctgcaatttaacagctgagagagagagttatcaacacgagaaggcatggatgtctgcaaccaaatctggagcctctatcaccatctcacccttgtcaagcaagtataattctactacttttacagaggcaaaactccatgaaatcagtggcgttgtcaccgtcatcgctcatctttttactgccatctgctgcttctatcaatggcgttgcttctggatgtttctgcttctgctattcgtcttcttcttcttcttcgactgcgatttcaagctcctttaacaaatacaacttctttataattatggggcggagcaagaagtttccttcttcttccccatcatctcctaaggttttcttctctccttcaccttttcgattcaattaattttgtgtaatatgaatgggtttacttaatttccctttataatgaaaatcacatttgaaagataacaataatcttaggatttgctgcagtggtaatgcgtacttggtataaaccctgccaatactttcttttgggttgataaacaaagaagtcttaaggtcagtcatgttggtgaccggagattacactagagattcttttgtatgcattgcgaattatagaacaagatacaaacttttcggtttggagttgtcagttcaagtttgtttgaaatcaaactgaaaaatcattgatatcaaatttaacttgtagatatgtatatagtgaatgcatccagtttaggcattcttttgacagacttttttgctactagggatccgaaccaactcctccgagaatcacatcaaatgtcaagcagaatttgcagtttttaaaattatggaaggtgctaggctacagagacatctaaaacaggtatttcataattttattttggtatattatcttatctggtgaaagtcttgtaggaattccaaaagagaaaatctagcacacctaagcctgccactagttaccgaaagaaaaaggtggacaaagaagatctgccggaagacaccgagtattatcgtgatccaaccacaaccctctactagtaatatttgttatcttttcaggttctttgcgtgtacaactactctaatttccatccatctgcatctccatggaaaaatgttgccctcttgtttgctgaatttgctttacagtacaaaccagggtttggaaactgctgtccctgtcttgctggttgatgggtataatgtttgtggctattgggcaaagctgaagaaatattttatgaatggaagacttgatatggctcggcaaaaactgattgatgagcttgtagcattcagcttgttgagaggtttttatctttattgccctctatttgtacatggcttcatcttaaattttgaaacagaatcctgggtaaattttgtaatgatatgtatagagattattgttaaatagcatatgtgcttccttttatgctctagggagtttcaatcgttctgtcttgccttttgattctttcgttcctatttataatgtgtcatatgtgcatctttttatgctctagggggtttttatagttctgtcttaactcttactgtattttttttttttgattgtttcattaccattatcagccattgtagctgatatgatcatcaatgatgacataatgacagggaatttttatttttattttatgagtggtgtcatttactaaaggaaccagaacatgtgttcatacctaagaaatatgcctcttgataaaattttcctttttatttcttttccatcccccagaagttataggacatcatagttcagaactggaaagggtttactttttcgtaatattttaatgaatttgtatgttaactctaacaaattgaatcaacattttctcataatgcataaacaaaagaaacatggatttcatgattgtttttttgtttggttcatattccactctcatttgctcacctacttgtttcatcgcatttacagaagtgaaagtggtggttgtatttgatgctatgctgtcgggactcccaacacataaggaaacgtttgaaaggtatttattttaacttttgttatgctcatttggggcgtgtttggaaagacaagagggaattggaattgagtgtaattgaaaggaattactcatttttgtgtatttattgaagagaattatacagttttgcatgtttgtctgaccacgtaagtaactatataattagaggtaattgagaagcatcaattacactctccaattctcatatcctcatgagaaatgggtgtaattacactgtgtaattattaaaaatttctcattttaaacattaagcactaaaaattattattttcccatataattattaactattttgccaaataagacattaagaatttacaagtaattaccacctcatatcgaaacacacattatactttaaatatagtgttattactaccacaacatagggtagtaattacacaactattttcataccatccttgatttccttttgtagtgaaaataggagagaaacatgatactgcacttttttttttttctttctgaatgttattacccatttatatcccttttattctaggaatggaaataatttgaaacaggcaacaactagagttctaaatacttcttgcaatggtttatttacaataagttaaaagaagctcattcaataaaatgatcaaaagtgtgccgtcaaaatatgctaaaatttattccaaatttagtatgcgaatagaacctatacttttaataaccacttattaaagttaaccaaacccaagaacacaagatggtaacccatcgaataaggtaacaattgaagtgagagtgtgggactaaaaattagaaaagtggctagaattacctgccatatagtctgtgccactagaactaatacctatttggaagatgagtgaagttgacacacattaggtttacctaaatcaacaatagtagcgacgaaagaagataaagactttagagatttttgatattgtaaggacttggtttcacgttctttttatttgttcattttggtaaagggctttttttactagctttctatgtatgctctagagaatattttatttgaagcttatgtagctaatttttcatatctaatttgacaaatccttatgacttttggtcacatggttgtttcttaggattcgttaaaaattagttcaaagtttctaatttcatgggattacgggtattgcagtgttgatataagttttctcaagtgaaacgtgtgctgatgcatggattgagaaagaggtaagaagtgaattgaaaccgtagaattatcattataaatattatattacaattcatattcacgaattaaaaaaatatgtatctatatttattgaagaaaaatatattacaatatattaatttatttaaataaaatatttaatatgtcattacaaatgattcaatatgcatggagaggaagaggtaacacgatttcgttttcaaaaaatttggagttggactagtaagtacttatgtgaatatgaattgtaatataatatttggaacgatgtgcacctcttagaacattaaagtgctggaatttaataatttaataattttataacttattaagttattttatggtggatgtgtttaaatgaagggtgagagatgtaatcagaagtgcagagtaatttgagaaatatttgaatactagggatagtgctgcaattagctgtcctgtaagttagaatgctctaaactagaagcttttttaatttgtagtagaagtgtcctttcatttaagctttcttaccatatcactgatgaaaaaaaaacattatttccagctcttttaaaaagttatatttggaaagacattctagcacatgttgtcgacataatttacgtaactgtgagcaaagaaagttggtgatgggagcgaaggttgtaaaactttgtgttagtatttaaaagattattgttggatgaagtataacatctattttttcaattaagaaaagatgttttcaattgcaaaaagccttggtaatggccttcatcttgtcacctcaatgcaagtcatgctatgttatagttagtaagatgacaaataaatatataatattgagtatggagcattttattaaatttttcgaagcttgttactccatttttgttcatatttccatggtttgtccataatctctcagatatgcaagttcgtgcaaattgcaattgcttcagttacatgacatccatcttatgaactgtcaggttgtagccttgagggaggatgggtgtcctagagtttgggttgcaacatctgatcatgatcagcaacacgcagcacatggagcggtatggagttttttccccttgtttttactgttttaagattacaagtgataaaggatagtactagtgtcacttagttatattttgttaacaggttgttagctagggttgttacttgtaactatatatactctgtaataatctgctaatcaatacattctttcaatacatctctctctctctcttgtccattctctatataagctgttacatgatattagaagcttcctttgttcatccatcgatacttcttctgccctcaatggtgcttcttcttgtctcgatcaaactcaaactccaaaataggttcctctcccaaaatcatatcctgtttctttttaatacttgttatccatcaaactcgacgatcacaatgctgctaacataggtcagtacaagactcaactgagaaacaccaaaatgactggatctttaaattattatttgctcaagattaaaggtttgattgatcttcttgccacgaatggtacaagcatctccataagatcacattgaagcaatcttcaatggtcttcagctcgaatatgatgtttttgatacatttatgacaacaagaaaggatgaatacttagctgcagaaatggaggctcaatttgttcgtattgataagaatgctaaattgctggacattagcaatggtgaagctaatctctctcaaaccaaaccctttgccaatagacctccttttccctaaaatggttcccaacatcttttcttggattaagaattggtccaactcgttgccatggctaggccaacagctctttttgtggtcatgcgccatattctcagccaagaaatggtcccaaccatggtcgtggtccctacagtggtccccatctagtattttgcaatggtccatttagttgtggtcaattcaacattttggaccaaaaagttcagtgtcacctttgtcacaaattgggccatactgtcaagcaatacttcaatcgatttgtcaaccttctctgccctgaatcatttcagtcattttttcccattttctaatgttgctgaaatgtaggctatgtatgcatcacttgagactgtttgtgatgaaagctggtatctagattcaggtgctactcaccatctcacaccagattggctccaatcttggctcaaacatttcttacaatgggcaagcacaaatctttgtaggtaatggaacatgtctgaacattgaaaatattggcaacacctccatcctctctccatttacttctcagcatctatcaatcaaaaattttcttcatgttccctcagttacaaagaacttattaagcgtctctcatattgttatgttttctttgaatttcaccctctttcatgttgtgtttaagaccaagatactcaaaggatcttattggttgggaagcttgatgagggcttatacaaatttgactacactcaacttagtcacccatctcattccaagatgtctccaaagttgtcatctttacctgtaaataaattcataccacaaaagtagtgttacttttgatatgtctgtacctgtgttttccttatggcatagtaggcttggccaccctattgctcgagttgtaaaaatggctttcatcttgtagtatattattttctaataaaacaactcatgatttgtgtcaagcttgttgtcttggcaaacaccacaagttgccttttcctacttttactactgtttacattgctccatcatagcttctgcactctgatctttggggccctgtcatgctaacttttctaatggctatagatactatataagtttcgttgatgcctcttttaggcatacctggctttatttactaagaaccaaaaatgaagcattactacttttactaagtttaaaaaccagattgaacttcaattaggagtcaaaattaaagcaatctgtctggggaggggagcgtagatcttttcctagctttctttagcaatttggtatcatacacaagcttgcttgtcctcacaaaatggagttgtggtaaggaaacacagacatattgcagacgttggtttaatcttactagctcaagcatccttacctttaaaatattgggatgaggcctatagagcagctgactttcttattaacagaatgcctacctatactcttaataatcttgctccactagagttcatgttctaacactaaactagattacaacttgcttaaagtctttggatgcctatgctatccaaaactatgtccctaccatagaaacaagatgcaatatagatccaaaattattgtcccatgcaatatagagtaactgtctttcttattaacaaaatgcctactagtacttttaataatctttctatattagaggtcatgttcaacactaactagattacaacttgcttaaagtctttg

SEQ ID NO: 381104 - DNA, 930 bp, Cannabis indica
aaaaaatattcaaacttacatttactttgtagtgtagtagtaatgaaatagagataagaaaattagattttggttgaattttgggcattctcggactggttttgagagaagaaaaggggaaatattttgagaagaagaagagagtgggaagaaaatcacgggttgggcggtttaatgaaaggtctaatatttgactgagagaacccataggaggactctcataaaaagaatgaagttctccaataatagtctacaaaagcacttaaaagaattcttatagactaggggcaagtgttgacactgagatttcacaaagtatctcaaagttataattaaaataaggagtaaaataacatgaccactaaggtgggtcccaagagtatttctccttggtgcctccaatccccttggcgccaccaactactctcttctcttctttttctctccttggagtctccaactcccttggcgccaccaaccactttcttctcttcttttctcttctttctctctccttggcaccaccaaccactttcttctcttctctctttctctttccttggcgcctccaacccacttggtgccaccaaccacttccttcccccttcttcccttattttctctctccttggtgccattcactctatctagctaggagagtggttggtaccaaccactcttctctttttttctctctctctgtatctccttggaaccatccactctcccaaggagagtgatttgcgccaaccactcttcctcctttcttccattcttttctctattttctctctctttggcgccaaccactctcccaagaagagtggttggcgcaaaccactctttgttgggttttatgccctaaataaaactcatttcaatataatcagatttgcttattaatatagatcagaaataacatttaatgtt

SEQ ID NO: 381105 - DNA, 1063 bp, Cannabis indica
aaaaaaattatatctaacttgtttaaaatataacatcgaaagtttgagaaagcattttttgtttaatctccccaacttaaagagtacagaatcccttcctacagtcagatctttttggtctttttgttaggaagctcgcagtaaacgccctttcgtggtctctcaagcatcgttacaaatctaaagctcgacagacccctcaattcaccactttttgtcaaacatttgtagttttctttcatcttggaagtcaatttatcggccttttgtgaaaagtttttagtatgccaaattaaaaggttagtaagtcggtttgcaagaatttctcctgattcaaatttttacttgatgaaaatattaatacattttccaatcaaaagtcaacaggagatgatattattacacaactcatatggttttcaccaaagtataaaatcagtgactgaaatcaatgaaaccatgcaatttgatatcctattctagtgttcattgcgatctaaaattaatcaagaggatctaaagtagctaatgtgtttatattcagagccacaacaaacttaagagcaactacaattatataaagcatggtaccttcagcagccgaagccattaaaatggagaacatgttggtaagcttctccattttcttagcatcttgtacttactctgtcctaaacttcaaacactaaaaaaatagaaggatgatcacaaagttgaagacaagcgagaacaacgaaacactatatgttgtaatttaaattgaagaaagaacatatttaagatatcacaactatgtctagttaaatataaaatagtgtaccaacttataagtacaagcttgtatctaatattgaataaagaacttcttaagttaaaataacatttgtgttatcactgttaaatggtgaaagaataagattctacaaaaaccttttactatgaagtaacatattcatatctaaataaagaaaccaagagaactgcatgatttgtcaacattttacagatatcaattcgagaagaagccccatccctctctttccttttttacgcccccacgtcg

SEQ ID NO: 381106 - DNA, 1465 bp, Cannabis indica
tttcttcttttttttttttggtaacacttgcgtttctttatagaggtacaaaactaacgattcaaattaattatgaaatgtgcaatatgcaaatatgcaagtcgtcagctgaaaacattataccccaattagtttcatttttgttatatataataaaaacgctcaatttcaagtcattaagcagatggctcacacattaaaaaaaaagaagcaaattaatggctctctatctagaagtgtaatgaataagatcttaactttgaatccatatttgaagcatacatgttcattgacgtgggtacagacctattctccactggttcattgtctatatactccaagttctaaaaaataaaataaaaagcattataataagtaaaattattattaatctgtggaagatattatagtagccgcacaataggggcactatggacatttgagatgaattaactttgaagaacggttcataaaagtgcagaccagctcctttttacctccttggtttctttaacttgcaacgactttacctgtcgacctcatcatatacataatacatttgcgtaatacggaaaaacaaaattaaaaaactaataaatgtgtcttcataattagacggtgctacgtgtcaaaatacgtttggagaatctaacgttcactatgcactttttcattttttaaaacttaaattaattaaagataatgtccttatcattacatatatatttatatgtgtggggcttaagagcaactgtagctaagccaatggctcggccttttctgggcaattgcacatgcagttaggtaccagtcatataacagccaaccataaatcgacacgtggacaaaaagccaagccggcggtggcgaagtcgtggccatgccacgcgcgtctctcatcatcgacacttgtcctacccaccgcgccgtgtggcacatgccctctcaagaaccataatcactaaatcgcacgtgcctcaagtgaccaagtccttcttataacgagattaatattggcgcacgtgcctcaagtagaaaatttgtgtgtatattattacatacatcaatattttcttctcttacattgttatgtgcggtcgtttttgtagggtaaggttagttcatgtgctagaaaaggaaagcagtcaacttacggcattccattggtaggggaaacaaacctgttttggtctcaaaatctcacccaaaactacgttaggcatttttttcttggattttattacatttttccctttgaggctttttgtttgttcatatgtttttcttacttttgaatttgctagctatcttaaatttgttattattcgattagtaccaagttttttaatctatttgaaagaacaagtagtcatgacacacaccggtattgaatattccagtatcagtatcagttaatatattactataaatcattttattattttgtgttttttttttttaattt

SEQ ID NO: 381107 - DNA, 1059 bp, Cannabis indica
ctgtctcgcaatgtcatgtctaccttaagtttcagcagttttttctttggtgatgtttctatgattggcttcctgcaaaatatagcttcagactaagcatgtatatgtcgatttgagttgttctttttgtaatcaagtcgaggagtctatttttcatgtgttaatagggtgtccatttgcacaagcatgctggagcacgtcgtgtgtggatatggcaggttcttttgttgatttttttcagttggtataagaaaattgatagtcgagattctagctcagttatgacagaggatgctatggttggttgggaaatctgaaaagctagaaatgatgtggtttggaggggtaaattgttcaacgatagagtgatttgatcgacatgaatggttcttgatcaatggaaaagtgttatagaaaaaaaaagaaagcactatttttgaatgtgtccaatttcaatggggtggaacactaatttgaaccgcctttaaacatgatcaaggttgaatgtgtccatttttgcggctgcaaattgtttttgtattggaggcataactcgaggacatgatggcggactgattgagactttcactttgggaaagtatgacgatctgcaacttaaagttgttgaggctattagtgtgaaagatcaattagttagattaagtgtaaagactggtctaatgtcgtggttgaatcggactatctagttgctgtgcaagccgtggctagctcagttttgatgtcctccacgtttggaatgctggtgcaaggttgaaaagtgttgttttcatctttaaataatacttctataaatttgttaagctatctattaataaagaagctcattaccagagctgtaaattcgtgctggcacggcccagcccggcccgttttcaaaaagcccgaaaagtatgggccgtgccgtgctggcccgtatagaattatgggtcgtgccgtgctggcccatatttccataggtcaagcccagccccgcccatgggcacgaaaaaatcgtgtcgggcccgggcccacatcgtgctttaaacgggctttgttaga

SEQ ID NO: 381108 - DNA, 978 bp, Cannabis indica
acagttaatgtaccaatagacaataactataagttttatatatcatatcattattagtagtataatttaataataaatgccacatttgatgatgcttataatttaagtcttttgtggtagaagtattaaacaccttaaaatgtctattagacatgctcttgttatacctttatttggtattttttttctaaaggaaatcaacttatcctgtcatgtggtttgcttataataccattggttggtgagtgtgccatttgaggaattatataataaatagatccaatttggtcaaagaaagaaaggcaaaaagaacacatggaagaacagaaagtgtaatagttatagatgggtccataatgaatgtagtaaaggagcaaaataatgatgattccttcttgtttttgtttttttttagtttgctgcagttgcataaaaaggaaaaaagagagataatacataactaacgtggacttatcaacaaaaaaaaaaaaagaaaaaacataactaatgtgggccaatattcttaagtggcacgtacctccaaataaaaacccacctaactaagattcgtttggtttggtgagattactacttattcatcacattttttacaaggatgagactaagtagctccgcaaatatcctaaatttgttaaccttttaaacgtgtcacagtcactactatggcattgtgcaactaattagcgttttttcacaaaaattaaaatatttgaccctccatatattaatcgtaaactcatacctaatttcatgctattgaatatgagaaagaattatagatctatgatgtttcctagtctaatcttttctctatgaataaccaaactttaaagccacgttaaaattacaattgaattttgaaaagaagtacatacccattttactttacttgttttaatttttacttttatttttatattttgtaatttttacttttatttttatatttttttatat

SEQ ID NO: 381109 - DNA, 4775 bp, Cannabis indica
taacagtggataatatgtggacctctctcactctagcagtttagctactacaccaacacaactattttttttttcatttatttaattaatattttccatgatttcatttcatggcagtctctggagtctggaccattataacacttctttaattattattaaaaaaaattattatttatttgaattgcatattactcagcattttataaaaagcaatccctttgtctttttttattgcttttttcttcttttattccaaaagctgtgcttctcactgggtacttacatatgatggagttggagttgttctttctcaatatgatttaattttattttatttaatttaagccaattgtgttagttttcttattttagtcgattcttttagcagccattgtagaactttttttcttaaagacacaacccacttcagattttcatatacaatccaataaaatagacaccaccacccccaagcctacatagtccactatatgagatttgattatctttatggggacatcatcagccaaaaaaaaactaagtaatatagatttgatgttataatgttattggtgtaattaaatattggatttcttattatttaatttaaattttattatgaaaaattgttaactatttataaggtgtcatcttatgataacatcactgatacctgataacaatattgttgttttgtttttatgatttaattttatcaaagttgactaatatgcatggtaatgcttatgctctcttgtccatcacctatgggagtggaaaagttttagtgtatttttttaactttttcacttttttcatacacaaactcaaatcattggagaggaacaacaattataacaaagcccattactaccttaaagaaaccactcaaatcctttcctatgagatgttttttttcttagagaagaaaaaaaaaacctttcaattcaactattaatatggatcattctcacaaagaagataaatctgaaaaacaagatcattctcagaaaaggaaaacactaaagattttgcaattaagtgttttaaagaaaaaaaaaacactgttataaacactagtgatgtttagcactaattagatatgacaccttgtaaataattaacgatattttatattagttattaaattaaattttgtagaatccagtacttaattactctaacatcgatataaaaattataatattataagtggtgctacataccactgatacattttaatatttttcaataaaaaatcgaacaaagtaaaacaaaataaggcgataaaacactactattaccaacttgttccaaaaagcaaaaaaacactattatattacaagaataaactcaaacataactaagtaaataaaaggatcaataaattaccataactaaaatactaaaaattacttaccatatgtatgccactactaaaaatttataactaattaactcaatactaatttttagcatgtgttattcttggtgatatatttttttttttttgaataattcttggtgatatatttgtttggcaaaagaaagatagatatggtatagtattacctcatcctaatagaattggtatgttctttgagtttttccccctaaaatatgctataaatatttgcaataacgtataggacatgttgtcaattgtcatgtccattagacactcatataaaatccttattataggaccataaaaatggatatgtacatatagtttcatccattccattattccatgcattataccataattaatacacataactttgcctaatcaaatatactttcttaaatttataacatgcacatgcatcaatcataattattatcattagtatgaattccattacatgattcatgaacttgagttatttttggagagaaagaatatttttaggagtttgttttgatatttcacttggaactttaattttttttggcccttaactcaaatctcataaaaattattaaagcatcttttcttaattgcaatggcaaatcattgaagcaatgttatatttttagtataatattttttttgggaaatactttatatattatttttttcttaaatttacagtttggattgttccggtagtttttatgtgaattgctatgtgaattttggtgcactttaagttgctcatccgttggttgctatatgagttgctatgtgaatttctataaaaatgaaaaaaaaaatattttgaaatgtaaaaatgaacaaatcttttttttttacatatgtatatatatttctaatattttgtagtttatagttgtaccaaatttatattgttaagggagtattaataatgtctaacaacattttacataatataccctaatatattaaataattccacactttataaccaaattcaacacaataaattgtttcaaaaaataacacaataaataaaaatttatattttctagtaaatattatattgaaaagcatagccctaaattcaaatattattaatttttatggtttgtacttctaaataatattgtatataacctttgtacatattatatatttagaatacaatgtcaactattatataggttttaaattcaaattcaatttcttaatttaattacatatatatagccaagagaaattagttttatttataaaattaatttataccaattgagtttcaaattacatagcaccaatcggtattattgtaaacataacataagagtaccgaatgaaatatgagtaatagtatttgtacacataaataatatattaaatcatttttgataaataagatcatcttaaatggggataaattacttatcacataaaagtgttaaatttgtgtgtaatttacgtgaggtttacattaaacataagtagattaggcctgtacttagggcctacttagtctaaagatcaaaaaaatttctccttttctaaaattacatatatatttttttactaattttaaaaaatatcacatttagttttaaataagggtttaaaaatatttttttcctataactcattaaattttagaatcggaactggtgtgaaatatatatacagactcgatattttgtaaactattttattttaaataatttacattcacatattagtatatgcagctaaaatttacaattaataatatttatattagtattttgaaatttgctttctttttgttttgaatttcactccattgttttcttttaagttgtaggataggtcttaatcaattagaacacaagtgaagcacggaatgttgacccataaaggaatgaaaatggctttctctcctcataaaaacacttcatcatttatatcatattaattacttcattcattcatacccttcttaaaataaaacactatttattcaaccctaaaaatgtttgacattctcttctcttctactattatatatcatgcctttttcacattgattgatattgtgtttaatattgctttaactttctcttctcatttcaaaaccacaaatccattttggttaactttacatttaattcatgtatatatgaatcaaaataaaaataatataaattctctatttttttttttactttaagaattcaactttctaaatttgaccacctttttatgtcaaaataccaaactttttcttcttagcaattcaagtatccccatgtgaattctttttcattttttgggttgagtttttatttatttattattggaagtttctaatggtactttagtttttaagttagcctatgttacttattacttccaaaagtcatggtgatcatgatttaaaaactttataatggtttccaacttataatatcacttcatcatcatcatcattatcattattattgttataattattattattattgaatgtttcatttctttaaatgggtttttcatattaagtaaaaatattccctaacttttacaaaaggtcataaagagaagtactatatcacaaattcaaatactttgagtttcaacatgtaataactttacttggataactaacaataacaacactttatccatatagtgaaaatggattattttttgtttcttttttccccaaatgttgtaatataaataaagttattttgattacaaaaaattacccacaaagaatagggaaaagaaagaagaagaagatgaagaaagaaagacaaaataaggaataaactttgtttttgtagctaaatttaatttgatgctttaatttaggttgatgaaaaagacaaagttgaatcaattaattaattcctcttcattcatattttatagtggtgttgatatgtgcttttgtgtgaatcatcatcttccattaatgtgcacaaatttagttataacaaattcataatggtcctctaataaattttctcatcttcttagagctctaatttctcttctcgtgagaaatataatttgtcactagtaattaattttaataataaatataagaactatttttttcccttaaaaagtcttattaatattttttatgtggcacacaatctaaagaccatattgatattattctttggattaatttttacgtaaatttattaaattaaaaaacgtcaaaaaaataattatataattctatacaattttataaatatttgtaagtaataaatttatatgtttacaattttaatatgttgattatttttaaggttttttttcatttttacacttcaaaacaatttttttttttgtagttttacagaattctacatagaaactc

SEQ ID NO: 381110 - DNA, 3170 bp, Cannabis indica
gggaagggtaaaatagtcattttggaggtttttagattcttgtcctatatggtttttctaggctgatttttaaagtgttttaatttattttatttaattaagttagaagataaaggtttgaattttaggattaaatcaaaacaaaaccaattttgcataactctttttctctctccctctttttggctcaatagaacctagcaagaacccaattgagaactcaacccaaatcatcaaaatcttgtcaatttcttcggccctaggagttgtttatcttggaggtaagttctttattcattctctttgatttctaaagttctaggttaggttttgttggattttgtgggtgaatttggggttgtaaggattagttagattcagaatatgatttctaggtttaaattaagtttgtttgtgtgtgctttgaatgatttcatggttgttaaagttataattgaaagaatgaagtttaagaactcaaggttcactcaattatggtgttttggttattttgaaaaatttccgagttttgattgattgtatacattgtattcatgatatagaattgttccatgaagtttaggaacaattgactaggtttggagaaatttttggaactttgaagaactgaaatttttgagtttctactgtagtgaaccgaaattttggatggtacaggactgtaccaaccggaattccttttggtcagtttcggaaatcgctgatttttcgtattttagccataactttttattcgggtgtctatattagacattatatataccgtttcgaagcttatgaagagctctacagtttgagacatagattagagccaaaatatgtattttattttaggaaatttcaccataagttttggtagaaaaccctaggttattttatgcgagttttagacagtgttttgaaatagaccgttattgatttactattatcatgacataggacccgagatcgtcgagtatcgtttaactcaagtcggcccacacacctgactttggacttgaggtaagaaaagctatttgcactactaagcatgttaagagagaaacatctattatcatgtgtcgcttgattatgattgaagtaaagatacggtcattaccgttattgagaatgagtaaagatacggtcattaccattattgtgaatgagtaattactcgcttgaaactgtagataggtttcttacttatcgaatgctttatcgggcaacgatagtgacatatgcagctcgagggtaacgagtggtaaggatgctttatgaggcatcaaagtcaatttgtcttataagataaataattgtttatgtaatatttgaatacgtattgaataaatgtttatattggatgatgaatttgttggttatgcaatgttataatttctcatgttatgcgatgtttgtgttttacttgcttttcttgttaagtctttgtgactcacaggtacttcgtggtgcagatgaagggaaggggaaagtggaccagcatgagtcagaggtctccaagcaatgtacatatcaactgctgtgtctcagctttcagtagacaggatccacccttttgaccgtgttttgaaaatataaccctctattataaaggcagttttgtaatgtgatgtaaaagcttttaaacaggggatccctgaatccagcagtattttgaataaaagttatgtttcaatttaatcaaaagtttaaataaaccgcacttttattaaattgttaatttataattatagattaatttttaaaagcacacacacgtggcatccctgtacatcagggcgttacaaaatgtcagacatgtttcatgatttttgagagccccaaagtagaagggcttccacttcaaacttttatgatcccaaactctttttctttttgaaagagttgaagctatggactgcaagcttatagatattcaaaatatgattgtgtatattcctttaatgaatcatctttccttgtacttttaggtaggattattttcctgagatagaagcagcatttgttgtagaagaacactgactaaccaccatagcaaatcacatcatggattcttttgttgctaggttttgtgtgttttgataagtttcttggaaagatgagatggtctttgtacttattgtaattactttgtttagcttcattttcttgattttgataaggttcaattgggttgcataattagttcagttctaagttgtctaaatccccaagattcttatttatttgtcaagttccttggtgagaaaatatttatataagtttccctgaggagtttttgtaaacttttatatacaaaattgtgacttcatactaaattgataaaaaaaattgctaaaagggatcattagtgcctagtactctctacggtgtcataccgctatcggtgtaattaagcatcgcgtcccatataacttaagaaatagcttttagatttaatcgctaacgaatcgtgaagcgatatctatagaaggtgttgggcaccactgatgcccaatagcaatgctcaattggtaatgtagtgttatattttagtatcttttaaataaatatttctctaatagtgtgttgcaagttgtgtcaaatttcacagatattatatttggtacacaataaatattctcttaattccattttcaccatttatcaatgtattgtagtacatattttttcaattataataatattatcaataatttattaaaaaacattaatatttttaaattctgaacttctgacaccatcaaactatactatttaaaacatgttaaaaattctccatgaacatttacttttagaaaatttagtcattctactagatttcgttacattttattataaatgtttatttgttattataaattagtatttttatcctccgaattttgactactactaaattgtattcaaaaataaactcaaatggtagaatataagaaaaataaggattttgaatgattaggaaattaaaaaaaaaatatttaggtagtatattaaaaacaaactttgtgtaacaattcaatatgatgagaacaagcttgaatctgtttgtttgattatttttttgtgtctaaaaaaatttaaaaatttacataataaactaaagttacaaaaatacatcaacacagaatttttttatttttacgctt

SEQ ID NO: 381111 - DNA, 2074 bp, Cannabis indica
tggaaagtacaccctcagtcttgtctccaacaatccttaaaagaagatgcagctacatagacttatccactttcatagccatcacttagatttgcattttcaaaatcaggtttcttgttagatgaataagagttagagttatgagatagtccctatgtaattggtctattatttatttcttttcaagaagttgtgatctcttttgaaatgatcaagtttttcatgattgtaacaaacaattatttctgatgattccccatctcttgagtttgatcttcctttattgttgtggttgttactattgcctctgtatgatcccctattgttactccttcccctattttgccaaggtttcttttgagtagatctgcctctactcaattgaattgtctatctgaactccctcctttctcagtcttcattactaaaactttggactttagatcacttcctctaaagtgattgatgttctaccatatttaataattgttttcacttccctataaattttaagaagtgaatttaagattatgatagtctggttctcatcactgagagcatcattcttccctgagtgtgcatcctcaagaatttatccagattctattcaagagtcttacagtgactcatctggaacacaaagatccttttcttttaaaagatcttattagtcaaggacttttgttgaaactactcatctaatttcttccaaatttttgttgtagtttcttcttatcaataagacttatgcttgaatcagaatagctgaagataaaatgatcccagtagctatctttatgaaatcttcttgttggatttttgtagttccttctcgccaatctattggatcttccgaaattctgagaagtttctgttgggccagtaatgatctaatatttctcctctaaattatgtaatcatctgatccatcaaacttatcaatatatattaactttaatgttactcatattacagaatctaaaacagagatagagttaggctttttggttaattagttagtggaatatccacaagatccaatctattggatcttccgaaattctgagaagtttctgttgggccagtaatgatctaatatttctcctctaaattatgtaatcatctgatccatcaaacttatcaatatatattaactttaatgttactcatattacagaatctaaaacagagatagagttaggctttttggttaattagttagtggaatatccaaaagttcttcatgatgttcccaggttccactggattatcttccagtcttcttgtgtgttctatgacttcttgatcttgttgtatctctttccttcctgagttaaatctttgttgactttcttgctaaaccaagctctgatactactgtaaaaaattacttgaaacataaaacctacaccaataaaataattcaatcagtatttaaactaaggtcatttaagattgttcctaaacccaagttgacttcgctcaaaaccaatgataacaaaatcaaaactataccattttaatttcccacaacaaaatctttcaaagattctcgagatcaatcagatctctaatcttcttcttcctctcaaaaccttagcagagctaaaccagctcgaaccattagtatttttacataaacacgcacaccaatttagatctagatcgatctaaacctaaaaacacaaaagcataaggaaaaagaaagaaagcatctgaaatttttttccatggttcaccaaaatatgagttacatctctgttaagatgttcctcagatggttggctcgatcttcattatttctgacttgattacaaggtattggcaaggattccaagtcacactaagatcaacaaggtaatgttgagatgctatcagagaactatcatttttaaagtggccacaaacattttcctgttgttcaacccatgagtcgttttcaaataaaattattttgatatataatatatatgtattaaaatcaatatagcccatgagttgttctcacttattttcactaaatcatctaaaggaattttaattcctatgtcattttcaagagatgataatagta

SEQ ID NO: 381112 - DNA, 3963 bp, Cannabis indica
aaaccatttgaagagttagttgagcaaaaatgtggcctttttgcagaaaagggccttctgggttttcatcttcctctacagcagaggaggttactcaaggcattgatgggactggtctcactgccattatcacaggttaaatatttatttatcaaggaatttatgttttttccagatagaaatgtatgggttatttatattatatcaatatcttttattagagtaatcatattttacttgaattagtcgtatggaattgtggttacttaataatagatagtgaaaataataattatgtcatgattactatattatgagttataaatgtgttgggtaaatgatttccttatattgaagttttcacttcctttggggaaatttttatccaagtgactttcaagaccttgttgttttctttttcttttccctagcttgataataatttatatgtggggtttggtttattttatttttttggaccaggagtacatagcaattgttctgtagggacttaccctgcgaatttgtgggagcaacatttgagctaccctcttaagtcacatataaatatgtatatatatgggtattctttacaagtattataataataatggagatttcatgtgtagttacattcttataattcatctattcttctgggtcattttttcttaaaaatatatatatgaataagtatatgtatggtcttttcaagattgaacataccttccataatccataccatagattgaattaattgcaatgtaacatattcagttgatttgattctgtcaagtggcatctccaaaaggaatttcagctagtttcacttactctaatatcagtgttctgtggttaatcagttagtaattctctaatattttatgagcaagagtaataaataaaagactaacaatcacacacacaaaatttgtagtagttcaccttcaaaatttgtagttgtttagtccaattaatttgcttctaaaatctaacaatttttggcatctgttttctaaaaatgcccaattattatgacattatctcatactctaatgatattatagatatactatgttgtgttgcttatactggttttatggcattgacaatttaggagcatctagtggtattggcactgaaactactcgagttcttgcattgcgcggggtacatgtgatcatggctgtgaggaacatggctgctggaagagatgtgaaagaagcaatagttaaagaaatccctactgctaaagttgatgccatggaattggatctcagctcattctcatccatcagaaaattcgcatcagatttcaaatcctcaaatcttcctctgaacatcttaatgtaacatattaatatacctttaaactttgcacaaagttttaattaagcatgcatttattcaaagatttatgtaatgttgttgactttttcttgtatggtcaagtaacaatgcaggagttatggcaacaccattcatgctttccaaagacaacattgaattacagtttgcaaccaaccacttaggtaactaaactaaatttagatacatatgttaatcaagaaataagcaaacattagagctcacaaaatttttgttatgtttcaggtcattttctgttgacaaatcttttgttggaaactatgaagaaaacatcaaagcagagtgaaaaagaaggaagaattgtaaatgtttcctcaatggctcaccgattcccatattctgaaggaattcgctttgataaaattaacgacaaattagggtacataggactattttctaattactttcaacttagtattacatgtctctttgatttaggtcaactgtttcttatgtgaatatgtacattttgtacaggtacagtagtattgctgcctatgggcaatccaagctagctaatgttttgcacgccaatgagctttcaagacgtttaaaagtacatgaaattttttataaattttattgtttactttgttcaaagtgttgttcacacttttttttttccttttgaaagggtgcttttaacatttctatttatttcgttttcaggaagaaaatgtgaacattacagcaaattcacttcacccgggtgcaattcttaccaatctttttcgatttagtggcatcatcgatggtatttattgtataattttccaaaaaaagaaaagaggaatacttagtttactttcatatcttttaaggcaggttttacttatggaatttatatttgagttgtgttattcacgacttcctattacaatctattagtctactttctaatgtgaaaatatattctgaaatattttattaattttttttttatggctgtatttattatagttacaacatcatttctgtaaattttttaaaaaatttaaataatttacgtgccaaaaatatatttgaagcttttctaaaactcatagtagactagaatattaaaaattatgtttttggtactgtaaattatttggaaattttcaaaaaattacatagatgatactgtaagtacaatgaatataattaaaaaaaaaaattgaaaaaaaatattttgccatctagtttcgggcgtgaagattgactaaaaagttataatatgagattgtaattaacacatctctttatatttttaatacctaatattgcaattcattctttgattcgtgaaggtcttgctaaatcagtgggtagacttgttctgaaaaatgtccaacaggtaaaactatactttttatttttctaatgaacgtaaaagtatactttcttttatgagaagaaaacttcttcctttgtaatgttgtcctattactttagggggcagcaactacgtgttacgtggcattgaacccacaagtgaagggagtaacaggtgaatattttgaagacagtaatatttccaaggcaagcaccatgggcagagacaacgacttggcaaaaaaactctgggatttcagcctcaatttgacaaattgatcatttttatctctctataaacatcataaaaataataataaaaaaagttacaagacctacggtatctacatgactacgattgtaagcagtttcttctatctataaataaggaaaaaaatcatttatctcttctctatctctttatcaattactaggataaatatatttaaactaaagagcttgtaataatagagaaactgatttggaagtggtggttttgagaataagatgaatttaccaagtactgcaatcaacaatacaaccataaagttaatttaaaaatcttcaacttacctaacatcaaaacacaagaaaatttatgtagttcaaaaaacagggtccaatccaaaacacaatgtaacaccctattaatttaggagtgttattgtaattttataataattgtgcaatccattgctaatcaacgagtttgttgaaaaacataattaattaaaattttatttaattaaccttcaaatgaaaataaataatcgttgcataaattggaatcccgtatttaaaatatttacaatcatattacaaaatattagtaacaaaagttgtcacctagcgactattcaaaatacagtctgctattctaaagatcgtatgctccaggtctaaccgccccgacatgtacaaccttcatttgctcgcatttactgctgctcagccttacctttgtccttacctacacatataaacagtaactgttagggctggtcatccgatctaatccgcacttttttagtcaaacaacatccaatccgcactaagtgcggatttcaaattttggatccaatcaaatccgcataacagtttaaatccaatccaatccaatccgtaatagtgcggattggatcggttgttttagtgcggattgtattttttttcattaaaatgaaaaaaaaaaacagtaacatacctaaaatttaacaaaaaaaacaattctttcttaatctctaacaacacattacactc

SEQ ID NO: 381113 - DNA, 977 bp, Cannabis indica
tgataagtttctaatggtcttcacacaccctgatgtttctcccacacccattcatgattccgtccgttatgttcccttctgagttcaagctcaccatatcccctttgggcgtaaaagccctcagctggctcaatttatcgctgatgagattggggaactcgttgaaatttaccccttgtcactgcttgagaattttggcccttatctccgcctccggatattgtttgatattaccaagcctctacggcatggtatgaccattcaatttcgtgggataagtaacccaaaatggatcaacttcaaatttgaaagcttatcaaacttctgctatttatgtggcctcgtggatcatacctacaataagtgcaccaagtatctcatgcgctgtgataacttccccctccctcctctccttgaatacaaagaaaccctgcgtgctacaacccctgcccatcacaagaggaatccctttgagatttcaaactccactccttatgaagagtatttccctcgtagcattgccaataatcaaatcttgcagcaagctgttgatcagtttctccgtgtggacacttccaccactggtttcgctcctcctcctgcttttgtgcctgcgctattttctcactccacaattcctccacctattatgaccacgtccatcattacccatactgataagggcaaaggaattgatgtgaccatgcccagcccatctccccctcaaagtaccagatctgcaggtcctgttattcaagagccttgtccatttgcttcccctatttcttcccctggaactagacgccccttcacccgtcaatctgctcaagttggcaactctgttcgcagcatcctgaagagagctcgagcagtgtcttgtgaggacgtcgtggttccctcaatgtcagatgatgacgcaacggcgggtgctgctacgcgaccccgccgagaaaatgagtctctacagttggaatgct

SEQ ID NO: 381114 - DNA, 878 bp, Cannabis indica
ttaattaattatattaattaccacttcctgcaacagacaaagcttgagctgtccattgctttttctcattgttgatattatcttcattatcctgcaaaattcaaacatatatgtgtcaattgcattatatatacatatatcttgattatcaaaatatgattatatgtgtaattataccgaattagcgaagtgattaacaagtttaggatcatcagaatcatcctgatgatgagtgttataaatgttcttcctgaattcatcttcaatatcttctccgtcgaagctttcatcgtcatcacccgccactcttggacaacctatacatacataaatacaaatttgttcgaattattctgttaatatgaataatacgttcatattcaagtcatctttttttggtacctgaattttcataattttttttaaggaaaatacttgttattattaaacaaataagattagccaattttcataattattgataattgattaaccatttaccgtacaatatactaaattaaaatatgtgaatatgatattagaataagtatgtttggtggaacttagcattttttagattctaatatttacttcttttacattttataaaaagagcataaaaacattatagtgcaataacatgcaaacaacatgtataatacttattctatatataaataaagtctttgataccagtgacggatccagaatttttactttgtgggggcttatttattatttaaagatatttatatctatattataatcatttttactatatttatttaattttattggagcttttcctacaattttaatctataattatcaaatttaaaaaattacatttaatttttttaaaagcaatatttttgtta

SEQ ID NO: 381115 - DNA, 2383 bp, Cannabis indica
ttttattttttaattttattatgttacaatatgaaatgcacataataaagttttcaacatgctaatgatcatttccaaaatttatatgataaaacctataagaatattcctagagagaaagtgcgtcaaacatctttataataaacgagaacaaaattattaaacagtaaataaatatttataaaatgcttctacaatacactttctgatgcactccctattagtttcatcgaggagaattttttgtatttaaatttttttttttattaattatatatattataattatttaagatatattttaaaatttatataatttctcaacatactaaaaataagtcaaagaaatagtgtgcaacctctttatgataaaaaggaattaacaaaactattaaactgtcaccttaggagttgggagactatcaatacttcaataggaaacatatatatatatatatatatatatacaaatttacataattttagctttagattccaatcaaacaattaatgatattcctatgttaccaagcacagagtctccaccacttgagtcaacaagtgatgattactacatttgtttacatttacttgtgtagttttatgatatgattttatgttataagtaaagagaattgcatttaaattgtgtactcaaattttatacatattaacataagtcatggtattacatttttaaataacgagccttatattcttaagtaaatatgatacgtacttaattatttatatatggctaattaagatttttatctcttgaactttgacatatactaaattatgctctttcaacttttaagatcgttaaaaatgttccttaaagtattgagattgttgaatttaaggatttttgtctaatttcgttcaattttactattttagtgattgtttatatactaaaacatgctccccagactttgatatctaccaaatctacctctcgaactttgacatgtactgaatcatgacccttgaattttcacctatattagacttttttactaaaattggaaaaaaagtcttttaaatctaataatcttaatagttcatgggcatttttaacgatcttaattaaaagttcagggattatgatttggtacatgtcaaagtttagaggacaaatatcttaattagcctttatatatattcaaaatatattgacaaattctattgagttgcatgtcactattttcaatcaattacaattatttaatttgagattcattgtttttacatattccaatatataatgtaaaaacaaatatgtcatttttgttcctaatattgtacgtatgagactttataattaattagcaattttaataaatcaaaatatgtgatatcaatgcaccatgagaaaagacaaatgcaatatacaagtcagcaataacataatatatacacatatacattagaaaatgtttattattattattatttttattttgttattttttgtgaccatagaaagaagcatgcaatgaatcatactcaaaataataatgataaaataataataaatccaaaatattttgaatagagaaactttgtattatcatgaaatgaaatgggttggttggtcacgagattaataagagaaaagagtggcaagggatgtattatatttgcttccctatcatcaatcaactctatcttcctcttcaatcctcacctcacatagtttttctataataattattatagtctcttctctataataagattgacagatgtgatgaaaaccaattaggtacagatcgatccactgaactacctagagatattcctttgtggacatcaaagacagaaatacacaacaacattactatttgacacacaccacacctatgtcatattttataattagttagcagttttttatattatttattgtattaaaatgtgtgaaactcgatattaaaatacatcaatagcattatattatattttatactgtttgataccttaatatttttcaataaagtaatttatgacgtaaatatttagatttaatttttgacttaagttatatatctagaatttctgtagatagctgaagattaattgtcaagttattgtccacgtattatttttttaggctaattagtaatttttccttccgaattttgacatgtactaaatcatatcccttgaacttttttggctgttaaaaattccccctaactattgagattgttagatttaaggacttttgtaaaattttagtaaaaaagttctaacatgaatgaaagttcaaggggcatgatttagtacatatcaaagtttttaggggcatgatttggtaaatattaaagtctgaggagcatgatttagtacataaacaatcactgaaacagtaaaa

SEQ ID NO: 381116 - DNA, 1486 bp, Cannabis indica
accccaaacctcaggttgataagcactatagcatagtaactagagagcattgaagattaaacgagagagctcagatcatgacttgcaatcattaaaagcagaagcaactaaataagtgaagatggaatttaaattctctgtgagccttgaaaatgagttttgagaacacattaaacacgctctgaataaaaaaacaaatgaatcgtgtaaccaaatagggaaaatataagacttcatcacctttacatgtttcgtagttgcaacttgttccaccttattaacgaactgatcaaatggaaaatagggaatcaaacgagagtgccaatcactatacatcccaattaggctccccaaatcaccaacctgcaatacagaatcaacaacaagaagattcaggcattcagcaactaaaattcaaatcagacagttaccttattccttttacttcaacggagaaatttaaattatttaaaaacaaagtctaccacagtctattaggtttgattatcaaatgaagtgctagcttaggcaggccttggattccaagactgatcaaactcaactcaaaaggtcactctttcactccattcaaatgaaattaaacgaactaaaaatctatctgaatgagtttgcatgctaatggaggctatctcaagttaggtgggcgagtgtgtcaatcactaatgttcaaaataaaagtgacgatcaaaacttgctacttacgtatgatcaaacaaactaaacctaaaatttaagattcaagattaaagacaactgcttgaacagtaataaagcatataagtttcaatgaaaacccaatttcaaatagcgagaaattgaaagaggggaaaacctcgtgaccgcgtccgcgatacttaaaggagcgagggaagtgacgaaggacatagccgagaccatcgtcggaaagaaatagctgaggggtgagcttgggccttgtcctcggagccgaaaccttcttgggtttagccgcaggtttgtcggtgaatcccgttctaaaagcagcaggtccagagccagagccagagccagatccagaagtgaagggggttttggatttggaagaaggaggaagatcgggatttgaattgttggaagaaggggctgagggacagtcgcgggaccagtgaccaggtcggccgcacttgtagcaacccgtcggagctgccgtatccttctccattttcagattgtatcaaactatgaactgaatcgattttcttctgcgaaatcaaattcaatccaatcggtgcctttttcttctttttctgttttttctttggcgggaaaaagaggagggaaactaattattggaccgatccatctagttatgtaacataatgggctttggcccaaggagaaaattacactctataccctttttatattgtcttcttttatttttaccctttttttttaaagtctattatttttacctctttttttaaacattgtaccaattttaccc

SEQ ID NO: 381117 - DNA, 1393 bp, Cannabis indica
aaaaaaaagagagggcaaagaaggagagcgataaaaaaagatctgataattcaaaggaaagcaaggattctgagactcaaaggtgctcattgttaaagaagagcaaggatttacaatcaatgaagcatgggactttagataagattaggaccttgccattagagggggataaaatgtcaaagaaaagtcttcccggtataatgcttgtagaggattcagatttttatgactttgataaagatagaattgggagaagctttaagcaaggacaggtttgggctatgtatgctgacgatgatgggatgccaagagattatggtttgatcgatgaagttgtttctgtaaatccttttgaggtgaaattaagctggttagattttcaggatagcagagacgaagggttgctttgcttggaaaaaatgggctttaatctatcttgtgggagatttaaggtttctaggaagacttctattgattcagtgaacattttttctcacgttgtagattgtgaaagggcagctagggaggtttataggatttatccgaagaaaggttctgtttgggctgtgtatactgaaccaacttttagtgccgaaggaagaaatgttacaaccacagacaggcggcgacactatgacatagttttgttcttaacaacttatagtgagatgcatggtctgagcatgacgtatcttgagaaggttgctgggttcaagactatattcaagagacgtgagattggttctcatgctattaggtggctagagaaagatgaagttcaatttttttcacaccaaattcctgcaagaaagctctctggtggtgaagcttcggaactcttgaaagattgctgggaacttgatcctgcttcccttcctgcagatttgctatcctcataggagagattttgttttattttattttttgatttcatcgtagggctcctttgtacagttttataattttagtgtgatggaggagtcacctaattttgagggcaaataaatattgagaaaaatattaaaataaaaaggctgatcattaccttaaattaaatctattaaattatagtatctataatgaatggcgcaggtcacccgatcattaccaaccactctaataaagttgagaatacgtttaactactgtgagccactactcaaccttcatcacatcaggacctcccagaaacactggaggtgcttacttacggaaccgctccatacggttgccaacaacagattgttctgctggcaccgcaggaactgcaacatgctgaggaggcacggcaggagaaccctactgcctcaacctctgaatttcttcatcctgctggcggattcggtcttgcatttctgcaaacctctgctcccaatctggaggagcttgtggtg

SEQ ID NO: 381118 - DNA, 1833 bp, Cannabis indica
tttaacatattttttaaaatacatttctgcactccactagaaatgctttaagattatagattttatcaatgttttgcattttatatttcagcagtggtctttaaaaatgattctcaatataaatagagtactgaaatgtgcacacctaaatattaattaacgatttttacatttatctatgtagggacattattgttttaagtgccacaatatttaatcagatatcattactcctaaaatatatagccaattccagtatttttcttcatattttcactaaaaaagcacaggtatagctagtgaaggctagtattttgcctcgttttactcgattccaggtaggaacaaaaacaagaaagcaaagagcatcaaacaaaaataggtagcatctctctacccccaaaaaaaaaacagagaaaacttgttgcaaattataaaagaattttaataacatattcacataggcatagaagagatttagaagtggcaatgatgaagaaaaagttcaaccattacatcattttacataccaagaaccatatgatgatacaaactacaaatattagagataccacaatatgaagtaacaccaaaacttgatcctaacagttcctccaaaatttcaccacaatatgaagaaacaccaaacatatattcctttctttacatttcataccattactttttattcgcttgtggagtatcttgtactccagtacttctctatctcctctgctgttcttccaggaattcttccagcaattaaagtccacctaataaatacctaataagttgtaaaagtagagaaaaaaagccaaaaaagtaaaggcaaataataatgtaaaagaaagaaaaacagagtttgtctaacttacctttcccccacaagattaaacatcctagtaataagggcttcttcatcttctgaaaaatcaagcttaaattctaatttgctactttcctctgccaaacaaaaagagaaagaaagataaagagcacacatgaacatgaacaccaacaaaaccctttttttttttttaaaggagaaagatatccattagaaaatgaaaacattgggattcaaatgtagagagtattggagattacaataaccagaaaagaaagcatttttgaatggaaaagctgtaaatttaaattgggttacctgttgaattaacggaagaataagaagaggagactgatgaggagtgagtcatctcagccatatgggagaattgaaaaacaaaaacagagaggatagagagtaacaaaaccaattaacatctaagtataaataggagatgtgataagaaagagacagtggcccttctggtctgggataagaacgaaggaattatagttatgagagagagagagagaaatttagtagaggaatggtagttgaggggtgggttttttctacaccaacgttgataggttgttgaaccttcaaaatcaaattgtttggtggtactttagtttttcacaaggacaaatatcgagtaacatgttgagtttagggtcctaaattatctaaataaattgaatgtttttttttatcatttggtaattttaggttgttattttgttaatcacttttttgtatgaagttcacctcggtaatatagattgactgaaacatcaagtagtttctttagtcttaccaaccaaaaaataaatgtgtgcacataaatttgggtgtccacttatcattacttacaaatcaattagttaatgaaaagagccaaacattccgttgacaaacaatcaattaattattagagaactaggaaactaagccgcgcttcgcgcggatttgaccctagttttgta

SEQ ID NO: 381119 - DNA, 3258 bp, Cannabis indica
ccatcaagagtcacacaagagaaatacccatgtcaaattgtcatttctggaattcaatccatggtatcagaatccaatgtggcccactacaaagttcaaattctggtgagaatgcaaacctgtcttgcataattaattttgttcatctcagctcctttgcccacgagcacgatcacgccaagaaccttgttgtttcgcaagaacctgcagccaaagaaaacaataaatacaaactaacaactatatctttctttactactaaaaaaaaaaaaaaaaaaaaagaaaaagaagagagagagaaacaagagtttttaccttctcacttaaaagatttgcaccaagatcattttcattcaactctcttttatccgtctcagtctcaacctcagcttcagtagcagcttcgccatcacttgaagtggtaagaggaataattgatgcaccaaacatggcctcatcatgagcaactctgatttgctcttccctttttgacttcaatatgatacggaagaaataacattagatacaaaaacattacatatccacaaacaaacagttgctagatcagaaatgcatgaagccatagccaggaacagaatcatcaactgcaactgagaatacagatataccttgactgcagagaatcgaaagctttggccaatgtgcttcactaatgctgtatcatcttcggcagctgttgacaaatgaagatatcacgcacaagcaaaatactaccttatgctaacagggttaagacaaacattttaattcaaccaatgactacgacaatgtgattcattcacgatctaagcatttgttaggatctaccccgtaccaaatatgggatcagttggctatttataaccacttgggcaccctacttacataagctagtcttttggagtgagattatgtaacaaaatcatgtcttgggtaaggaataaagaagcagttatcacttcttagaggtacagcaaaacaataaaagtttcagcgccaaggagaaaagaaatttacagtaaaaggtaaataactctaaatagtggcaataaactgccaaaaaaaatcacgcaagggaacataaaacaagaaaataaatgaataacataattaattgatacttcaccagatgtatcacactcagttttgtaaaaatatttaaccttcaacttcttcctcatcatcaaggggtgcatctttgttgaactcaaacctttcccaacctgatcccatgcctttcgttgcatccttttcagctgcagttaaggttaacatctataatacattatacacgacagcaaataaagcaaagcactaaatgaagaaacccataatttagaaaatgtactagacaggtatccggtaagactttagcataatttctttctgctaagatcttcgatatatttgacttaactttaccatgtgatcagtcatagaatagttaacttctaaaaatacaacacaatcaactatactaattacttgataataagagataattgttcaaaagtttgagacgagtttctaggatagagttgtcaggattaacagcttgcacacataaaactgattataatactacatataatttacatggaggagattagaaaacattcagattgacatcaacaaccacattaacttcttaattgaaacgattgctgtgcaacaacatttgtccaagttcaactactacatatagttcaatgatacaaagaatgcaaaataaggtacacaatcagttgttgttctattcactttaccacttttccagtcaaatcctatccttctaggttctcattttaaaaacaaccccttaaaaacttgtgatggaaactattagaataatctatacaggagttctacgaacccagcataaccataccaaatagtccactactgtctttaagacttaccagtctcagctagttgaagcttcatcttcgctttgactctttcagctggtgactgatcgcacaaacagagaagttatgtaagattaactccaccacattaagattccataccaatccaaaatattcaagcttgaatcataacaaaatccaaaatttgaatcacaaatctatgcaaagtggaagctagacaagcttaccatcaaatcatagccttcaatcaacttcgaatagttcacattcttttcctttcgggcattactaagttgtccccctactcttccatcgcgaccctgttccttcttcgatctacgctctcttggtgaagggctccgattccttctctcaactctccggctccgaggcgagaagctccgactccgactccgactcctactcctactcctactccttttcctcctcctatgtcgatctctatccccatccctatacctatctctgctcgtactccgccgcctcgaatgacgatcccgctcccgatcacggctcctactccgcctcctggaactcctttcgtctctctgagaaaccctagaatggtgtcgttgttgtcctgattctcgggtcggactaagtttattcttcttcgtgagcttgttctgtatggattccaattgagcttgtttctgatgctcagtagtcttggttgggctagaagccttgacgaaactgctgaggaaagaaaccgaggaagaagaagggagagccgagcctcttgatgggacatcagcggtactcgacggtgtggctgagaagcccaggccttgtttgaatctggcggctccttcgcctcgccgagtcaactcgtcgtagtacgccgcggctttctcttcctccatttttgcagtcttgttgagctcgacgatttctctctctcttttgggctttctgtttatttgggctgttgagttgcatgttttgatgggcctattaggcctaagaaagtacaccaacaatttacaattttgaaaagttattttttttaaccaaaaaattaacttttattcaaataaatcagctaccaagatagcttccaaaccagcagagacataactcccgtgggaaacacagccaagaaaagaactagaaaaacgagctaaaaagttagccgcctcgttcccggatcgtttaataaaattaattgaaataggaaacaaaagagaggattgcataagagcaacacaatctgaaattaaaagccccaccggagacaacaaccgcttcttctgttgcacagcttgcaccagcagcagtgagtccgactccataaccacaccagcaggcacacccccctcaacccaccttcccttcacccaactga

SEQ ID NO: 381120 - DNA, 4324 bp, Cannabis indica
ctactgaagcttcttatcccaggaaatgagggaagaatagcaatgagagcatcatttatacccaacaggatctgataaaagcaaaacaacccaaatttagagagcatttgaagaaagcaagaacaaaaaagcacagtgaaaatttactatacttaccaccatcctctcgtagtatcttgattacctctcctgaaacatcagactggatgggacaaaaaagtaaggaagatatgtaaaagagttaataaagagaaaatgtatttgaaaaattgctgagagcttttataacattcaaacctcaattggtagctccccaccaagctgttctatgtagcaaatcacttgaccctccttcactgtttgcttctgttaagtcataaatgcaaaagatatacattcatagtaagcattacaacaagagtccaaccatgaccactgccttgagataagtaaaccaattttgaaaaataaatgaacaaagttcatagcaacggggaagtacctctttacatggcggtggagcacgcttcccttttatagttcgagatcttctgaaaaaccccacctacagcagccttgtgtttaggacacaaaatttacagaacagccaaaagaaaatgaagcataggagcacttactcttggagactgaattatcaccaagccgtcatcaggagctttatttacaaaagtttgaatattctgtgaagaagtttctgacttagttaaagccaaagataatgcagaagtagactcatttaactcaggaacttcagcaactgtatattcactagtaggagcataaatttcggaggatggactggtgggattttcagtcaagtcccttgtaacatgtaagtagaatccactgagctgctcatattttgacattgcaaagtgttacaacaagggaaaattcataaaagttaatctttaatagaatcaaaacatattgttacttacttttagttcaaactctgcaactgaagttgtgtcacatattgttgtgagcagatattctacctagagtcaaaacaagtagttagaatgtttttcactttgtgtaaacagtatatgtatagatttccaaggaaaaacaatgctttcacatatagacacatgatgattgtcaacaatgttacctcatcagagtttggaacaacttggctccttaaaccagaaatctcaggctcttcagattcatcttctggacttaaaacggctattacagacatcatcaaccaaaatgagttatagagtcagaagccaaatataataatctaccattaatgactacatgtttcaatgaatactagaagagcattgctattgggtgctcaacaccttacgattgtttagcgatatttcccaaagttattttcattggacacgatacttaattacaccaacaattgtaatttcacattaattaattgatttcttagaaagaaaaccaaatatcacaaacaacttacagagggtctccagtgatggaccaatgctcaagtttaaaacttttcttgacaaacttgatattctcaaacctgcataatctagtgattttttcccactccaacttcttaaaccatttaatcttaaaatcccactctttcttgcaacacagtccaaggttgatatgttaacatatgaggaacctaaattacctgcaaaaccatcatatcttcccaacatttagctttctataacaaatattagttgttggagatacatattattgtgcaaaatgattcaggaaaaataaaatatattttttttcaatagttagatggaataaaataagcaacaagcacaaaattaaatgacaaattctggtattatacacacacacatacacataaatggcaatgaaaccaatgcatggaaagtttaacaatttctaagttgtaaacacccaccacaaaagagaaaaaaaaacaaaaaagagtaattatataaaacacccaatgatcctgatatggtaaaacgatcaaatacaaattaagggaattcatattgggacagagagcgagactcacaggcagccattgaaatctttgaggcaccaaaaagtggagagaagaataagaataagaaaaggaagtaaaacccagttattaaagaagtgttttaataatcagagaatagtgatgaatatgatgatgatggtgatagttgatgaaacagagaagaagggaagtggagttcaaccagaggcagcccttccttgcttggttcccaccttagcttccttttccaatatgacaaacgaacgtcccactagtctaccattgccaatacaactgtaaacaatccacaccgggcccaatccaatataatatttattttttttagggtttttaagtttatatgagataattttatattatacttataagagatattaggtaaaattatcttaattttattattagtgacactaaattaagtaaattgatattttggtggtaaaatcttttaaattttacttttattagttatttatccatttggttctaaaattcttttaagtgctatggtgtacatgtcacagtgtacacaaatgtacacatgacaaatatctcttactaaaaatttgtcacatgcacacttgtgagtattatatatgtttttggatgagagacacataaaaagagaaagtatagctttaagcaatcagtgaccaagtcccctttataaagtcacaaagaagttttgtggatcaggaaacagattatgaccaaagaatacatagagatttatcctgccttattatgtcattcgggacacgaaaggcttaatatctctccgactccaagatggcccggcttggagtgtgcctaagtgatacatgtaagattacttaaagggcttatcacggacactcagtgcccaaaagaagtcggatgttaaccatgaaaaaagacttggatcgcccactaaaggttatgccctttctgacacaggatcagaacttgtctcttgtatcaaatcatggtagtgcgcacttcccactcacctttttgcctgacggttagtttaggcatttactttacaaggtgaaaccttttggtgacatgtttccagtgcagataatggtccccattgtatagctgcctcttcacatgagcgaaaactttcttaggggcccaatagttagctcataacatgttatttactcccatagtgaccttattacataaacccttgggggtcatgagcatgtccatacctgtcctttagcctataagtaccattttattttcatacgaagggggatcaaagatcagatagttgaagctctgctaaatttactctaagcttttttattcttcaagagaaacctagtgagcaaggttagggtttcttgcaaacactattgtaaaaatattttacaagtctctcaaggctaataggttgactcttgactaggactcattaacacctgaaccacgtaaaaatcttgtcttctttactacttcatttcattatttcttaagctcttattttattagtttccgaaaatctcgataaacagggaggtttggagggttttaccaccgtggtatgaccacagtgtacacaagtatacacgtgacaaattattagtgggggatattggtttatgtggttaagtatcactaatgatagagttcaagtagttttgcagccaatttccttactaaaaatttactacaagcacacttgtgcacactggcatgcctactgtggcacttaacagtacattctaaacgaaagggataaataactaacataagtgagagttgaaggattttatcaccaaaaaatatgtagttaagtgtcgctaatcatagagtttaagtaattttatcgccaatatccctaattatagatattttatttgatttaataacatcaacaatatagtaaaatatttattctggtgtattttcgttgttttccaaatttctaatggtgaatttgttcatgttaaatcataaagagacatgtagatagagttacgtacgtggaaacactgttctgatttttaatgtttcataacagttgcataaacattttgctaacagttatttcatctgattgtaacctttgtctgatgcaaccttcggccaaccatccagaaactttcgtctgattcaaatcttcgtctgatgcaactttcggccaacccagcaaccatcgtatgattgaaaccttcgtctgatgcaccaccgtgcatcatacgcaaccgccctgaactatcgtctgattgtgtaagtgatagtgtaagagatattttggtaattaaaatcacatatgaagtataaatgttgtctacaccttat

SEQ ID NO: 381121 - DNA, 5845 bp, Cannabis indica
actgtcattgcataatccggacaacttactattacccactacatatgctgctgattgctaatgtccctatatgacgttactttctttcttgttttgttattttgcttgaaataccctgtatgattactttgggttttttttttgtttttttttttttattgttactttgctgactcacccacatgaatacttctctatctatatcaaacagtcaagttccaaggacaacttacactttctgaaaattttgggctgggaattcctgctgtcaaggatctgaacattggagtgacatgaataggagaaccaaactctgtatttgacaatgcagaaacaacttggctatcattttttccttcattgcaagttgggattatctcagctgaaaatattatattaactgtcagaaaatctcagtataatattgcagcaataggacaatggccttgatgcaagtagaaggtttctttaccttgttctgtggttccaccacaaatcatctcattgtcacattcaccaacacaactttcttcaacatggatcgactgtgaactacatccaacatcctgatgtggagcacctgtttcggcttgactatgatctgttttatcaacagctgtttgggacatggtagttgatcctgtactgtattcagagctatcaggagactcatcatacaaatcaggttgcctgcaatgcaatgtccattcattagaacttatgtaatgacataaatattctcatataataacgataatgtatagttgacaaccattttttttacctccaggatggtcgacttccttcattgctactcttcaagtcgtctaacagatccttaaaatcttcaagttgaaaatcaaaatcactgagtttatatctgaggatgtcactttctttgctttggttcaggaaatcttggaggacctgcgtatagatatagtatttcatgaatattggaagagttgcagacttagaagtgtaagaactaagagagctaccccaaactttcttgggcatgatatgcattgtgtggaggaatgcaagcgatccaaaaagttgacacgacaacattacaccagagttattagattctctttcataatgggctcatattaatggaggagctgaatttgcttggctaagattcagtaaaaaagctctaatttgtgagtgagccatgtgaagtttattattcatattactggcttattagattgttacttacatccagctatgactgttagacatgtggtttactcctaaaagctctaatgtttgagttcttaggcacatccatacaatgctatagtttcctggtaatattgtagggctagccaaggaggctatttttaatttttcaaactaacataatggcggtagtgtttgagactgaaacaatgttctcaccttccaagcattctcaagactctgctctgtgttctctgtgttaacttttaatgccagtgagctaagcagctctgcttgttgcatcaaagcattaatctttgggtcatcctttctgagaaatgatcctttgtacttgttaatttgtgctgctaatggaaaagaaatgaaagcaacatcattagaataccctgaggtttaaaaggaataatagcagatcgatacaatctctcatcaaattctaaaattgaaaatttgtagggtaggctaattatggattgtgtaattatctcaaaactttttacacactgcttctcaggttctctacagaaaataaggttaggacttaccatcagcaacaacatccttagtgatattgtcatgatgttgagatggcatgatgttaatgttgtgggaattctgaactaagactgcaaagggcgctctaagctgctgctggttcgtagttgttgctctgcactgtttatgcaatctgctttcgaagttgcagttttctgaaggatcagatatgtggctcctcctgttttccattaaaaaaaaaaaaaaaagaatgagcttgttctaactaacttacaagtaacaacattgtgttctaagatgtattttcattctaccttatcctttttgttgatactgaggtttctgaagttccgtctgtgctaagtccatttctgaatataacccttttgttatttgagttcatgtatgaagtagtgttctcctttgctaaagcttcatattttgctctcttcttgcacaaggtggagaatctgtttttcacagcattgtccgttctgcataggcagtagaagataggacatttaataatatgatcatgaaaaattgtttaaaatcacatcagtgagagataaagagatgacaaagcttctatacctgcctgagacaacctttgctatttctgtccatctattaccaaatatcttctgagcctgtagatagcctttaacaaattagattttaaccaataatggttaaatcattggtaaatatgtaattggtatttcctgtttaactttttgccgacattaaaaactaaacaatcaactactttatcttagttttggtctaaatgaaaattgattatataaaataaatgtcaaatactcaaatcaaatatatatttcactttccattaatacattaggtgcagtagatcgtgtttagtgttcaccaagctaacaaattaacaatatctgaatattatagatgttatcaatatcaattacctcgcacaagagcaagtcttcttccggtgaccatccccctttcttgaagtcggaattcaaatatgtgtaccatctacagcaacattttttaaaaacaaaaaacaaaatcaataaacaataaccagaataaatagaaacgaaccaataatcacaagagaaaaccaacacgacaacaccattattatcattactaattaccttcttctgcactgtctagtcgttttatccttgaactttgaagcaatgattgcccaactgcagaatcacaaataataaaaagataaatatatatcaattcccagagagaatcgattcatgcccagtacaacctagaaaaaaagtgagtgaaagaaactcatacttctctgttccgtggatattaatttgctgccgcagtatatcatcctcctgaaactcaaacgaccccaactcagaaaaccaactatagaagaagaagagtagaaaataacaagaacccaccaagcaatcaaggtaaagaaagataaaaacaagacatagacataagaacaataatgataatcatagaatgggaatgaaacagagtatttttaagtattaagcaaaataataagaaagggacctcttgagtccacgttacaatgtggcgctccttcttcttagaatcttcattaccagaagtcttcttccttgtgttctgcattgtttttatttacttaaatcttcacacgctctcttcttcctttcttggacgctccttccctttatccaatccaaaaagcatactaaagcccaacttttttcatgtttacttattttttatttgcaaccccaaatcacaatggtaacttagtaagtaatacctctctatatatttaaccaagcttcacttcccccaccttcttcaaaaggcacacttccctctctttcctgaacttttttatttattactaaaatataacttttataaaaaaaaaatgaaaaattatccttttaccttaacctttactgatactgttgttgggtttgaaagaaaagaaggaaagcattggctatacactctaatacgatatcggacactgcctcggattctaacttttcggtcacccctttgattttttttttcctttcttgcactacttaatacccattcccccaattcaaagctcaaaacactaaatccaacaagaacaagagaatcaccaccgaaatgggaataaagggtaaaaatatattaaaagaaaaggataaaaaaaaaactgggcaataagagctataaatggaatactaagaagactttgtgacacatacacaatattgggtattgggcaactctcatcacttaattcaaaaacaatgtatatgtacgtacaattacaaaatctaaaaggaatgaaaaaggatagggtgagattggatcagtagtagtagagagcaggagtagtagagtagtagtagtagtatgaaagtttgggagtgggaagtgggagtgaccccagaaatgtagagaggactgtttctaatgtaaaaaccatgatagtaataagcaatgatagtctgtcattttactctccctctctagtctctacagatgagatgaagaagactactactgctgctactgttgaaaactagtttgaaaccctctctctttctctctctagattgaatattatactatataaatattataatatatatgctacaaaagaaggaataattaataatagaaaggaaaaataaaaagaaataatttctatcaacggattctcgctttagtgcgcgggtatgaagggaagtttgaaaataacgctgaattccatgacaataacattaattggatcaatgtgcagtgtagactaagcccacattgcactcaaaatattaatattattattatataatgtatattcatatatatatatataaaatataatatataatcttgtattgtattgtatgttgtgtggaattagaatggaatggatgatgggtttggtttgtgggttcaaatttttgaataatgaggaagttgggggattaaagggaacatgaccatcttcgtgacctaacacccttcacatattattttcccatattcaatctctataataattcatgcaatttgagttcagcaacttagtttttttttttaaaaaaaaatattatatatatatatatatatattaccggaataataaaagatgtataaaatagaacaatatgtcggttcttccacgtgcatacaggcgcgtgttttcaacgttctgttgtgattagtggaaagttattgagatccgattgggaatattgaccagagttagttatatccaatggcatttgactgtgtcataacgcgacacatgtgaatgtttgggcagagtgtgtaatttgatgatatttctggaggcaacgattgtttttacaaaattgatttttcttttttttttcatgtggatggtgttatttgttagctcagggtcatgtgatttgttcaatatagaaagcttcattcatttttttttgaaatgttactattctctctcataatttatatttttctcttttaaagtagttggatttttgaacacaacgttggtcccatcccatctttattaatttataatgttgttaataatattcatcttctttcctactattatcaaggttagattaattaatatacattacaaagatcattaatattttattttaaaaatcttgtcttactcttacccaacccttcacaaaatatgaattgattaaactgctaatgtacatatttagatatatatatatatatatttagatataccgtaagaggaagaggattagtagtcataaacgttaattggtaaagtttggtaagcatattacttaatttggcttacttcttattgcagctatatagcgaggaagaaaaaagtgttggtgtggctgtggccaatccttttgaaaaaaataccccaaaataaactgaagtaccaaagaaaaatatgctacaattcaaaattgatcattgtatacaaagtcaaccttatagcttaatatgttggataacagaacacatgtcatatattaggggtataagacaaaacacaaaagagaaagggaaatataatataataaaaaataaaatataaaatataaactaaaaactaataaaaattaagtaaaaaaaaaataaaaaa

SEQ ID NO: 381122 - DNA, 2287 bp, Cannabis indica
tatcttcgtaggggaataaacatcttaattttatgtcttctttttctattctcttataggaaaacctttatatttaaacattggtctaattgtagtaagctttagagtatgtaacttattcttgaccattgttaatttaggacacaaatttgcttgcttactagcatccattgtagctttcctctgtttaatggttgacttgggttcaaacatcaaaatcagtaatcttgactctcttttattaatgaataagacattctttccttggtgggttatcatgttaatttctctgattgtttgttctggtatttttcatattctgctatatgaggcaaagttgttaaaaataattattctttttagtgttgtagggtcaactaaaataaggtattgaggaggacataataaaaaaatagaggaggaggtgggaaccagaggtcaaaatagtaaaactctactcttaccttcccacgagaaagtttaatagcaaatgagagcactttattttgtagagaattccctccctcttttaaccaattgcttttgattttgtcataattacacttgtactccatccatccaccaccatcattggatttttcttctaaataacacagttcccttctttaccacaacaccatcctcaccagtcacctcatcatcaatatcacgaaactaactctgtcaaagtccttgagtacaacaccagaatggaagctttcccacaccctcctcacctctgtaagttcaatgctttcctttctgtttcacttactatgcttttttttaaaaaaataaatctgagtttcacttactttgctttgtttgatgaattgcttgacttgtatatcttatactgctttttgaaacaaaacgatgctcaacaatggcttcctaactactatcccaacaattatgttttcacttctcttactttatccacgtgaaagttttcctcttgcgcagtgttgcttcttcttttctgtgcttctggatattgaattctgacattcttttccttctagaccagacacacacacacacacacatttatatatataattttaactagagagtatatgtgcacaccaaaacaaaaatcacattccactcaaatcatattatgtgctagtacatcagaaatcaggaaaaaaaaataataagaaaaacttcttctataccctctgcacacccaaaaactaaggggaaaaaatatatagtaatcagcttcaactggttatccttgttgaactttttttttctttctattttcgtcctcgtgatatatatattctagctgggatttggcgtgatgccgatgtatacttacactctgatttactatagactaaataggaggtttctgtacaagtgacaaatcaaggccaaaaatgggagcaccctggaatgacatattccaagataagacaaacaaacaaaagaatgacacaccaaacacacagattttatgtgagtagtactaagtagtaagactgggtcgtgaggctggtctctggggtagaaactcagtagagaagaagaagaaaagaacacacacaacaccgtgttagatgtgttcctagtagtatgctagaatgtaccataacattctagatctatagtggttccactatgcagattcaaacacgcctcttgtaaaatttcgggcttaatttgctgctgcaatcaggaagggattcaaacaaagatggtgacccgacaatgggtcttaagagaagtagaattgtggtagtgagctgaatcagaagagtttagttataggctatggaggagggctcttttgcagggtggtggtggttgtgaaggattagtgcctgggcacggggactccactccaagagttttaagcaagaagttcctctcctgaaacatttcacgagaatactgttagtctctaatcaaatttgagatacacattctaaggttatttttttataaagaatttttacaaacaaaacaaaaagtttctgtatcaatagatgtaagttttataagtttagactaattaatattagcacttaccaaacttttttaatcttaaaggttttatttaaatgattaacggctatcaaagctcatttatatttgtacctcacagttaaattttgttaactttaatactgtcattgcataatccggacaattactattacccactacatatgctgctgatgctaatgccctatatgagtactttctttcttgttttgttattttgctgaaataccctgtatgattactttgggttttttttttgttttttttt

SEQ ID NO: 381123 - DNA, 8239 bp, Cannabis indica
taatgtcatggcttaggtaataggtacataaaaaatcatttaggctatattatacaataagcacactataaatcatcaagcacccaaaatgaattgcatatcccgaaaggtgcccaaaaatttcaatgattgagaatttcataactacgagttccaacatcattttttttaaattaatattttcttttttttctttttttttttttcaagaaacaagaaatatactttgctttttttttcttcttcttagtgatggcggaaaacactttgcacttttttttcaaactcttctcaatcaccaatttttgaaaaatttcactcacacaacttttcactcgtccaaacttattcctaagcttatgacaaatgtaaggtgcattgggaataaaaaaagtgaatggctacattttaagtttaaataggtgatacaatttaaaaaaaaatatttaggctcaacttggtacattaaggataatcacatgaaggtaggcttgaaaggcttaaactgtccaaaaaaattgcctaaatcatattcttagcaaatattatcaaggatttcacatcaaaagaataaatcatgcaagttctacatcattcaagcaatcattccacaaaactaagtaaaacaattataatacacttcaaacactgaaaatcaacatcaatctaaaaattttcacaagcatctaaattaatccaaagagttaatgaatcgagcacacggtttaaaatttcaatctattccacaaataacaacattaacaaaattgatctatgcataataaatcaactaaaatagacaaataaaactaaacaaccaaaaacaaaattaattaagcccctccttcaaacttaaaatttcacattgtccccaaagtgactttaaacccaaagagagagtaggacttacttgagacccccattagtaggggttcaatggtggttgttcatacggctggaatcgtggaggatatgccaagtttttttttttttttgtttctgacgtggggcttttaaagttgattgggggccctcgtcgcgaccagctaaattgtggttgcgaccactgtaatgctaaaatttgagcctctctgctaggttccctagttgcgaccataaaaatttttcgcgactgtgaactttcttggttgcgactactggaacaggaaaaatttcctggacttctctgtaacttctggtgttgcaaccatgaaattggtcgcgactagactgtttgctggtcacgaccactgtagtgatcgactgatttttcttcatgttttttgcatgctttccgctgtttgtgtattgcagaagaaaagatactaaaacaaattaaagacgaaataaaaataaaaccacaaatgtctcaaattgactaaaaataactgtaaaacttggggtgcctcccaagaatattgtcgttaatatcatatagctggatgttcatttcctctttaaaactttatctgggataaagtccacctcttgcatccatcagagcccttgtaccgaatgaagaaaactatcctcccgtgttgcttatgtcgaagctatccaaaagatgagactcaccttcacaattttcacacattaatctttttatatgtcgtccaatagtgcgaaattgttctttgcgcttccctttcttctttttaacaactacttcttcttgaccctcctttataacttccactctacaacaagtgggaattttagttgcggcaaagatattaatagtcatttcctcattttgaactcgcaaccttaactcccccttttgaacatcagttaaagctctccccatggccaagaatggtcttcccaaaatgatgggaatattttcatcttcttccatgttaagaattaagaaatcagcaggaagaatgaatttaccaatctttaccaagaggtcttcaattataccccaagaatgagtaatggatcggtctgccatttgtaagatattgttgtaggatgatcttctctcagttttagcctttgaaaaattgatagaggcattagatttatactttcccccaagtcacattgagcccttgtctcaactgaaccccctatcgagcaaggaatattgaaactacccgaatctttagcttggacggtagtttcttcttcaatattgcactgcactcttcagtaagtgccactgtctcatattcctccaacttctttttctttactaaaatctccttcataaatttaaggtaagtcggcatctgctccaaagcttccgcaaacgggacgttgatgtgcagcttcttgaatacttccaaaaatttaaaaaattgcttgtccatgttattcttgcagagcctctgcggataaggaattttgacataatgctcgatgttgataggtggtgacaagaccctcagtagtcttcttttcttctggtatcggtgcctgttgatcctgaactacttcttccacttgttgtttctcactaggcccctcatacttcttcctacttctcaaagtaattgcttgacactgctccttatcccttacctcactactactaggtgaattttttatgttttgccacttgagtagccaactatcccatttgagtttctaaatttttaatcgaggctttagtctccatcatgaattggagcaatgaatcagcttggatatttgagcctccactagaacttggttattggctttgctggggctaaattctttgttggtagaagccttgttgctgttgatttgaagtttgtccttgatagttcttacgatgactcccttcttagttgcacccatagttattgttctcagaatagcaatagcttgatccattggcaaactgttcacatccattgggcaggttcatatgtgtgaggccccccacaaagctcacaagtaacttgagcctattttacctaagcaatcatcaacttagtcaaggcttccacttgggctgtcaacttagtgatggcatcaactttgtgcgtacccgcaactttctttaattggcttctctcagttggccattgttggttattcatggccatctcttcaagcaagtcatacgactcattcgtactttttctcataaaagccccaccagctgctgcatctatgattattcgggtattgccaaccaacccattgtagaaattgtggaccaacatccacttctcgatcccatgatgtggacactttctaatgagatccatgaatctctcccaagcctcataaagagattcattgtcaagctgacaaaaattattaatctctcttcccagcctgacaactttaactagaggaaagaacttggataagaacttcattgccaagtcagtccatgtatcaatggagttaggtggcaaagacaccaaccaaattttagctcgctccctcaacgagaatgggaacagtctcaagcggatggcgtcatcactaacttcgttcaccttaaatgtttgacataactccacgaagttagatagatgcaggtttggatcttctgagggtagtccaccaaactggactgaaaattgtaccatttggagtatggctggctttatctcaaaattattggcttctacgacgggtggtcttatataagactgaacccccgtcaatgttggaagaacatagtccctcaaactacggtcaggtggattacgatcgtttgcctggtcttctacgtcacctccattgttactgttgttgctgccattactattgtcagccatgaatgcttctagttcagtcctcactgcacttctttcttgcctcttgtttcttttatttcttctatagatcttctcaatttcaggatcaacaagcactattacactttttacttgacgtcgcatacactcccaatacctgaaatagagtaagaaaaattgaaaagaaataggttaacaataagcaaaaataattaaccaaagtagaatttaatctaattattgtaatattaatatttactcgattctccgataacggtgctaagaacttgttacgtaaattgtaaacaactacgcaagtatacataatccattaaaattttaaactcacataggtgaggtcgatccacatggaatgttattgagtaccactaaattagatttatgtttctatttggtaaaattgataaaaatgttgaataatttaataactgaaaattgaaaaacagaaaaataataataaaactataattaattatggataaatgtttaggaatatgaatcctattagttcagtttcctaattgttaatgttaattattaattctctcccttttggtgacgatagcttatcaaaataaccctaactcttctcagatcattaaggtcttaaatcatatcatacctacttacatctctgaagtaaattaacatataacttgcattaaatttagaatttaaaaatcacataagctatgtaaatagtctcattttacatcaaaacttatgtttatcctattagagcattcttaatattcacttctcaaatttcatattaggatcataaatcacatttaagatggtcagtctaaaatatgtaattaaaaacaaataagaacaagttacacaatataggaaagattttaaaactaataattgcattaactaaattgaagaaacatcatctaacattcatcatatccctaaattgagaatttagttcataacactcaagttcacatccataataattcttgaaacagaaattaacataaagaaataaaaagggaaaagaaagaactagttggtgatctcactccaggtcaccacaattgcttcctttgttgcctttgttagttctagggttcaatttctgagtattttgcttctaaaacacaaaacccttatataaaaaataatgcagatatctttgaatggcgaaattacaaactacccaaaaatatcatctttagcccatagacgcgactacctaaagcctagtcgcggccataggttaatctcaaaaaataagctttctgcctaaactccatagtcgcgaccacataattcatcgcgaccatgaaagacctagtcgcgactagcttaatttctcgcttcaatatctctcagtaaaatatacataactttcacatacatactccaaacgagataattcaaaaagctttagaaagaggaaaaagatatctaaaacttatatgttttcactttttccaaaataggaaccaaacataatcaaatttaggcttaaactttcagctttattttcttgtaaaattttctctattttatagatcgttattttttaaaatttgattaatttatccattccaagtgtgaaacccgaaaccaaagaaaacaacagtaattccatttcaaaaataataataaagaagaaaaacaactatagaaagtgacccgaaacttaagataaaaatagcctaacagtctcgctctgttactatgttagcttctacacctgaaatgccataaacacattgtgctagtgttagttaccttaatgacaccacaacaggtactgttgctttaaacaagagtttcaatcttcctagctcagtttctagagtaaacccttgtactcctcaaactacttcagggaacaatatctctcctataccaccacaatctatccctgcaccaatcactgaatcaaatatctctctgcctgtaccaaaatcatcacacacaaatagctaaaattcctcatctattgcagcaaataaacatatcatccaaaccagatcaaaatctagtatccataaaccaaaagcctatgcttccacactacatcctctccctgaatctaccctaccaaaagaagctaccaccttaaaacaagctcttgttgatcctctctggtttacttcaatgcagaaagaaaattttgcccttaagaaaaacaacacatggtctctagtactttatgaaccaaacttgcatcttgtgggaaataaatgggttcacagaatattattgaatgttgatagctcaattgacaaatttagtctaggctagtggcaaaaggttactctcaaacaccagagataaactatacagaaaattttagtcatgtggttaagccaacaaatgtgagggccttattgactttggcagtaacaattggacaatccctcagcttgatgtctcaaatgcttttctcaatggaacactacaatagtctgttttcatgactcaaccactaggatttgtggatcccaattatcctacacatgtatgtaaattacacaaggctatttatggcctaaaataagcttttagagcttggaatgaaaagctcaaatccactctctacaacaaagggctcacaagctccagagctgataattctctcttcatttcaggttctagtgacaaccaaattttttcttgtatacattaatgacatattggtcataggtcctaagaatttagtgtccaaactcattcaagatctgaataatgagtttgatgtgaaggacatgagtcctcttcattattttttgggagtggaagtcaagagaactcaagctggaatgcacctgtcatagtccaaatctatagcaaaataaaaatagatggatcaaaaccaagtcctcgccccacaagctcagcccacaagttgtctctggccattggtgatcaatttccaaatctaacattatatagaaatactttgggagctctacagtatcttgcccttactagactagatgtagatttcattgtcaataaattaagtcaattcatacatactccaactataacacatttggatgcatgtaaacgattgttaatatgttttaaagttacagctaatgagggtttgttcatacaactaactactagattagatctacaagcatactcgaatgctgattgggtaacttctcttgatgatagaaaatctactggtggttatgcagtatttttaggtggtaatatgatatcttagtttgcaaagaagaaacaagtagttgctcaatcaagcactgaaagtgaatttcgtgctatgactaatgttgttgatgaggtgaattagatatgttatctacttaaaaaaattcttgtctctcttccagtctgccaaattatttggatttggaaatcaaagtgcagcctcacttgcagctaatccatcattttacacacgttctaaacatattgaaatcgatcaacactttattagagatcaactattggccaagacattggaggttcgatatgtaccttctgttgatcaaactgctgatctattcatcaagtgtctctccatggatcattttcactatctcaaagacaagcttaaagtgtgttcctcactattttgcttgagagggaatgataaccagtgtaaagagttagttgaaaacaattagttgcagttagttgtttaggtgaagtcagttagttttgccacttgttttggctgttattttttgttatttctttcttgtttcttcactctgtaactagctctctataaataataatcttcattcaggactttctcaacttttgtaagtcttgtgattgagttcttctcttgagtccttttatatttctatagataagttctcaatttatatatatatttatatatatatatatacaatgagaaagactaactagcattctaaagaactagtaatttatgactcaaaattttattttatatacatgagacctacttattagaaatatattttgagctttgtctcttcgttataatattaaaatcgagtttttcgattttgtcaaactaaattcgataaagatgatttagactagaggtgttcttaaatgctaatgctaatgcaaagacatgtaaaagtatttcatataagttattttttcaatagtattttaactctcttttttgtcaagcttacattaatgatgtttttgttgcaggtgatcagatagttttcttcattctaaatgttatagagtttattgcacttataatgaccttcgtaccttttctagctttggatgatgcaatttaagtgtagtaaaactattttaaccttttgatcacgaacaacttatttatttagaagttctctctcttctttttatagaattttaagtcttttttttaaagaggaatttttagtctttttaatttatttgacattattgtattatgaatgaacttttaactaagtaaacttattattattattattattattattattattattattattattattattattattattattattattattattattatagta

SEQ ID NO: 381124 - DNA, 1432 bp, Cannabis indica
tctctctctctctctctgatgtttcttttattaataaatttatattttgttattttttcagatttagtcactaccaattagggattttctttccagcaatggttgagattattggttactttttagggattttctttcgagcaatggtagggattttcgtttggggatatgctcttacttaaattttagggaaacgctgaaaagtataaaactctgctcaaagattttgggagccagagtacttgattaatagtgaagagtaattacatttagccaataggtactgtacaactgttacaaatcaaatagtacagcaaagggaatatcctaacaataagatcccaatcattatcataaaaggtctaacggtattatgggaaattgatgcaggaccacaagatgatgacaaggcacaatttgggaattgatatgctgctcctggtgtaggaatacactggtgtgacactctcatttcttaacatcgtccctcaaactgaagggagatgttctcacgccaagtttgtcaactaggaagctgaatcgtgagtgtgacagacccttagtgaagcagtcagccacttggtcatgggatggaatgtagtaaacctcaagttcctccttcaacactttgtcgcgaacatagtggacatcaatttcgatatgtttggtgcgtgtgtggaagatgggattggatgctaaagcgctagcactcaaatttttgcaccaggttattgagggaagcagcagcggtactctaggttcctttagcagtgattcgatccaagaaatttcagatgcaacgtgtgcaagtgcacggtactctgactctgtactcgatctagagatgatagcttatttctttgaggaccacgatacaagtgtttctctaaggtatacactgtaccctgcaactgatctgcggtcatcaggacacgatgcccaatcagcatgagaaaaaccactgatgttcagcttgttgcagcagctgatatgaagaccttgcattttggttccttgcaaatatctcaataccctttttacacctctccagtgtgtgcttgtaggagcttgtaaaaattggcttaacttattaaccggataggcaatatttggtcttgtatggcaaagatactgtaaggctcctactgtacttctgtaagccatgggattgtgcattgcctcaccatcattaattgacataggacttcaaagtggtcatgtttgttcttctcaagatgtcttcaatgtatattgtctgtgtaagatagagtcctgtgttgtctcgaaaaacctctattctgagaaaatgatgtaatgggccaaggtccttgagagtgaaaatgcttgttcagattatcaataaaagctcttcataaaagtaatatctatgaacataaaataaagctttggtataatgttaaagctatttcat

SEQ ID NO: 381125 - DNA, 2026 bp, Cannabis indica
agcgtttttggaagaagttatgaatttgttactgaactggcccaaagtcatcgcagtgattccggcgctggtaacgaggcggcggaactggaagggttggtgagtgaagggtatgaattacttgggatttttaactggagtgaccattttcctcttttcgggctattggatattcaaggagtgaaaaagaggtgtaagaaacttgtatctagagtgaatgttttcgttggaaaaatcattgaggagcatagggaaagaaggactcataatattaatgctactcatggaggatcgtgtccgatcaagggttccgatcaatctgaggatgaggatggccgtgattttgttgatgtactcctcgatttagaaaaggaaaatcgactcagtaactcggatatgattgcagtgttatgggtaaatattatattaattattaaataaattaattcatttttacatgtgacttttatttttgggtgatattaatctggatcttcatgtgacttttaaatgatgcgtctggtttgatctgaacatggaaattaatcaatctatacatatatatataaatattatacatatatatatgtatattgatgaagattgcatggtttggttttcttatatatatatactcacacatatacataaaacaaggtacatattcagtacaaatacatacatattggtacgttatcctagttttctaatgtttcccatgcactatatatgatgctaaagtctataaatttgttttaattttatggaatctttttcttctactttttcccaggaaatgatatttagaggaacagacacagtagcaatcctcctggaatggattctagcaagaatgattctccacccagagatccaatcaaaggcacagtctgaaatagatgcggtgattggcggaaatcaccgtcaggtatctgattctgacctcccaaaacttgcttacatccaagccattgtgaaagaaaccctaaggctccatccacctgggcctctcctatcatgggccaggctctccatccacgacactaacataggccaacacttcatcccagctggcaccacagctgttgttaacatgtggagtataacccatgatgaacaggtctggcccgagcccaaccgcttcaaccccgataggtttatgatcaaacaagacctaggtgatgatcgtagtgctgtgttttccataatgggttctgatcttaggttggctcctttcggttctggaagaagggtttgcccaggtaaagccatggggttagccacagttgagctatggctagctcagatgctccaaagcttcaaatgggttcctgctaataatgattctggggttgacttgtctgagactctgaaactttccttggagatgaagaactctttggtttgcaaggtcattcctagggtttactgatatagcatacccctagctcttaagccatgttgtcatgtcatatatattttatgttgtgctagttttatcatttgaaaagttgaaaaaacttgtttcatttccttttgggtttgtatcatcttttatgggaaagggtttcttttgggtgctaatatgaagggaagttattaattttagcaccactgtagtctgcatgtttgggtttttagttacttatctttacttgtattatcgtcagtaaaggctaaacttgtaagagtctgtatggttaatgcttgcattgttctgtgtaattctggttcgtactgtatgtttgaactcaatatgtattaccagtttgtctttaaattctgcctagaattgaattcattatacatgttttctttttaaatttattttcaaactaaccctaattatagtatgtttttctatatagtagtgagcttttcaactgtagatgttcgcaccaatagtagtgctatatgattttatatatagcattgcacttgtaatcatactatctaagaaaatagaaatgttttggatgatatatgtgttataaaataatataaagtagatgagaggaaagaagaa

SEQ ID NO: 381126 - DNA, 2545 bp, Cannabis indica
tctctctctctctctctctaatcctattgttatgttttgttatcttcactcactcactcattctttgttttgttttgttctttctttacaggcgccaccaacaaggtgtgtatgcttcatacacatttggccctcaaggcagacaagtcaaggtatagtgttataataattcattcatagtttgtatataatataatcataaaatgtaactcatttctttgttctctaaaatgtatggatcatcaggttatccttctagatactagataccaccgagaccctctctctagtgatggtactatcttgggggattcacaatggacatggttggaaaaggagctcaacagtacaccttcagctatcaccataataggctcttctattcaggtatctgttaataacactcgagacatgactgtaagagactttgtaagagaagggaagaccttgtaatctgtgattgttgatagtagatttgaaaaggattgccctcttgttttgtgaatgtaacttatattttggtgttgttcttgatattagagtgtgtgtgtgtgtgttctttctttcttgttatgtggttttgctgtagtattaatcattggttccaggttatatcaaatatttcagccaccactggtccattgttttatatggaatcttggggacgtttcccaaaggaaagagagcgcctttttaaagtaatagctgatagtaaggtgatcatcatatccaccctctgaaggaatttgcttaactatataatcataataataatctcattgaatttacactaagtgaccctaaaggtggttctgttccatagaagttattttgcaaataattttgttttttaataaatgtttcttccactatagtgagttttacataaacagtcagctcatttggtgcagagggatggagtcatcttcatcagtggagatgttcattttggagaaatcactagatttgattgtgctgctactggatatccactcaatgacataacctccagtggcctcactcaagctgtggagaacacagtcccatctgtattacatcttttaatcagatttgtggcatggttgactcccactaccatgagagtaatagatagaaactgtagatataaatcatgcacttttggtaagcaaccatctgaattcttgttaactatatcatatgtataatgcattgtataactgcagagcaaagtttcataatgaatgaataaatttgtacttaggccaacccaattttggggcaatcgagatagactgggcaacaactcctgtgacagtgagaagtgaaataagggataggagtggacagcctgtggccagtgttaatatatcattgtcagatttgaagtgggggaagaatatgaatatcaactcttcaaacacactaaagaaatcagcaaacatctcaaggcactgctctcttgaagtgtctctcccatggattgtcagatacagactggctattttattttattccactttagctggtaacctcctcattcaattctctacatacagatgtttataatatgtatatattcttggacatttttgatttattttcggtccaaaactttggttgcagtactggttcttgtttttataggactgtgttgtgtagcaaaattagcgtaccggaaatgtctcaacaagtgcaaacatgattgaggccactttactggaaaatctttgactatggtagcttggttttttcgttgatgtatatatatatatgtgtgtgtgtgtggatgtattttcatgaagcatgaagatgcatgttgttttacagtgacaggacagatgatgcgtagagatgaagctactaatggagatggacattttctgttgtaattgaagaaaacgacatcttcaaacatttttcttatgtataatccagacaagacaagagacattataggcacaataaagtttttgttatgcacatgatatggatatgatccactcatcttttaaaggaacttttaaatcaatgtagcccacatgattgtgtatgtatgcatctgaaaagattggcaatttggaaaaccagaaatgtggttgtctggaagcaaaaatctaccttagcagctaatgtctgttagctagaattagcccttaatcaatggcaaagtgctcagtcaaggaggatgaagtctttgcttgttccttgtggagtgagtaatggacttgagcactggtttaaacatggtatgtataagattaaaacccgcatccaccacgtggatcgaggtggtcgggatactcaaaatgaacgactttattgataagattaaggtgaataagagtgagtaaagttttctattttcattctaaaaaacaacattttttttgtaaaaaatatatattataaatcaatattattttttaaatagtagttatttattttaaaaatatgtgtttatttttagaattataggtatttgttgaaatataaatacaattaatcttttcactaatataggtgccgtttggtaacacatttgttttttaattttttaatcaca

SEQ ID NO: 381127 - DNA, 5320 bp, Cannabis indica
tttttatttttattttgtataaacaggagttgaatatccctgcattatgattcataggacttcccactggcttctccctagtgccagtttatggggtctgcattttggtctcctctactttaatcgattttcggagcttttggttcacaagcctggagaaacattccttctaagcatactggccactttactttcacccttggtaacttaataatcactgccaattgaactaaagcatcccaacaaaataaaaacaatcaactactaacaattctattctgatgtttctgtttttttcattctttttatttttcagagatggggaatctcaaaatttgctgagagctatcttagatggaaacttccattgaaaaagtatggtatggtacctcaaaacagacttttttcaagacatttcctcatgtagagtatctatgactacccgaaaacttcttcaaaaaagtggaacaggaagcattgtcattaagaaatctcaaagcattagcttctgtaaagaaggtttgatcattgatggagaatctcagccattgaaaacagatattgtgattctagctacaggttacagaggtgatctaaagctaaaaaacatgtttagctctccaatcttccaaaaccacattactggatcaccttcttcaatggttcctctctataggtcattactacagatcatgtttagcaaaatactttttcagtcattttgcacagtagcctttattttggtaatatttatggctaattatgattttttgccccttgaactttgacatgtacctaatcatgccccctgaacttttaaggtcattaaaaatatccctaaactattgagattgttagatttaaagacttttctctaatttcagtcaattttactatttcggtgattgtttatgtactaaaccaagcttcccagactttgatatatatcaaatcatacctttcgaactttgaaatgtactaaattatgcccctaaactttcatccatgttaaactttttactaaaattagacaaaagtccttaaatccaacaatctcaatagttcaggggacatttttaacgaccttaaaagttcaaaggatatgatttggtacatgtcaaagttcaggggacaaaatttttaattagccttttgcaaaagtaggcttccataaattcttaacatctttgtctaacatttccaggcaggtaattcatccaagaataccacagctagcaataataggatatgcagaaggcttctccaatttactaacctctcagattagatgtcaatggctagcacattaccttggagagaagtttgaactacctagcataagagagatggagaaagaagtgacaatgtgggaaaataatatgaaattatacaatggaaagtatgttaggagatcttgtattggtactgtaaacatatgatacaatgaccaattgttgaaggatatgagatgtgaaactaaaagaaagaaaggagttttggctgaatattttcagccatatggaccagcagattatgctgacctaccctaatccagtaatattacttgtctgatattttgttgggggaaaacattaggtaaattctcaactcactcatagggatccttgttaaataattgctattctataagaataattggctttaaccctttgattcaataaatttgagtgggtcagattatagataaatggtaatttatgtgagaattatataagtaaggttagtgtaattaagcttatgcttttattttatcaaataaagaaacgttatttgtacatgcactatggtgatgagttgtattaccagaggtatcatatttgatgtgagtctattatgatttgatgcactgtttgtaacagtgtacataacatgttcaattacaaactgtaagaggaattactctccttaaatttttacaggtatcttgttctctatgctgaatgataattaagcatgtttttttttttttaattacactcaccaaaagcaaagctgatcctccaatgccatcaccaagtaaatctagattttaaaatagctgatacgaaaatccaagtatataatttccccaaaataaagaagacatgaaaattccccccaacccacctaatccattcctccaaattgcagaaaaaaaaaaaagaagaagaagaagaagaagaactaagaagagacaagatacagcgtttgtgagtttcaaaggaaagagagaagaaagttttgaaagagaaagagtaaatttacaagaggttatatatacacagcgaataacaactaaccagtgactaattcctaactaacaacctaactgtctagacgaacacagctcaacagtactaacagaattaactaactaaactcccttcacaaccccttcaaactcaatgtggcaagagaaataacactgagtttggacctgaaatcattgaacttggtgctgctgataagcttggtgaagaaatcagcaagttgggcagatgcagggacatgtttaacctgaattttctgttggagaactttgtctagaacaaagtatagatcaattacaatattctttgttcgagcatgcaaaacaaggttggtagccaacaaaactgtgctttggctgtcacaccacacagatggagatgcaggatttcgaatttgaagttcttgcaatagtgattgaatccatacaacttcagttaacagcactggcaaggcttcgaaactcaacctctattgatgatcgaaatatggtaacctatttttgggatttccaagcaatgagattacctccaaagtacacacagtagcatgtagttgattttcgatcatctaagtccgatgctcagtcagcatcacagaacacatccaaggcaaagtcgtgagctagtttaatgtggagaccatagtctagagtacctgcaatgtaccttaatattctcttaactgcaatccaatgagaaagtagaggagtttgcatgtattggcacactttattaacacaataaaaaattcaggtcttgtgatggtggcatattggagtgcccctacaatggacctgtaaagagttgtatctggagcaggttcactaccataattagacaactttaaaccactgttcattggtgtggattgagtgttgacatttttcataccagctttggttaagagatcttggagatattttgtttgtgtgagatggattcctgctgcagttctagtaacctagatccctagaaagtagtacactaatccaagatctttaagagcaaatctagtgttgagttcaatgacaagagaatcaactaaacagtcatcactccccatgataagtatgtcatcaacatagacaagcacatagatacatccggtagagttggctttaatgaataatgatggatctaatttggagaattgaaatccatattcaagaagaatagtagagagttttgcaaaccaggctctaggagcctatttaagaccataaatggccttgttgagtttaaaaactctgtcaggaaattgagggttaacgaacctaggtggatgaaccatatagatttcctcttgaagatcaccattgagaaatgcattattgatgtctagctgattgcccacccttttgtaacagcaatagttaagacaaccctgatggtgatgtgtttgacaactggactaaaagtttcagagaaatcaaagccaacttgttggtgaaaacctttgcaactaatctttcctttagtctactgacactgccatctgcattatacttgattctgtaaacccacttgcatccaatatgaattctgttaggtggtaaaataacaagatcccaggttttgtttctgataagagccttgttttcagtagacatgacattgaaccagtgaggtttttgcaaagcctatttgatagtttttggttcccaaaacactaaataagctttaggctttcaaatacctgcttttaatcgagtggtcataggatgtgttgaaatagcaagagcaacttaagaagctgcaggagcattgttagtggtcaacaggaaaatcaatagtagtgttattaataatagtaggatcattttgttctagaacaatagcagtggtgtcgtacaacagctggtagtttaggtttgacattgacaatctgagcaagagcatgtacaagattggtaatgctggtttgaggggacgtagatggagatggagatggagaaagagtgatattgggagtagggatggggagatgggcattaggtaacacaagtcgaatgccaggactcaaagataaagacatgggactggtgtgttgagataatttaatagtagtagcataaagaaacttaaactcgtcaaacactacatctcttgagatatacagtctcttttcttttgataaacacttgtagcctttatgagacaaagtataaccaagaaaggcacatgctgttgacttgtacaaaattttatttttgttgtaaggtcttagattagggtagcaaagacacccaaacaccttgagctatttgtaatctggtttgacagagaaaagtaactctagtgccttttgatggctgaaccatatagatgtccgatgctatagaaatctacttctaacccaaataaccatcaagaaagcaataaaattcttttcccgccaaacgatccagcatttggttaataaatagcagcgggaaatgatccttctgagtagcattattcagcttttgataatccatgcacaccctccaaccagtcacggttctagtaggaatcaattcattgttctcattagccaccaccatgacttcgcctttcttaggcacacattaaatagggctaacccatgaactatttgaaattgggtacacaataccataatctagccattttattacttcttttcgcaccacttccttcataacaagattcaacattcattgctgctcaatggagttactaaagtcagcttccaagagtatcttgtgcatgcaaattgttgggctaatgccgtttatgtcagccatagtccacccaattgctctcctatgcttttttaacatttctagcaatgaactttcagcttcagcctccaaccatgctgatataatagctggcagcatttcgttctcccccaaataagtgtatttagatgacttggcaagggtttcaactctagctttagtggttcttggatggaaagttttggaggcttgaaattgctttagtgattcaaaagtgcactaaaattcaaagccataataaattaaatggcattccaaagaagttatttacctcttaattaacaaagc

SEQ ID NO: 381128 - DNA, 2675 bp, Cannabis indica
ctttttttgtgtccaaaatagttataatttttataataatacggtatgtattatacttcccgataatttttataatttatactgattatcgctaatagtactttagcatctctcgaattattctttgagttatttactttttcttccatcattggattttttttctattatattgagcagtactttgataataaagtaatttacacgaactaataggactatatttaatatgtattgatacgaacacatatcatattcaaagattacacactttaaaataaataactagattttaaaataagtatacatttactacataatatttaagaacttaattaaaaaaaaaagttacatataggttaatgagcgagggatgcatcatgcataccagtcccaaaaccgttaactattttaatttttattcctgccctctattcacacatatttcctcttagggtcggatataaattatattggtgtcgaaagaatttagataatactaaaatatgcgattatttaaaagttattcaaatcctaaaaataaacatgaatataatgtataatatatatttatacatataaacacacaaaaaatataacagtttaattgacctgtctattccactcttgaaagagatgcatgtaatattttatttttttattcagattagcccaaccccggaaggcacctacttatagagagtaggcgatagttacaaattgtggtcactatgagatcattgtaaataatatttataataataataataataataataggtatttaattgtactaattattaatgatacttgaatgtttgaccgttatctttgttgattggtatgtgttcacacttttttagtttacactacagttttactaaatatgcgaggtgtcttccatgatacagcgatattttttttttagctaatattgcgaggtccttccaatactgcaagttctcttagtgtaggcattcttgaatgctttgatcacggccgtttcacatttacccctatggtatactagatgggccgttttgattcaagacataaatgttttcttttagaattcttcgatctattccttttttagcgtgagaacgataaccaaataagtcttgatactattttttttttgtctctaatccttgcgtttgccatcgtacatggcagcactatatccacattcctcttgtcgatgtccttgcggttgtatggaatggatttgtaatattcatttatgcaaaattttgtggtcccttaatcgcgaggttcgcgactctgatggaacaccggagtgcgagatgtcttatagttttgtgcatgcatgcatcttggttttgcgtttgtttttctcggtatcgtctaccctttactcaattttgtatcttgaaaaactacactcccttgttaatgtcgatggcttcgtgaacggtttgactgggtcacataaatatgattgtatatatggcttacaacgttgttgtcattgctatcgaaaccacaatttgcttcatctccgtcatttggctttgtctatgcttattggttatacgacatacatccagaactcaccgtacatagtatactggacatccatttatctcactgtgtatgttcttcatcagttcgagattttcttattcccagatcatcattttttgaatattcagtatatatttaggggacttcttatatgacttttgagattcttcaaggttgaactctttgtgatgtttgagactgtatggtaaattttcttttattttgccattgtttctgcccttggtattgtcacaagaattgaaataacacattttcttatcgtcgtttatgacctcattgaaggaagttgaaatttgagatattttgatgcccgagcaactccaagattctagcgtcctcgagatttaggtgactccaaagtttgaggtagcagtaagagtcgctccttcttcgctgaatatattgtatatactttcgattttcatctcgctaaagttggaatttttttaggcattgggctgatgaaattgctctactgatgtaaattttcttatttctttgaacaattatattgataagctcgaacatagatttgtattgatttttattgatcttttaataaactagggctcgaaaatttctcatatatttatctttatttgtgtatgataaaaatataggttgattcaatgtatctgtttggttcgccaccataattgtcctccaaaaattatagaaatattactgaaataccctctttctagctgaaaatgttatcgaatgtatttagacaacaccaaaatatgtgagtattcaaaagttatttgaataataaacatgcgagtactcacttaaaatagcgagttctcacaatagttcagcagagcttggcctacctatttcattattgaaagagaactcatactacgtcactttattcaaatcaagtcagcccctgtgacagtcagtagtcccgtgatccttaaataaaaataccgggtaagctgtgcaatcccgcattagttgggaaatgtcaagtatgatgatttcgaggctgtgtacgtaggtatgggactacacaattgaagagggcataaattgattgaattgtactacctatatcaacaaggtgcatcttatttttgatagcccatcttgaaagaact

SEQ ID NO: 381129 - DNA, 4390 bp, Cannabis indica
agttatggttgagattgggcgaaatagatgcatgaaaatcatgagctatgtaacatattaaataggagagagatttactgccgtcaatgacaatgggacaaatgcctgtgcagatcttaattttggccgatgagtctgtggaagattcagcaattcaagcggattctagatctcttgccacattactgttgattcgtgatattcaggtacttgtttggttattcttatttgttaactattaactgctacaatattgatctccatccttgaatttcaaatgctttttggttttacaggccaagcgactgcccatggtgacacatgttcaaaatggaagtttctctccgggctcttggattggtgaaatgcagcaggcttccgacaagtcagttataataagtgagattttggatccgaggaccaaaaatctgttagccatgtcaaaaatcagtgattatgtgctgtcaaacgagcttgtcagcatggcattagccatggttgctgaggatcgacaaataaatgatgtattggaagagctctttgcagaggaggtaatctttcctttcataacttggggcacaaaattacttgtaccctctgaaaattatccacatgaaaattttatgttgtcccatgtaacatgaaagacactcataagttaaggaacaaaacaatattacttggagattatccatggtgtcctttttctgttagaactttttgtattttgtaaagttattagtttttcctttccagggaaatgagttacaaataaggcaagcagatctctatctcttcgaaggtgaggaattaagtttttatgaaataatcataagagctcgacagaggagggagattgtgataggttaccggttagctgatgccgagagagctattatcaatcctccatcaaaaagcatcagacgaaggtggtcagtgaaggatgttttcgtggtaattgcagagaaggaatgaagtcatttttgcgtgactttgtaatctctctgcattcttttaatatgttattattagtgtaggaatatgtcacatctatatgtatatattgtaaaaattccattggcaataaaatcaaaatggttacttctaggatcccaacatatttattgggcgtatgaacatgaaattggattggatggggtgattattaatgaaagatgtacaaaagtcaattgaactatttgaataatcacggcggcttattgtaacagttgtgtttttacacaaaaaggtaatttctgaataatcacggcggcttattgtacggtaatgtggcctagtttcaattctttaattctcaaatcagaatcttatacttgcttgctgcacagatatctcaaagctttttctatgcttccgagagatctaccttctcgctccccagcattgtggagcgagaccttctgcatcagatggtttaaattcatgctttgcagcagcctgaagaacccggttttgaacagctgagaacgatggagatggtggtagtccaatagcctgcaaacaccatcatatgtttattacatcattatctgttttctccataacagggaataagataaacatgaaaacagtgtaaaacatcatatggagaagttttttacttcacatctcgtctgaaatcttcagcaccctcataagaagcaacccgtcgataaatggtctggtggaatgaaaaaatgcacaaaggttaaatatcgaaatcgaaagtaagtagaagtagaaagggactagggcagtatatagtgtacctgaacgatgccaaggacgccaatgaattgtagcgtcttttcccactctgtaacaaatgttataccattcttaaaaacctcacatagatagatcctcaaaacttgaattgaatagttatgagatcatgtatacacacctaatagaccatacaatgctgcagccaaaccctgcagatgtctcttatgttagcagaaagtaagattattgcagcgaaaaccaaaataacgaaatgtatcttaccacaccatatccaagagcttgtacaagagacggattaatatcctctaaaattgcctcggcttcctagaatataacagatttcgtgtgatcatacagcgataaaaaccgagcgccaaatgtacaacaaactacacaaagtaaataccttgagtatggtaagtgttgactcagacttgagttccttaaaccgaagaccttgtttcacccaaaactggaaccccccttgaattaagtaaggttgctgccaatgtatgataccacaatataaaaattagtactttcatgttgtttcctgcaattgcagatgtggttctattaaaaaagaaatgatccttttaagttaagtcatattatcactttgtgggcaatttgaattgaaacttttaactagcgcaaggagaagtattcaatatcaccttaaattcaagttaggaacacaaaccttaatcccaagttttctcaaggatcttgcaaacttagtttcaattagtttgatgtttgattgttgtttctcgtaatcccttttcactttgagttaaattttcaatgaaagtggtaactatataatcttgttatatgattaaatcagtcaatgctgactaataaaaatataataataattataagaagacaaagtattccaaacaacaacaacaataataattaataagacaggaatctttcatttcagcaaaacacaacacacaaaatcatcccattcagttcagaaactcaataataagaaataaaagctctaaaaatcttaaaaaactgaaaaagacttgacaaaagtaaataaacaaaaatgaagccttttgttatcttgtgattctgattacaaatgtagctgcttccgccgcttcataccaccttctgttctctctgtacaaaaacaataattatttgcttttaattatgagacagctgataattgaacatcaaccatgctacaagctaaaatagatccaatttgacataatgaactcggttaaaaatgaaacaagggctgctactcatatactaaaactatgatatcttactcaaatttaaagacttcgaaaattcctcttacaaaatcctacttcacaaatcaaatcaatttgactgtgaaagaaagagctaagaccttgaagaatcagctaacaaaatctaaaatgagaaatcaaatcaagttgactgcgaaagaaagagctaaggctgaagaatcagctaaaaaaatctaaaaataaggaatcaaatacagctatcaatgaaagaaagacttacttcaatcaaagttaacagatccataccaaaatcaaacatgatgaattgaatcaatttaacaatgaaaggaaggctcctaattcaaacaagtttaagatttggagaatccactaacacgactccaacatcaggaatcaccttatgtgtgattttgtatacacattatattatatctttgctaacacagttctatgtatttgcttgtatacccgatatgcacaacaatgctaggttacaaagcatcatcaccaaccatcaaaataagcaaaaaaaacctaaagacacgtgtgctgaacgattactagtgtacttccttacaaatctacatagccaaaaccaatatcaacacattgtttatataaagcataaatcagtgtaagtgacatcaacacagaacttgtaacatgagtcgatcaaaataaagtagacaactaaaaatagtatttgtgacagaaaaaactacctaaccacatcaagcttcagcttcaattggcttatcttcaacatcaactgcagcatcagttgcagcctcaacatcagcattttccgcaagaggctgtacttgctcgtcctcgggcagtggctcttcaacgtaatcattctcaaaagcatcagacggcacttcataaattctaacttgaggtttagaaggatccttcacgagaacatacttgccctctttcaacttcatacacaagtccacaatagatttcacaatgccccacatgtttgaagtgttgagattgatctgagttgcaaactcttttggtttgtatccaacaacagccaaaatcacatgattgaaatggtcacgaggatgcaccctcgaaacatatcccaacttcatcaaatctgcactggccagaagggcttgtgcagtccatttagccaacttgttagcgttgttcttaagctcagtagccaaaaccgcacccctctgactctccaacttctgcctccaatcaccagagtacttgtgatcgaattcattaagagcattcaaggtgaggaaagatctctgcttgttgacctcaacaacactctgaacctcacatctagcaataagatgcatgttctcatcaagcttccatcttctgtatctgtaagccaccga

SEQ ID NO: 381130 - DNA, 1198 bp, Cannabis indica
aaaaaaaaaaaaaaacctcttccgacagttgggtctatggactagaattttgatatcattttttagttaaatctttttcaattagctacttaacttgtgtattatggtttctatacagaaatacatggctgacatagaagccaaagcgagcgagaatgtgatcaaggcatgcgcaagaacaccatcagtgaagaaatttgtgttcacatcttcacttttgacttgtctatggcgagacaggagcactcaacaagaaaattctcccgtaataaaccacgatagctggagtagtgaatcgctatgtagagacaaaaggtaagcttcctagttcctatcttgatcatggtgcatggatgtaacaaactaacattaataaaccttaatttaattaataaaaaaacaaaaaggggaaatttttcttaaaattacggaatgtcattttaatatatattttgatttgactttcaaaaatcagctctggtatgcactgggaaagctacgggctgagaaggcaacgtggaaaatagcagagcaaagtgggttaaaaatggcatccatttgcccaggtctcattactggacctgaatttaacaatatcaatgcaacagccacaacggcttatcttaaaggtaaacaatttttgagccccaagttccaacttcataattaaacaattctttttgggtgtctaatgtttaaaaattacaggagctcaagagatgtacgaaaatggggtgttggcaagtgtggatgtaaacagattggcagaggcacaggtgtgtgtttatgaggcaatgaggaagggaagaggtggtagatatatctgttttgatgaagttattaaggaggaagaaatggccgagaagttggctaaggaaattaatgtatcaaagtcaaaaatatgtggaacagaagatagatctaccaatgctctacctcgatttcaattgtcaaaaaagaaacttacaaatcttatgaatactcaacaacgaccttgttacacccaaagtcaagaacagttgtgatcattattaggtaattagcttaactaatttaagagttttgtgttgaaaacagacgcaaaattgtaagggcgatatggttggaaaatgttctcaaatagattaagaaaatgtttttattttttattttttattttttattatatatatatgtatactaaaatagccaattatat

SEQ ID NO: 381131 - DNA, 3630 bp, Cannabis indica
gcgtctcctgattctagatttgcaatgtatgtgtaggtccccttcttgctttgagttaagctggcctatgaagagagagtcacgattctttttggagcctaagaaaaaggattagggtttgttattctttgccaaattgctcgaaatttcctttattctatgtttgtaatttatgacttggtgagatgtaccactgtttgacttttagaatctattatttggataaaaacttattgatgtaaatgtagcatattggggggattaggtaattgaaagaaggacaacttcccagtcttctaacttttattaataagattttggtttttttttttaaagtaacaggaaaaatttatgactgttcttacagctaaaaaaactgctgtaatgttagtttttgtttggagtgttctgtttatttctcttttttttttatcgtgaatatcttgttctcgttttgtattcttcctttttttttttcttaagagaattttatctttcattagaaaagaaaggagttttgctgtcagggttagcatattggattttttatatttagggttgtgagatcctcatttcagtcaagaaagtattattctcagtccctagatcaaggtgtgctttcctcagtggaaagtagtttgatatctcaactctcaaattcaaatattttcaacttataaagtttcatgctcaagtttgtcatctagattaatagtggcagctattgagaatgctacaaatgctttctttgatttaaatcttttgttcttacaactgaggaagttggggatccttctgtctttagtctccttcaatcaagtttcactgtttattttttatgcacacttttacttgcactttctgtttttaaattctttcttttgcttgatagactggaaaaagctcttttgttgagcatcggacctttcttcatctgtatcgaagttttcatcgtttgtggatctttctggccttgatgttccaggttaaatactgtctgcctgtgcattgttatctcaatgaagttcaccttttttcttaaatttgataatattggtttcactgttgtgcatatgtgcgcctttagactttagcaattatagctttcaatgatgggcgcttgaatatggatacttttaagagtgtacttagcatcggaccaacatttgcaattatgaactttgttgaaagtaagttttttctgtctttcatatgatttttaaacttttagtcagaacaacattaccagtatccaccccttctgtttataatgtattctttgctgttggcataggttgtttggatgtcatactcatgtttggggcctacacatcggcaagaggcatggctatctcaagactagtaattaggtttttctggtttggcctgtgctcagcatttgtgacatatgtttatttgtaagcattttcttaactattttttttttttcgaaaaagaaaatgtgagcaagaacataaagttcttttcttctgattatgatttgaataatggtttaacaaatttcaggaaggttttggaggaaagacatagccgcaactctaacaattcaatttacttcagaatatatattcttgtattgggtgtgtatgctggattacgcgtagtccttggactcttgctaaaatttccagcatgccactcattgtctgcaatgtctgatcagtcattcttccaattttttaaatggatttatcaggtatttcctttttgtaactttttagagtaactgaagatttaggattgaagtgattcctgattctattgatcttttttcccattctctttctggataattcaggagcgttactatgttggacgtggtctttatgaaagtctgagtgattactgcaggtttgttattgtgctcatgggaatgataatttttaatgttgttgctttttagttggtttctttgtcctactattttgatatctcttttgaaccttattgctatcttataaagattatttggaagaaggcccacataggcaaaacaaaaaactaggatactgcttaactgtattgatattcatatgcacgatagagataggtcagcaagtgggggttttgattcttaatgagggtccttataaatatgcttggctttttgcctcccaaagattgttgagcttagtccgattctgatgaccaagtttcaatgtaacatttttttaattagttattctttatataattaacattttaataccccgccctttatccagaactgaggagtttttttttgcttgctttgccgctttctattattctctaaatctatcagtggcagaatgttttctgtcatattggattgtatatggttccaatttcccttttttaagaatataaggtagtccttcccttttagagctatttagatcatctgggggtatataagttctctttgatagtagttcattccacgtataccttagtgcttaactttggaattctggagtacgttctggtatcctactctagggacattattgtatctgctggtgtcttcactttatttttgatgtctttaagctcaaacttgcatctctccatccttatagaaaaaggtctataaacaacttggatttcatctgtattgtgctttgaaatatgcttttatctgctggaagtatggctcaaacaactaattttaacattttttcatatacttattttcattggacgttgatttataattagtgtacttgcaggctttttttatagtgtaaacctgaaaaggataatgggattgctagtccttattgtactgtgaatgagctccttatatttttgacaggatttatatttttttacattatgttatttaattaatttatttctaattgatttaggtatgtgctcttttggttggtggtcttcacatgcaaattttgttttgcatactttctccaggcaagctattttgtttattattctgtcttcactggattaagaggcgtatttttgtgactacatgttgtcttttaagatgtactaattggcttaaatactgaatctgaagctactttatcatggacctcattgcagattcagccacttgtcagtcctaccaatacaattgctgggcttcgaaatttagattactcatggcatgatttggtgtctaagggtaatttatcattatatttatgatcttgtttcttagataaaatttatattgttagtctctggtcatgtttagcatgttaagtgtggatatatgatgcattgaatgtgtagtagttatgcaatggtactctcttatgactgtgcattataaacaaggaccgaaactgtgcaattccaaattgaattagtttaaatcatcgatatcgcactaaaacccctcgaataggtcaacaattcccttggtgtgcactaacaaagtctctttgagaagtttaaaccttattttcgtcaaaatcacaattattgcgtttcactacaacttttggttagtagaaataaatgtaagttttgtaggataaatactctgtttggtttttacgttttactactgatggttgtcgtctttagttcaggagtggttttctaaggggttgtagttctatcttctatctagagtactttgtctttcttaggctaagc

SEQ ID NO: 381132 - DNA, 3358 bp, Cannabis indica
aaaaattatattactgtacgcacatatattactagccatcacacctcttgtacaccatgtccgtcggttgctagacatccaaagtctcatggcctctaatttgatggtgggagaagaggagagggaagctagagaatggattccaaatcgatgaagatcgcaggcgaaggagcagagcagtggtacgagcagtttaagtagtaggatcggagtatgaatcgagtactccattagaggcgactaataccatatagaagcttgactagagcaagtttagaaagatggtaagaaccagagaaagcaagaggaagaaaagagaaagacttgacagaaagcttatctctcattaatacaagattctttatttataagcatataaattaatacaagtagacaatgcaagagctaaagagaattttgccaaaacagacaaaactgtaaagaaaacaattaactaataacttctaaccaattagtatgtgcccacaagagatatagctctgataccatattgagaatcatggggtttcatctcaaaactaattagtaaaatcaattggtgataagtggagtagcccatattcttacatatgactaaatatatttattttatgtgggacaatgtttataatattaactaactaaactaactgaatcttatgttagctaacatggcttgacattatggatgcttgtttaaagctcatgatactgccacattcaagcttcatttttggccaactttgatagtgaaacaaaaagtttgttttagctttttttttaatagttgagctcaagttgtcgagttgtcaaggtgtcgaggagaataaaattaagctgcccaaggtatctcaattcttctctttattttcatgtcttctaacttatcttttattattattattattaattttttctaattaataattatgtaatttaacatatttttgtaagaaaaaatttgtagtgaatttttaaaaagagtatttatgagtatttatccttatcatacttttcaaatttctcttataaattacatctatattttaagatttctcatagttggaaatgtgtattgacatggccagcatggcatagagcatctgatatcagaattacatattgcaaatgagaaagaattcaatagaaacataatttattcaaataaaatttggaaacagaaagtaagttagatgagtatcatgtaattttaggaaaaaaaaaattgaagaactttatattataatgaagacattatagacaattaatttttttttttcaggttatagacataaaaacttgtatatgtattcgatttttggtttctttctgaataattataacgttccatttgtcattgcaaagaacatacaaatatgatattaataattgtactttacatagcttaattcttgtttctatgacctccattaattaatatagtaatattaagtatctttataatgagcatttaaagaactagctaatctttaaaattattgtttggtaaactcccaaccttttattttatattgattgagttgtaaatataaaataactattcttacgtagcaaaaaaaataaaaataaaaataatttaacataaaattcaaacaacaattagcattattcacaaattttataacctttcaagaacaagagtcatcaaattgtaatgaccaacctaaaatgaaaaggttgacagtcattttctttgcaattaagccaaaagaaaaaaatgttgacacataaattgaatttatatatgcaaaaaaatttctaacttttagatttagacactacttaaaggagagtacaagttatgaaaatgaaaccatataataatgacaaacataaataggtattgttgtgtggtacttttatttttgttaagcttagaattttgcatgattcaaaattgtggttgttttgttgaagcaagagtcaaagtccaagtagtgaatcgaatggacgacaagtcaagcataattgaacttcattgccaatcgaaagacgacgatcttgggagtgtcgttttgaaagttgggaatgaaacagaatggagtttttctgttaattttttgggcacaactctattctattgtgatgtgaaatggagtaacagtagtagtcggtactctttcgatgcatacgacgcagttagagactatactaggtgtcgaactcaatgtcgttggatcatatctggccaaggctctttgtatggctatgatcaacatcatgatatttgggttcaatttcccttatggaagatatgaataatatgatttgagcattttgctacacatcttgatacatatatttattgaaacgtaaatttataaataatagttatatcatgtcatgttatttatgataaaatattataatagattttcatgagatgtatcatttttcatatgatttttatttttgtcatcacaaatactcaaatggcttaacaaatttgttacaatacttttatttagttttacccaaaatatatgttaaaactcaatggattgacagagaaaaaaaggacaaaaaagaaatttttagtgatacttagtaataccttgtagaaattttttattcatttattattattattattttgaaaaaaaaaaacaatttttactttcaggtatgagatcagggacaaaattatgtaggatattgggatgctatggctcccatatattttttgagaatgcttttaatacacataatttatataaattaaattaagttcattatttttttttattgagaatattaattgatctttgtgttagaaatttataaaaaaccatgaaattaagtgattacgctcaaacttgtcttcacaaagcgatctttgtagtgtagtatgagcggtcgtgtccacataaagatatcttaatcaaaaagtgattagtggaattttaagcattataagtaaataagtcaatggatttttgaaaaaaaatattaatagtaaatttaaagcaaataaaattggtagaaaattataataacaaaaatgataaggtttcaagaatcacctatatgtttggctcatttatttgggttttgattcacacatataacacaattaaattattcacttcccaataatttaatcgaaagataaaacttgaagaacatataataaaaaatatgtatttgagtaataaaattctcacattaagattgaaaaattggatgaactgtacggatggcatgccatgcatgcacatccgcgcgcgttctagggggaatggccgagctcacacggcgcagggaggctgcatgcagccattccgcgcgcgtgtgatgaggtccatcatcccgatttttccaattttcaaaattcata

SEQ ID NO: 381133 - DNA, 1413 bp, Cannabis indica
gaccccaaaccttgacccggaccttgaccttgacccagactcggaccccgatccctaccccgacttggaccttggactcagaccaaggcctggcctaagaccttagacccaaactcggaccccaaccacgaacccagtcccggacccaagcctggactcagacccgacccctacgccccggactccagactcgaatccaaactacaaatactagactcgaacttggtcccagcccgaatcggatccagtcccagctctagactcatatccggttcgaacccaaactcaaatccagacccgaactcagatctggccccatacccatcttaaataaaattaacaaatgaaaattaaaataaaatttacaggaaataatttttatttttatttttaaaattaaaaaatataaacaaaattttaaaaatcaaatatttacttatatttttatgattaaaaaatgtaaaatagaaatgttacgaaagtccaccaaacaattttcagcgtaagaaataagttcgtaacatttagataacaaaataatgataatagtactatagtagggtgtggttctattcataccaaaattgataaaataatagaagacaaactacttgagattcgttgtccattctggttgacttgggcatttgtcaaaaaagtcataagattattatttatacttagtagctattggagtgtgcacgtctatgtaggctgaagagaatacaaaaccatgtatttcagggctcttattaggagagaagatgatcattacaacaacaacaacaataataataataataataagttgatcattcatgcacgaaaagtacagatattaaacttgaatacaatggtcgacttgataaacgcataaccagagtgagggaaagttaaatttaagccaataaaataacggtagccattaataaactctttaaattaatacttgttagaaattaacacagcattcctaagcacaagatcaaactaatcactctagaaacagattttgtatttttctttgttgagaaaactgatatattataggcggactatattatttgttataatataatatacattaaaataattaaatgtgacatattatatattaactaggcaactaattcgcttcgcgcagttataatatttttaagttgctaattatttaaatcaatgagtgatagaatctaaattatagcatacaattatgaattaacaatactttttaatggttggatctttttagacataaagtttgtttattctattaaggttgtatactgatttggtacgatatgttttatctaaatacaattttagtaccttataatattttataataatcaatacttgtcctgtattttaaaaccatgcaaaatattcagtactctaaacacagatttgatt

SEQ ID NO: 381134 - DNA, 4719 bp, Cannabis indica
aattaaactactatgacttgaaaatgacttgcctttcaaagtagaataaaactaataacttacaagtttgctatgtttatcgtcgatagctcgactcgatctcgtctttcttccatatacactaggtcaacgagatgaattacaacagcttgttcttcaaccgttgactcataatatgactttaattattgaccatttactttgaaagtctttccaatacttagactcacgacttctaccacaccatgagaaaaaacttttgtgaccacaaatggacctatccatcgcgactttaactttcctagaaagattttgagccgagaatgatacatcaacaccttctaaccttctataaaattcttttgatgaatgttcttgtcatgaaaagccttggtcttctctttgtgaattccaactcatgcaacttaagcattatgtgttgtccagccacaatcatgcccatgttacatttttttacagcccaccaagccttgtgttctatcttaactggtagatgacatggttttccatataccaatcaatataatgacttacgaataggtgtcttgtatgcagtacgataggctcacaaagcttcatcaagccttgtactctagtctttttggtttggattcacagtcttctcaagaataagtttgacttcccggttagagacttctgcttgtcctttagcttgagggtggtaagctacaatcatcttgtgagtcacactttaacgagtttgaaaaaaggattggacattcacctaaaatgaattttttgggtttgagaacttttcacctaaaattttgaagaatggctaaaagtgcaaagtgatttctttgagtcgtatttatagtaaatctgatgattcacgtatctctaatccaagggctcagattgaatttgaaaaagcacaaatcccattaatccaatagtacgggaatatgaaagggtatcattaatgcactcatcgaattcaagaaacccttataaatgatgacattcatctcgatcagagtgctaacatgaatcaaccgccagtatggtacccaatgtgacacataccctaattggccatgtagctcacacgcgctaatggttacctgacatgtggggaacaccaacaaaatacaaaaggtctagggtattcccaaaataccccaagcagaatagcaagaggactgttcagttcatggtcttgggttgtgtctcaaatctgaaggaaggtggcctgtaactcctgagccacaaggttgggggtaaatgttgttcgtgattctagatagatgacatttaggtcctaacaaaggcccgttacggatacgaagcccattccctggcccaaagcggattacttactcaacccatctattgagaacgagcaaaaccagactggcggtccgattccctgatcacttccaagtgatgaatccagacaataattcttgaatattaattttgtacttagtaggaaattaatgtgaactctagaaggataccctcagggatcattcgagaacggaatatgaaaaggcgttcgggatcacttggtgtctcaggggttgctcacataacacctctttgacacgatcctgagaaatctaatagcttatcccttctattaggtcttgggaagacataaaacaaaaaggaaaccacctttttgggcggacaatcactattttgatatttcttccttgcaacgacggcttacgcctcacatcactgccaacagtacgaccgtgtacaaaagacaactcaatccaatttggtcctcacctacacggcccaacaactcaaattatattaataaaaaaattgtattttactccatcagtgagatttttacactcaaataaccctaatgggtcaaaatcagtccggtccatcaaggatatacgcctataaatatgacattattactccatataaagacttgaaatttctagagttcaaaactaaaaaatatattgtaaactccatagtcaagagctcaataacagtgacttgtggactaaggatcattaacaccccaaccagcttgtctcattttattttaatatttctttatttaggttaatctttcttataatgggtctccagaaaacctcagtaaacagtaaggattcagtacctaacacctcaacatatttcatccacagcaaaaatatcgtattagacacaacagaatataaattgtatagttgagtagacttaattggccagttctcaatataacaccctgggttagctagagcctgaaagaaaattgtttttgatgtgttgtgtcaacacttaacaatatatgttgcttgaatttctagattacccttttctttattccatgaaaaccttgtgtaattttgtaatcaagaggtttgcttccacaagatctgagattcaagtcttccatcttttatagattttttggttagttccatgttttttgctttgacataaacaacaaaggagctaatcattgtgtaagtgtaaatcttgataggaatttgaacatcttctaagatgttcaatttgttgcatatttacatgaaattcagaaatacatttctgaccatctacgggcctctaagtttcttgtctctttagcatttcatcaacttttaaccttcctaaactctgttttgcttgggatgcttgacaatcaccactggacaattgacattcttggcacagtggtcactcacactaccaagaagagtcctgcaaataaatacgagaagagattttcagaaaatcaaactttgtaaaactcataactgagagagtaattaattggcaaccttttgaagaaaccatagccatgacttcccatgactaaagtgtcagctctaagtttctcaacagtatgcaaatcacatctttggcgtctccggtcccgactttcttctcaacattcatctgaaagaaaaggctgcaagtaactatctaactctctatgttctgaactgaaaacaaagtgcttgaagagaagagaaaaaggcttactttgaccccagagtgttggtagactgcttcagctctttccattactgaatgcaccaattctttggcgtacttctccatcgctccaatggcatcagtggaaaacaagtaccctacaaaaacatagtacactctagatctatttagtatctgcagaaccatcaataatattttgctttgttttagcaatagtaccaagaattgggattgttacaaacctgcagcatctaaagaagagtaggccgaaggaggaggtttgacatagagaaggatgagagtggtgttggtgttttggtcatttttagaagagaaattgttgagacaccatgatagtgcatacatgctctcttcactctcatccacagcaaccacaattttggtttctctccccatcatcttcacttccatagccattatctaaagagaattttcttggccttaagatattgataacaaacaaagatttaaagggtatccaaatttatagaaaaggtagcagttggttttggccgttgtttataatagaacactaaataccattagcttagttatcaagtttagctcatattattaattgtgaaagtaactcattgaccaatggaaattggacaagttgccgagtagtgagataataatagagcttgagctatcttctattgttatgtacatcttgtagtcgtagtcaaaagtctataagcagccaagccaaaaaatttaataaataaattattcaaagctgccatcatgagtgagactcatccattgtatggggaagattattatattaatggtattgctattcttattagacattttaattgttcaacatcataagagtttatgatgacgttttaagagtatttaataattatttattaaataaaatatatggaatttaatattaaattcaaccatagatattgggaaccttgggttcatttaacatttcacttatgaggatatttaatgaagtgctaaaaaaaatagtatgaagtgctaaaaaaaatagtgtattattatattttagcacaatttaaaaaaaattattactctaaataatgttctaaaaagtgtgttaaatttcacacatgttaaaattcgtgccaaatttaacacaagatataacattgtgctaaatttagtctgcaataaatattacttttatatttactataataccattaattattatgatttatcgaattttacttaactttacattttttattgagatattgacggcaaaactatctaaactatacatcatgtaatacataatcccacaaactaaatttttaaggataaaaccttccaaacttcacttctgttatggtcattatccttccgttacatttttacagttaagtactgaagtggtttttctatgtgtacacacttctacatgtgtgtgtgatattttgattgatccacgtaattttaataattataaaaattaattaaaaattttaaaataataaaaaaatatttttttctttttctctttctttttctctatagagcccgatgatagcctcatctcaccttgccaccattatcactagagaaatgctgacggacacccatggtgcctagcacctttataaggtgtaatatcattattggtacaatttaatattaggtctcacttattattattaataaaaattatagagaaccgctaactaattaaaagatgtcatgtcatagaggtgc

SEQ ID NO: 381135 - DNA, 3843 bp, Cannabis indica
ttaatgaaaaacttgtgtactaaatgatatgttttagtcacaaattgatttttttatgtgactaaaaatcgtaaaaaatttatattgtgattaaaaaatatcactaaaagtaacaagttttttatagtgtatatataataatactagcttgttagcttgtcatatgttgtacagttaattataggttgatatatatgattaaattataaattaatatatgaaaagaagaaacaacagagagatacattacatattaatacatataacctcaatacaaagatatttattacaataacagaaaaaaattgtacatttgtttaaacaaaaagagattagatctgccattttgtttcgatcaatctgaattaatacaaggaatacttaaaaattggaaaaaaaattcttacaagaaatcaaattaacaatatagagagaaagaaaacaaacgatattaattagtttcaatttattaattaattaacaaataaaaatataaataattgaagcagaaccaaatcaataagatgagagagcgatgatcagaaggtgtaaaataaatttcatactcttcacaataagaaccaacttaaataatggatatgagatttattagaatgtaatgttaaccaatgcctgctgcgagcatatatatggttttaattatttattatgtggggactggaaacatctgatcacgacgccgttttgtttgtttctccttgatctccatctctatcaatgtgcgtatcactatattggaagcctttcttaccacatcagccaagttcctacaaatggattaatttatattatttgtaagaatatataagttattatatataatgtaaataaggaattaattaataataattttaccctttggaggaatcaaatgtgagaccaacggtgtttttagcctgttcaatagcccaagcaaatctggtgaggtcctcctgggaatattggttgttgtctagggagacgtgaagctgagatggcttgacatcgcagaagatgggaatgaccttcttctttgtctgggcgaaaagagccagctcgtgtaggcaaaagtaagagtcgcagtaacgaggggagaacactgcaacccccaccttgcaacccatgatagcactatcgattttgtcaaacagtttatcacctggtttcattgtcttgttgtctaaaaaagaggaatgttcagccatgacaactggtcgtaaagcaaagtagctatgcttctcttcgtgtcaactcccctgtggtttatgaaaacttcacactttggcttcataactctcttagctaacctctcaagggctcgtgcttttacaacactactattcattcttttcaaatataaaagataattaattctctcttgatctgtatgtattaattatgtcttttgtttttattgtgtttttctttttaatttctaaaactacctctatttaacggactatatatagatagagaaaagaggtcttcattgtttattctccgttgcttcttgtgtactcaaataaagaattaaacattatagtcttgcattgtcttttttttaacattggaagaatgtttgaatttcaatggaacccttttttttattattatattttatttctcgtttcaaagtttttgaagagagactaaaaggctacaaggcaaaattaattgtcgggtactaattgtacgtgtttgatgtgacatctatacttagaatttcattaataaaataagagaaatgttgcacattcatcaatctctatcaattaatttattaatatactagtggtgctggcattatcatatagtttaatattaagttatatataatttaatataataatttttagccattaaaatctattagcaatgctaaaaaaaataagcattattatttaacaccttaaatatcaaacaccaaaattgatgtggaacctataagtgactagtgattttttatattattcaaaaaaaaaaaatagaaatatactcatttagtatactatatttagtcgacaagcatatttgtacgatgtgttttcaataacacttatttgatatattatattttaaaattatgcgtatttagtattctaaagtaaaatttaatcaattaactaaagagtacatcaattatatatctaatcaaataacaaaatttgaattcaaaattcataaaattttaaacaacttaattgtattgataaacaaatttaaatttaaggtatagatatgtatgattttaaaatacaatatattaaatattattaaaaataaatagtagaaaacttgtatttagataaaatatagggtaggaaataaatagacacaaatgaaaatatgtggataataaaatgcacaaaaaacaatatctcaactcttgtggtgattaggagcttaaggtgccctagcatattcctaaaaaagaaaaaaatagaagctatttgacccgttcttagatgagtgcacaagtacggagagaaaacccttcaaacacgttggtcttatatatgtcctctctctctctctatggtttgctttcactttcccttggcttatcaaaatataattataattcaataaactatcatgtcaataataaaatgatcaatttaccaacaaatctagctctcttgtcgcctgcaatgctcttaaccagtacaaataactttcttcatcacaattttaatctgaagacctgttctttttaaaaaaaaaaaaacacatttttaatattttatattaactaaataataattaataaaatgctttaaaagaatctgaaagttaatagggatggaaatatcacatttaatattatttgtgttatagccaaatacgcatttggacaattcatgtacgttttgtttagggtctttttcatttttatattttaagataatttttttttgttatttttacggaattctacataggattccctattgcaactagcgctgtaacttaaaattgtaacaaaaaattgtacataaacccttattgcaactagcgctgcaaccactttagaaactaaaaccgtaaattttaaaaaaaaaataaaaaaaataagtatatgaaataattttacttttatttattacatatattttaaatctcgtattttgcaaaataaattcaaatttatactatatcttaagctcagttttatcaattttaatttaaaaataattttcattcttccctccttggtttctcttctccgctcggatcgtggtactagtactactttggtcgattttacaaaatataatattaagaatgggcaaaatgacatttattctaattttaattttttaaaactaaaacatatatattattattttaattaacttaattgttttttttaaataatcatatatcgtttctcacctaattaagtgtttttactcactttgtagtacagtaattttttagcgtgtattaattagtaatgtattattattaatttcaagtgtaactaaaaattactgtactaaaaaattaaaactctagcaggtttatatatattaatatatttagtattgtatattgatattaactgaatgaatgggatgtaaatttttgctgaagtacaatgataaaataatgaaatattacataatcttatgttgtattttataattcaatcaaccatactataaattatatttattgttacctataaaaaaatatcatatatatttattccaacgtttttacagcctcatgcacgacgcgtacgtacgtggccgtgaaatatgtgctttgtggaaaaactatataagtgcatatgaatcatgtcaaaataactaatatattagctctgcctgactgcct

SEQ ID NO: 381136 - DNA, 5265 bp, Cannabis indica
ttttttctttttttttttcttcccttcttctaagttcttccccccattcgatattttttatatataataattttttttttaataaagaaatttctctcaacttaccgtcacagtcatggctcacgcgccaatccttcggtgaccgacgcgagtttctggagattgagcttcacgacagtatcggcgaagagacgcgtatcctcctccgtgttcccttccggcacatccactcggtacgattccaaaacaacggtccagatcttatcatcgcgctcgaatccgtggaccgtcgtaacggacctgtaatttctcagcctgtgttcgccgccgatgatgctaaatccagtcacgcgccgctcttcgtcgagcatatcgagtatctccgtgctagtagcggccggtaaacctgaaattacatttacatccctggtggcaccaaccgtcatttgaaacccttccttgacaacgcaactcttgatgaagtgcttgtaagtctgtggcttgtcgaatcgccgtactactgaccaaactacgtccggcggtgcttggattcgctgcgccagtagcgaggagcaatggccccgccctacttggtaggtatggaactcggtaacgaatcgtttcaactcctcgaactcgtcctgagtcaaacctgtcgggatcgattggtggtggcttgttggagttgtggcggcggcggcggcggcgctagtctcctcggcatcttgctcggccattgagctctcggctttctttattgctctcgactcgaaacgacgaagagagagaaagggagaaatctagagagagagagagaaagaggaaagaaggggaaagagggatatgagagagtatttttatttgtttataaggaatggaaattttaggaaatgccaagggcaaaacgggaatcgagaatatattatgtgatttttttttagggaatttttatttacaccccaaaattttttaaagacacccaattttaataatttttattttatataaaatttatatctttaattgtactaaattttttaactttttttttccaattcatattcttaaaaaatatacctattaaacaaaaataaattatattttaaatattatgagaaaaaaattaaaataaaaaattatataaaattttcttagaaaaaattaaaaaacaaatatacatgagttagaaaaaattatgaaaataaaatcaaaataagtattgaaattaacataaaataatgtgagaaaattttttaaaaaaaatattaagagtaatttttaaaaattatttaagtttatatgggtgtacttatcatttttaggggtgtaaatagaactccccttttttttattgcacaaaattatatgttttattttttaacaaataaataaatatgagtatttttaaaatgtatcccatcctaccaaatttattttttatttgtttctgtatctaaacaaaattttacagtggtatatgttaagttatttaaattaatttgtaaaattttgagaaatttgaaaaaatttaacatgtaggattcaaatagtttgttcgcaatagattatttgaattcttttttagtaagttaaattttttaaaattttgtaagataatttaaataattacaacgtacaggattataaaaaattaaactaaaaaatcttcttaaatgacaaaacagacaggagtgtatccatcctttttaagtgatatattgtagaaatttacaataaataattgagagtaattgttaaaaattaccactcaaatttattatttttttaatattatattactattggtataattaagtgtcaggttagatataattttaaaaaaatatcactaattaattataaaatacaacttataaaaaatatccaatacactaatttccaataataatcctttaaataattagaaaaggaataataaaaataaatgttgctttgggagattattggaaaggtgtcaacttggtgactaagacaggtgggttctggctcagtggctcatgtgtgtttggttacttgacagatcaatctggcttcacaagccgacaagccgagccgaatttaatttttcttttttaaaaaaaaaaagtaaaaaaataaaaatataatatcttgtttatttatatttatattttggaaaaggtgttatagtgttgagattggtttaaatttttggcccatgacggcatgttatatcatatgattgtttattttaatatagttttccaattattactattattataattattgttattttgtctttcattctgtcttattgaactaaaactggtttttttctcttttccgcttatggatatgacaagacctatctaactagtaactccatctataatattaaaaaatatagggtaagttctatactacatttcccttatggtggaatgtttaactctactttatcatattttgaaaaaaattagtttaattttttaaaattatatacatggtagttaattaagattaattataaaattttaattttttttgaatagtttataatgttaaaagtaagctttaaatagggtaaaacttatgcacgtgacaattttttattatatgtgtagtagataattgtttgaaatttattttctactgtaaattattttaaattttttaaaaaattacaactagtcttaaataattacaacgtacacgattataaaaaaattaaattaaaaaattatcgtaaatgttgaaacagatagggaatgtactgaaatactcctttagagaggtatactatatatatttccaaaaatatatctaacactttttagcaaaaattatcgtaaatgttgaaacagatagggaatgttgatacatgatactgttagacttactatatgaaaaataataaagcatatacatcgatatgaaatgggaaatctttaaaggaggaaacctctctgaaggagaaaactacgatgaagataactatacagaattagtaaagataggctacaaaccacgaggttgagttggcagagaaaaataagaggatgcaagagatattgattgtcatgaaaaagataatagaaaatgcaggcatctaagtggatccaatggcagtcccatctgttcaagaagggactgaggaagagccttcttagtccgaagagggttaaaaacaaaagaagagggaacctatccccattaggtatcctctagagagccctatttattttgatctcttaaaagggaaaggttcgcaggggatagatttcccaaaaggaaactagccccaggatcaaggagattgaaagagcgtattcgtgcatcaagagccgagaaaataaaaaggctctaccaggaaagatccctttatcgacctaagacacaaactcaatgccaaacacggggacctgagggcatgacttgaccaaagaaagaaagctacgccaatctctaaaggtattttgaatgaaggagtcgtggccaaacttgctatcttctggaaggacataacaaggatctctcggaggcagaaaggagatgactcaaaatcagattgtgaggaccaaaagccctacgcgagaaatatactacaagctaaactcccaaagaacttcaaaatgcctgaaatgaccatgtacatgggagacacggattcaagtgatcacatatccagattcaataaagtcatgatagtcatgacagtcatgagggtcagcaatgatgctaaaggcttgtgtttcccactaacattaagcaaatctgcagaggaatggttcaaaaagttagaaccaagatttgtagaatgttagaataaactgcagactacttttaggaggaaatttgttgcagccaagaaaataaatcttgaagtcagtgtcttaactaacatcaaatagctaccaatggaatacttaaagaacttcatcatgaggttcaaagaggaggcttccaaaaccaagaaagtagatgacggacaacagttggttttattgcaagctagaattcggaaagaactcgattttgtaatgaattgcaacaaggtggtgcggctagccttcaagattttcaaaagagagcccaaaaatatatcaacttggaagaagctcaaatgattgcttttggaattatcctacaggaggctctgagtatgtttttggagtacaattcctaagtatcacacttcctgtcgctccctaaacaagtgggacgcttagtgtacagtttcaagcaacacctgggtactcaccaaattctatcatggcaccaacccattctgattatgggttgccaacaagtggtcccactcccaaggcatgcacgcagtatccttcccaatctgcttcacttgcggcaagtgatgctgcaactctaaagcttcttaaagtaagtggtcatctaaaggaagcagccagagtgacaatatgaagcctaagaggttcgggtataatcccttatacacccagtacaatgatttggtagacacacaagagcatgtgtatttggccacaagaaaaaatgttcactaccggagaccttcccctttataccaagacagctcccaaagggaccccagcaagaggtgtgagtaccacaatgacgttgggcatacaaccaataaatgcaagaacctaaaggacgagattgacaatctgatatggttagaccacttgtatgagggggtaaggaatcgtttaccgcatatgagggaaggacaaactagacttcaagtaccacctggaggtgtgttacatgccctaaatgtacaaacccctcagggagcactcccccaaaaccaagaggctctactaggaaagcctcctaggccaaacaaaagagtggttctgtgttggaattattttaccaggatctagatttactaaaaagtatgtttttaacatcctaaagatgaatttctaaaacgatatgaaataaatacatataaagtttcagaaaccttacagtgggtgcagcgaaattataatggctccttccgctcagatctctaacccttgtatcttttctgtagcagagtatcaccaagatttgagcccgattctccttctcttgaatttggattcttcacagccttacacactatgattgagtaccacttaatgtgtgtgggcacttactctaatcactctaggattctgtttgaagaaaggaagagagagagagggttttgaattaggtatagaagagatggctcaaattttactgaaggaagtgtttgcatcatcctttcctttgaggcatcactacctattt

SEQ ID NO: 381137 - DNA, 6564 bp, Cannabis indica
atcattttaaataaaggtagtttggtacagaatactgttctcaattttctttgagcatgtttattgtaagttcagtgtaggcacacatcttagagatacatgcacataaacctatcacttagtcttttgacacgtcagatagtcaacagcaaattatgctatattcccaaaatgtacgtttctgatcagctacaatacaaacattttacaatgtcagcggctgtaggttcagaacgctacataactgtgagaagtaatggaggtactgaatcagatgcgcactgggtgtaagttgatgagatcgattaattccttttattttattatttttttcatctccatatgtagggattttgcacatttacattttgttgacctcttgaagtttggtttttttttttaataaaaaacacgcatgtgggtttgcttcttgattctatattgagaatcagttttatctatttaacattttctttttcaatatttagtcaaattttacattgacacctttttaacagatatcagacatggtggctgtggcacgcattatgaatgcaactttagtcattcctcagctggataaacggtcattctggcatgattcgaggtaacaagtgttattatttcatgtttgacatttttgggtttcttttatttcttacattttctttggataccatctttagctggtttattcatatactgaaatgtccaaattctcagtgtgttttcagatatatttgatgaacttcattttattgaaaccttaaaaaaagatattcggatagttaagcagctccctaaagaactggaaacagctcctcgagctcggaagcatttcacctcctggtcaagtgttggttactatgaagacatgacacagctctggaaagactatcaggttgagcttcttgaccaaactaggatggcatgttactaaaagtgcatttttcatgattctttcagcttcttattatttgagttttcaacagagtgttcaaatttctttaacgatgttcatgagtcagtgatatgggcatctttctttaaccttaggaaatccctctggaaaacatcttttggcttctttgttgaactaggaatgtatagttctattgagtgcatgctcagtttgttagcttcttttagctttagccgatgctgttgcaagctgattttgactgatttacaggcatctaattttagtatttgaccctgagctgtacccattattgtcactgtgtcccataaagggtttaacttagatactagactatctgaattatttaattgttggaacaatagtccatatgtgataacatgttagttttcttgacggaaattttttgtgtgcttattttaatataatctattggtcatttgattatattgttttttcttattaaatgttaagatgtgcatatcatttcctaaaagaaagtatagatttttatgtatatttttactactttttaatttacccaaacataaggatatgatcaaatgattattatacattgctaaaatgagtacttaattatttttaaagaaaaccaacagtttttgactcatgggatattgctgcatcaattgtatacttaatggtagtctaccatgtaagttaaaacgttggtagctaaagtaatacaacgaatttagcccagctttaaatatacttgggtatgttactatgttgattagatctaaccattggaatagattaccagttgttggcctactaggaagaggggaagatgtgttcattgcctaaaatgatgacaaactacatatttatgatcaataatggggttcaatgccaaaatcataatcaaatgaaaattgtcttttgaacgtgtcaaatctaccatgttactttttattccattgaaggatgataatatatatatatatatatatataattgaataagtctgacttgtttgcttgccaggcctacctaaagttgatttgtggctttaaattttctcctattgtagttttatgctttttgaaaagaacaagattgagtattgtcggctagttgtttttttggttgggggcttttaaatgtcaggctcaaattgtttgatttgcatgattggagtattagttaaaatgttgaatgcctaattagtgtacttatcagatatttttttttgtaggttcttcatgttgcaaagtcagattctcgccttgcaaacaatgatttacctctggatattcaaaggttgaggtgtcgagctctatatcaagctctccgctttgctcccccaatagagaacctaggaaaggtttgaatgatttctttggttttctcacattaactcatgctcaatgaatacattttaactctcaatttccacttctcttatttagaaaatatatggaaatttattagttaaggttggtcaaacttaaactttagcagtaatggcagttttcttttccccaaaaatctttagataatataatatgaaccttacaacatatctccgatacactatccatgataacttaatctccaccttcccaaacatgttttcgcttttagtattggtgcatttaagaggtctcctatggggattcctgttacattaggttctgagcatgcatgacggtgacaccacagaagctggtggagcggctcagatcgcggggagagagatacattgctctacatctgagatatgagaaagacatgttatccttcactggatgtacgtatggtttaattgatgctgaatccgaagagctcagaataatgaggtaagaagatctatttagtgtatgtctatgctgctcgatagaggcgagctcttttaactttatttgcggataaagagaggaaagggcaaagtctattcttcacaagtttaggaaaataagtgtgaggccattttctgaagaatatgtacagtcgtgtctgtgtcatgtagctggtcctttctttgcagaagggatgctagtgctgattttgtatgttcattgtcatctttttctctaattgtgccattggttggtgaaggagttcagtattgtttgtcaaattattttaaggattactctttgttatccagtcagtatgggccatttttttccccttaagctgtgtggacaccttgtcttgcatcatttgcatttctggccacctttttaaaggttttttttttgagggaaagaagacaaatttctaataactacagttttctgtttcatatcaacaaaaaactcatcatagcttaagttattaatgtcgggaaatcaaagcatttcaattttgttaatatttttgtttcaagaacttctctgatacaatattattctctattattctaaacgatgttgaaaattttgtgttaagaaattgacatgcatatttaatagatattgatctgctcatgtttcttggcttgttgtgaaacctgcaatacctatgcctatgtttccttctgctacaccgtgacaaattaactaaaataaaatcacaacatactcttgccaacagtgtgctccacaagtttttatgtgttattgtgcttgcgaattcttcataaattgtgatcctgttcctgtattttgtgatgttttttttttttttttggatattttgtgatattgttaggcctttcaaattccttttaacctattttagttttttaaatctgaacaatagtatgatcaggacatggatgaaaacttaaggttaagtattattaaaatcttcataaaaaataatttgtagaaaaattaaaatattaaaaccttccaaagcaagatgttgtgaaaattcaaattactatattttattcatttatgtaagtgaaaaaaaaaatcttttataggatgctgtgttattattcttttctctattttgaacaagcaaatttggtgattaagttttctgtatgtggcatttgttttaagtttatcaattatttataatgatattttctagggaaaacacaaaccactggaaagtgaaaaggataaactcaactgagcaaagagcaggaggctattgtccattaactcccaaggaggtggggatatttcttcgagctcttggctatccgccatcaacactaatttatattgctgctggggaaatctatgggggtgatactcatcttttggagctcaaatctcgttttccgaacatagttttcaaggtcggtcagtgattttgctctttttttgtcatggaaaagtagcttcgcagagctacctttcgcttagggtacaatcaattcaattcatttattttggtaacaggaaacacttgctactcagaaagagttgaaagcatttgctaaccacgcatctcagagtgctgctcttgattacattatttctatagaaagtgatgtgtttgttccatcatactctggtaacatggcaagagctgttgaggggcatcgcagattcttagggtaccgcaagacaatatcccccgataggtaattatagacaattattattgtgtattggtaattattctatcattttccttttccttaaaaaaaaaagaaaaactcaagtttttgagttctgtcattttactggttgaaattgaaaatgaaggtccaattccaagtttctaatgtgcttcctggcctttagccctgattcacttttttacattagtgcctgttgaacttagaaaagctttgatactatcataatttcattatctatcagtttcttcttcatccaatatattaaactcaaaatacaataaagattcagtttatggagccactgaaatttgttgtgtttccctatgaaatgcttgattagcctaagaagccattgtacaaaaatggaggaaacgatcacttcttcgtaagtggttgtacttttaaagcatttcatgaaatttgtttgtaggaaaggactggttgaagtttttgacatgctggaaagcggacagctgagagaaaccgcattgtctcaaattgtgcagcgaatgcatgaaaacaggtaagtttactaggatcaacagatctcttgaaaccatgctgtttttatttagatatccatttttggtgcatcatcaacaatttttatttaaattagatacagtaaaccctctatttaagaatattctatccaggaataatttctaatttattataaaaaaattaagtcccaatttggaacaattacaaataagtacaccttatataagaataattatatcttaataaaatatatatattttataaatttatttatgtaaaattaataattttattctaaattataatacatgtataaatattatatttattcaaaaataattttattatgatattattagaaattgtttatagttaatgttattacattgatattttttagtgttttgatttatttttcttctagtgtaactttatttggttataactgtttgcaccactaaaaccaattacaaatgtagttatgcttatatttatgctgaaagaaatttatgatgtagaaaatttccaatactgcaggcaaggagctccaaggaaaagaaaaggtccactgccaggaatcagagggcgagggcggttcagaactgaagaatctttctatgaaaatccataccccgagtgtatatgtacttcaaaaaggcattttcaatcacaaatgtacagctaaaatgtgttcattattaaagtgactcagtgtaaaacattgtccgaatgatggttttttgacaaaaaccagctagaccttatgagaatgtgaaagaattgcatactaaaataaacctcatgaggaagacacaagctaagccttatgaggtttattttggttgtaacataaaacctcgaagggcgactcaaacattatgaggtttagtatgaagttaagttgcctcaagtcttaccgaccatctggtgaaatctcccataccagagaagttaacatagcagattacctctcaagtagctacttaaaagttacagtttcttgatttgaagatctttcatataaatttcatttgaatttgaccattaatttgcttctggtttgggtgcataggctttgtttgggattttttttcttctttacttttgcttttatggaagtgtacaagagtaaaaacaattgctgccatactcttttgacatgagtttcttggttcgctatgggggtttttgtttacagtttttttcttgttttcttgaattttatcagtgacctccagtagtcgtagttttgttatagaccatgtaccctatatattgcacagggcatataccctgttaattctatcaacatatataatttgggaagagcgcgtaaagttttaatggggaaataaaattaagccatcgacacattaaatttaaaaacgccataaaatatttatttatatagactaaaacatacatgattatgaataaagtacggaattaataaattatatattcactataatttaaggatcgaaatacctccagctattgaatttttgagctttagtcccacataagcatgatctgcaaaaaaaaaccgattgatgtgggtaattgggcttcctcgctctctcaactctctttagatggattt

SEQ ID NO: 381138 - DNA, 4370 bp, Cannabis indica
aaaatcattttcttttgttgggggcgtatttgaaattataattaatatttttatggggatttggttctgggttttctctgtttcttccaatggaagatgtgggtgaggagtttaggaggactgtacttccttcttaaatggtctgatgaatttttcggactaatggctgctcaagcaagaagaagaagaagaagatggtctttgagttaaactctccatactgcatgtgggaaaagggtaagatctgaaaggccggctttgattggaatctgggacttttttttgaataaaatattttggctctgtttgcttcttcagtgttggtgatgtttagcctgcatttattttatttcaaaaagaattatattatagatttatgttttggattctaagtggaagaggaagaggtttggattggtgggttttttctgttttataaaggatttcttgcatctgggtttctatcgtattttccatttttatgtgatactgttttgtttgagcattgtatttatatatatatgtatagacttgcgtattgaaaaatgtagtgttcttcaccactgttaatatatctgtttattataaagctttaagtctctggacaagtaatttagagtgcaacgcaaaagagagtaaaaagtttattgatttggtgccttctagatctctattatatgtttggcattataatccttcaaattttgaatcatttgttgttgttattgttgtttctgggtcttatattttttatttatttattggttttcttttgaaaaaaacaagcaggaaatgagctttaaagactgttgttatacagttacaattcgatcaaaattagctagaggaattttcttcagaacgattcaatcagatatcttgagcgtgtaaatggattgaagtagtgtaattagatgcaatgttaataagaacattagcatctgggctgttgatttcctccattctcatatcagtttcggcttccggagctgataatgagtatcccagatgtaattgtgacgatgaaggaagcttatggagcattgagagtattttagaatgccagagagtgagcgatttcttaatcgcggttgcctatttttcgatccccattgagctactttactttgttagctgctccaatgtgccattcaaatgggttctctttcagttcatttcctttattgtgctttgtgggatgacacatttgcttaatgggtggacttatggccctcacccttttcagctcatgctggctctcactgtcttcaagattctcactgctctggtttcgtgtgctactgccataactctcatcactctcatccctttgcttctaaaagttaaggtgagagaattcatgttaaagaagaaaacttgggaccttggccgagaggttgggatgataatgaagcagaaagaagctggtttacatgtgaggatgcttactcatgagattcggaagtcacttgataggcataccattttgtacactacccttttcgagctatctgagactctgggcttgcagtactgttcggtatggatgcctaatgataataagactgaaatggttctgactcatgaattgaaagggagaaattattccaatttgtataatgtttcaatacccattggtgaacctgatgttgtgaggatcaaaggaagtgaagttgtgaatattcttagtccggactcagctcttgttgctgcgaggagtggagagactggtgagccagggccggtggctgcaatcaggatgccaatgcttcgggtttgcaacttcaaaggtggaactcctgagcatattcaggcttgctatgcaattttgcttttggttcttcctggcggacagcctagatcttggagcagccaggaacttgagatagtaaaggtagtcgctgatcaagtggctgtggcactttctcatgctgcagttcttgaggagtctcaactcatgagggagaaattggctgagcagaatcgagcattgcaacaggcaaaaaggaatgctatgttagcaagccaggcaagaaattcgttccagaaagtaatgagtaatgggatgagaaggccaatgcattctgtcttaggtttgctctcgatgctgcaagatgagagtctgagcaatgagcagcgaactattgttgatgccatggtgagaacaagcaatgttctatcgaccttgataaatgatgtcatggatagttctacaaaagatagtggaagatttttattggaaacgaggtcctttagtttgcatgccctaataaaagaaacagcttgccttgccaaatgcttatgtttgtacaggggtttcagttttgctgttgatgttgagaagtctttgcctgattatataatgggcgatgagaaaagggtttttcaggtgcttttgcatatgattggaagccttttaaatgggaacaaggaaggagggttggtcatactcagagtttttccagagagtggaagtcagggaaggagtgaccaaaaatgggcagcctggaggcatactgatggggatgtacatatcagatttgagattagggtcagtgatagtggttttctattagacgggtcagtatcagcagcaccacccatcgataggagatacgtgaatgatggaattgaggagcgtttgagcttcagcgtttgcaaaaaacttgtgcaggtaggattcttaaactatgtctttgttgtgtgtaaatgtgaaggagagatatttttcatattttttttcgtactcttgattagagcaatgcgagattttgaattattatagttttatagatgtgcattattcaatggaagtgaccaaggtttttacatccttcatttctataaaaagtagttgactgtttatattgaaagcaataaacatgctttagcatctgttcaaattctttaggccacctacattaattccacatcactttatttcaaaacactagaatgtttagtgatatatttgtagtgaagtgcacgagtatgtgtttttaaaatgcattaaattcttaattccatatgcgtggatgggagcacttgacgcccatgcttaataatatgcattccgtaaccttgttctacttattgctttcgaagagtacctaagaaaggtgccttcaatcacgtgaatttccttgcgacataaggtttgattcaactttttcaaagcttctttttatttgaaaagcttttactggatggttcaagatcttgccactaaatcaaagcaatgcaccacaagacatgatgttcttttcagtatatttacaactttggcttataacttctacttatttgagatttgagttgaaggagattactaaatcccaattttgtttttgcgcagatgatgcaagggaacatttgggtagccccaagctctcaaggatttactcagagcatggcactggttcttaggtttcaactgagaccgtccattgcagtagcaatctctgaaccaggaggatcatcagagcacccgctttccaactctcttttcagtgggctgcaagttgtggtagccgacgacgatgatgtaaacagggttgttaccaagaagctgcttgaaaagctagggtgtactgtaacagctcttgcttctgggtttgaatgcctgagcgctattagccgagctggatcaccagtccaaatcatagtgctagatctccacatgcctgagttggatggttatgaagttgcaagtagaattcgcaagtttcgaagccgtagttggccattaatcatcgccttagccacgagcgacgacgatgctgtgtgggatagatgtattcagattggtatcaacggtgtcatccaaaaaccagtagtgctgcaaggtattgcgaatgagctaaggagagttctgttgcaggcaaacaaagttgtgtaaagaagcagcagcagcagcagcaaagagttaattggtattctgtttgagggctctttcaaagtcccccaattagatggtgcacaaaacattcaacagaatggtatacgagctagctccctttcattattattactattattattaaaagaaaattaatgtgtttgagcatattgttataattacatagagtagtttcaggtttgataacagtatcaaagttgtcatagggcaccctttctaatgtttaaagagaggaaaaaaagaaaaagaaagaaaagatggtttgaaaagaaaaccttatggaattgatgtcaaatatgtgttagtttttttttgttgttttttcttggatgcaaaatgttaggcctctttagtaaaccgctcaaaccatccgcaccgcaagaaaaatgcagtttgaaattttttgaggtgcggctgcgggttgaattttttctaaaccgcgcggtgcggt

SEQ ID NO: 381139 - DNA, 5324 bp, Cannabis indica
taaagagcattgaactaaacttaaaatctctaagttataggctctaagttctaagtcaccatgcacaacgcaccacttgacgaggagtctaaatacttaagcaggacaaagagacaacgaactggccaaccaagaaggtctggtcagaccacccctggccggccctattgccagcataggtcgtccagcctccagcaaagggaaggtcggccaacctctcttctggtagacactttttgtgtctctgcagctttcagcttggacaatacttccagttacaaattgggtttcaatatcccatgaaaataggagattaacttcggttatttatctattcttgagggctaattaacatattattttcttattaatttactgtgtaacaaataggtgatatctctgcattttaagggatataaacatactatctcttgtatgctctctcctatataaagagcactaaattaaacctaaaatctctaagttctaggttctataagccttaagctctgaagctctcactcttaagtcatagagttcaagcactcaaaaccctagctcaccctctctcctacatgccattaccagtgtagtagagattaagtctccctcatctctcttcctttagatttgcctcttattctcattattgtaatattaagagagccactctagaatccccaacactagtgatttgagtggtattatctctaatatcaatacaaccgaaaggggagtaagtcattactcgttaactaagagggtcgaacctcaaaaaagatattgtgtcctttttgcttgcttgctctatttgtgtacacgtggttattcaatcataaatatgactccgttgtcggttggctaaatttgagatcaacacactgtaagcaatctgagacaatgatcaaacattccttcagaaaggaacactgcttctgctgcttgaaaaacatctaactaagcttgattaaccaatattctatcagcttttaagaaaattctatcatcactttattgcttattagaccacgtaaaaaaattaccactaaatttaacattctccaaaccacaatgtgctacacagttaacaaaatcatttgaggagttaaatttaactttaactcctattctctcatctttacttaggatatcattaaaatctccgaggaccatccacaatctgaatctgtcaaggcacacaaatccttctacaattctcttctttcttcctctttatcacatgtcacattgaacttccttctgttatcaacaatagccacccttagatgaattaactgactcgtacatctcaaaatgttgacattaaatattaatggattctatttttcttcctccatgcgaagcactattacttgtaaaagaccagcccaagaacatcctcacatacaaggcaccaatgttttgggccttcactcttatctcgaggagactaaccaaactcctcctttgtttcataatcaaagacttgactacatcttgtttatccctttggttgattctttggatgttccaacacaaaattttatccattgggaaaaggggtactccccctcctgtttttccccactgtttgaaaccctttcatttctgttcaagacattaataatctcctctactagcacctagaaagcattttctacaactatagagaggtgaacttcttttcctttgaacctttggaaacttgttggaagccttctttgtcaatctttgtctcttgttcctctttagcaccttcgggtttcttctgttaagctttagcaacccgttcttatttcctcccctatttctttcgacaatccttagttgcatgacctattcctttacaatgaccacataaaaccgacttcattcataataaacctcaaaagttacatttaaattaagttcatcttcaaactttatcatatcagggaaattctaatttattgtcacttctattagaactcgggggaaactcaacttatcccataaaatcgtggcttcgtccaccgtaacaagcttacaattttgacctattatcttaaaaagagacttctcaccctaatacttcaactctaaatcagttaactgaacccaaatcggtacagatttaatatctttgcgcttgaaattggtgtgaaaatcccatttcttcataataatatgtcgtttattgaagaatatgtatcctccatgtagcacttcatctctatcttctactaaattggaacgaatgagaaaaaccccatatgatagcattccaactttatcaattttatccttccatttcctcctaacaaaactctcaagaactgatagaggtggattcacaccaagtacataacaaaccaaagaagaacgtcagtacgcaacttcatcttcgatatcatccactgtaattttaacttttgctttcttttcaaattcaacaaattttgcatctaagttctgaataacactaccagatctcaaaatagggagagttactttcttacctttagaaattccaatcgaagcttggtaagtagcttccctaaaatgtctcgcttccagtaaatgcaaaaatttcttctgaatctctactcgtttatgagagattctaataagatctggtgtagtgattggaccacgatggccatatttctctatttgttgctcttgattcgtatcaattttttctttcttgtcagttaattctatcggttccactcccagaacttcttccattaaattcatcttcctcacatcagaagtagaactcagaccgtgattttttttttcttgactgaagctttgggccttccctgtatcttggctctcgtcttcaccatagcaccaactaagcagctaagaaaaagctagagagaataaaaattcattttccttatcaattttaaacgtcttttttgttactttgtattttttagttttattttctaattatttttactttattgtataaagtgtattatgcaacagtgtaattaatgtaactagtttcgtgcttgcattatttcaatttatcatgcaagtttatggtttcttatgtaatatagtagataatgtgatttgatatatccctatagtatgatgatataaataaataaatatatacctatatatatatattagaaatgatagatttacgataatttatagtatgatgatatttttcatatgatgatgatgttttaaaaagtaacaatttgtcagttatttcttaaatttttactattttatctgatttgattgtgaatttatatatataatcatgaaatgatgatgatatgtattgacataatgcatgaccttttaatccgtgtaggtttcttggtgatagggatgacctgaattttacttttgttgtgttgaatctttttgaagacttagaatactttttttttgcaggtgatcgattattcttttgatatactggtggaggtgagattgatcagtggagattgtggtggaggtgagatcgatcgctaaagatattggaggtgagatcgattggtgagctcaattaatgggagatgaagtcacacgattggagagagagatgaaatcgtagacagaaaaaatcgtataaagatgttttagcggaatcgaatttgatttttagtgttctttagatatatcatgtcccatatttgttaaattttttattttgaatgtcatattttatcctattaagttttgttgtaaactaggtttcattttctcatgtaaatagactttataacttgaataagttgatgaatactttttttccgtacttgttaatcaaaaatactttcatataatattttattaaaatatactcacttttgtaagtgaattgtttaatatactctcattttctatttaaatctagcacataattcatattaagttaagggtataatagggacattatctataaaagtgattatatcttacaaaatattaaaataaaagtaaaaattaaaataaataaaataaaatgaatttacaatgtgattattagtaacaaaatttgatttaagtatatttatgaataaaatttcccaaaattcttacatcatcttgccggatatgtataatgggctgaatttaaggcccagcccaggaaagtttactatataaaggccacgaaacaagcagctgtgatactgatacattgcatataattcattttcttcttctttacaaatataaaaatataattaaaaaaaaagttaataatacgagcaaatcatttaagtgaaagtcatacatacgtgtgaataatttctttttggactttccttcatattctgaatagaaaaaaaaattcataaaccatacattgaattataaattcactttatatatccaaaaatacataaaatatttttggtttctaacgtaaaataaaacatagcatgttgtgaagagaaagaagcatgttcgattggatgaattgggatctacttgtggatttatatgattgactctcttttacttttattatttttattttataaattaattaaagatcagtattagtaaagggccaaaaatgaaactctcctataatttcaatattattattattttttttcaaaacgacaaattcactatttagtgcacatgtaataataccatacttggagaatcatagggtccactctccacattcccttgtctatcttacattttgtgtaaatttacataaaattacaaatatattcatttcaatgtttataaacagtttctttgataaataactcagttttggtgatataataataattgtaccatgtttcaactatattcaactctggtcatgccatcatataagactacatatataactttgtactatatatataacgtcataaatgttacaagtgtctaataatgtccaatgttatgtgatattgaagagtgttggaagaaaaatttcatacccaaaacaaaacaaaagactaccaaaaagaaaaagaggaggggaagtgattatcatgaccaaaaaaaaaaaatgcattatgatttagtttttgttcttttaagtcttattttattctggaataatttatattactattaattaattaatttttaaaaaaatattatatatattgatgacacggtatatttatcataatgaaatgagattatcctaaactacgactacatccgcctcatataaatacatttatatagactagtaaaaagttacgtgcgagacacgcatactaaattttatgctaatttttttctatgttagttgaaagtgatacaattaaaaattaaagaaaaaatattattagttattaggtgagattattattatgtgt

SEQ ID NO: 381140 - DNA, 1948 bp, Cannabis indica
agaaagaaattattattagtaacattgaaattgttataacaaaagaaaagtatttaaagcaaacataaaattacttattaattgatttaccacttgtcttaaatggcgcatcagatttggttcggtgtataatctaacgagtgtcgataattcagtaaacctattataattagggaaaatagacttctcaatatcctctacaaaactttgaaattttaatggatccacgtttgattcataatgtgcatagtttatcatttatggaatgtgatcatcttcataatccaaattaacacttttgaccttcttaaacttggatggtgcctcgcccagtactctaatctattctccgtagtaaaaccaaatcgtataactcttgtctattacattcctaaaaaaatgctcatttatcttgataatattcatacgctctatattaccccatttacgacaagaataattaagatttttcgcattcttcaaacaaaagtccaaaaaaaggttaacaccttccccttactctactgataatctatccacactcattcaatttcaatccattctaaaaccttttaaaaaaactatattcaattaattattttaatatgtgcattaattaattagttaaattaattaccgcacataaaaacttttactaaaatctaacacatttttctctaattttttattctattactaagaaatttatcttacttctaccgatatttaatcagatgttcccaaaagttttaaacatacaaaaaataacaaacaaaataacattgataatacaaaaaatttacactcattagaccgcagtatatgtattcgtagaatttactacactacatacggatgaatatctaaggtattcaaactcatctaacatgcatattttacccatctaaccgcaatacaattaatcgcataacctatttcactacgaatgaatatctaaaatattcaaactccactaaagatttatgaaatattatcaacaaaattttaataatttaccaactctagtaaagctactaatcaacgtccttgaacaagatcaccactaataaataaatacctaaaaattaaaattaacaatagttaaaaacttcaaatttttcttagatttttaaaagattaagaaatataattttagtagcttatcaagttttgtatggcgtccgaaaaaacttcaaacggtatcaccacaaaggaaatcctaaattaaactaacaattaacaattaaatttaacttggatcaaagtatccaaacttaaacatgcttattacataaatattacctaaactatactaaatttataataaactataataatttttttttcctaaactactaaacttacaataaaaaatttctttgcctatactaattacacattacatatatttttcccaatataaaattaaacattaacattagaactaaatgttatcaattttttaatgtgtatttttaaataaagtttttattcaaaatatactaaagatattttacgaaactttttagctatgcacatgactattaacccctaaaattgacagaattttttgagattagtcaacaattagtatcaggagtcgagagacattgattataagagtcggtcaaggaatgactgaatcaatgcatatggctcagggctcgtaaatctccattatcaatgcttacaagtctcggggtatatccacgcaactcggaggtcaaccctataacaactcaggagtacagttagtaagatcaacttactaagttataattgttagaggattttcataatgatgcgttcagaattaaatcttgtcctaagcataatatccatagatctctttctcatcttttcaacgcattttaaatcttgacatataccaagagtgttatggccaaaatcttaagactaccaaattgtgacaactgggtgtgcgagc

SEQ ID NO: 381141 - DNA, 2064 bp, Cannabis indica
atagtactaattccaaagaagaaaaacctagtgaatatggaggatcatagacctatttctttgtgtaatgttctttataaaaatgacgtctaagattttggctaataagatgaagggtcttctcgatcaagtagtttgggatacccaaaatgcttttattcttagaagattgattgttgttaacattctagtctcctttgagatgatgcactatttaaaacgaaagcgacaagagagtgatgggtttatggcatttaaacttgacataagtaaagcttatgattaggttgagtggaattttctaagatcaatgatgatgaagatagggttttagcgatggtaactttgatcctaattttagggataatcctaatttagtttggaagtgtatttaggaagctaagtttctagttatatctggtgcccatatgcatattggggatgtggaaaatgcctctattttggaagctccttagttaccttgttatttctcatttttgggtttggttggtaaggtgatgagtagtttgcttccaactagatccaaactgtgggatgtagaagtagttcgtgaattgtttaagggacgagataagcttcttattttgagtaaacctttgagtgacaagggtaaggatgattgttattattggagtaaggagattttaagcttttacacggtaaagagtgcttatcaattattgcaacaacttaaggggcttggggtgattgaaattctggattttggcataacttgtggcaatttaaaatttctccaaaggtaaaagatcttataaaatatgcttttacttggtgtctttctacgatgtatcaacttagtttgaagcgatgtaccagttcaacgatattgcgctatttgtttgcgtgagggtgagatgattgttcgtagtcttattttctgtttgttttctactcagtctttggataaagcaaatatagtggcaatatggtattagatttaggggctaatttttccgtttggctccaacaggttggagcttgggcggttaaggaaacgcaaggcatggtgttgggctatttggtaagctcgaaatgattttttttttttttgaataagaagatttcaagtgtgaatgatgtggttacttcagcaaaaatgtatctacaacaatagaagaatgcccaagtgatgaataactatacacaactattaaatggtgtggcacaagatggtgccaagatttgggtaaaatctcaagtgaatcaaatcaagataaatattgatgccacattgtttgttgtaacccatcagtttggcattagcttgataactcgtgatcacctagacgatcttgttgaagctaataccatttgttgtgatgggaatgtagaacttgagtttgctgaaattataggcattaaaaatgttctcggttgaattaagaataaaaatggccaacggtggtggcagggatgaattgtttagtggcaactaaatccatttggagtcagatgatggtgaattctccttttcgattagttgctaatgagtgtagtttgtttgtttatcgttctactaacagagctactcataattttgctaaagcttcttgatcttttttatattacatttttagtgggagacttagcgtgaaatttgtgtcttttctttagatcaatttatatcttttcttctagatgatttatcttctttctatttctattaaaagaaaaaacatattccacattttttttaaaagtcatattccatttaaattaaaataaatgaaactcgacattctattttaaattaaaataccactagtgctaacagatttattattttcaaaacaagtagaatgtctagccttgaataaagggaatttactctcctctcttttcttcttactcttatctctcacaacacttcaaccttcctatttcttcatcgttgttcgtgattgcatcctctgtacttgattctccatcgttttgattctccaacaaactattacggtaaatatctctctctctgttttctttttttctttttcgtagactgaattcattccattttatata

SEQ ID NO: 381142 - DNA, 1171 bp, Cannabis indica
gcagttttttcggtttttggtttcttcgatgtcgattttttcagtgttcagacggtcagtgtactcggtttggtcggtttcttggattttttgctcacccctattaacaagtccaacagacggtcaaaatccaagtcttcactatgtaaaccccactgactggagaaccaaacacctctggccaagaaacactgagaaaaagatactgaaacgaatcaacacctgcattgagcaatcttggcaattatctacttaaacgacttccaaacagcaaaatatctctatccaactttcacaaaaagaactcatgaaattcttgaacttgtaatctccaaagtttctgccaaataggatcacaagttcctagcatctttccaaaaaatttcatctcgatgaaaggacgagagtctttgaacaaagtaaattgactcgacaaaacttggaatgaaccaagcctgaagcttattcgagtcccaatcacccaatactgaggtaagataaggagtaacataagaagaaaagttgaaaggtaatggattcaaggcaactatgtagtattcgaaatccaaccatggaatccaaggagacttaagtatgtcaatggaacagccactaccccattacccaccaagtagcaagactcgttcctcaaatgatctcgagtataaaaaattcctcttgccccaaaagaagcagcaccaagagaagtgagagacaagaaagtatttgagccatgaaggtattttgccaaaaaggtttgacacgaaattgcatcatctcccgatgcaggcctcctaccgagtttatagatcaatgatagtatcacctctcccaactagctaacgagtgccatcattccacgaatcacgtccccataagatgcttttcccaagaaaacaagctcactttgtttcttccatttctaacacagaactattatgatagtagaatgttttcataaccttagaaaccaaaaaatcctaatagttttataggtgagttgcttgtttggccatgagagattgattgattaaaaacatgtcctgaaatctcatactaccatcagatttctgccaacaaagttcggaccaagtgcattagtgcatcttacgatgcttatgttggattatagttttactaggatctaaatctactaccatgtatgttgttt

SEQ ID NO: 381143 - DNA, 983 bp, Cannabis indica
gaactattgagattgttaaattagaggacttctttctaattttactaacggacgcctgacatagataaaaatttatgagacacaatttgatacgtgtcaaaggttggaagtatgatttaaaacatatcaaaatttgagagacacgatttcgtacatggacaatcacaacgttaacaaaattgcacgaaattgaacaaaagttcttgaactcattaatctcaatagtttggcaaaatttttaacagcttaaaaagttcaggagtatgatctgatacatgtcaaagttcaagagataaaagttctaattaaccttattttataagatttttatctctgaactatgacctatacattattgcgctcttgaattttttagtcagttaaaaaatccctaaactacttataatattgtaaaatggtccttctgtcaagttttgtgacacgtgcaaatagaatgatgaagtagttgtttagataattatcatgtaagcgcaatgtgattatttaaaattaaaaattcgtattttttaaaaaatataagactaaaaagcaattaataattaatttttttttacgtaaaactatattaaaaattttaagttatttttaaaattaattacacatgtggtgttgacatgatacttatgtgacaattgtttaaataattacatcattattttgtttgccacgtgtgacaaaatctaatagaatgactatttacaatattatgaatagttcgagaatatttttaatggtctgaaaaattaaaaacacaataatacataggttatagttcgagaggcaaaaattgttaagaaaaaaaggctaattaggatttttacctcttaaactttaacatgtactaaattatgcccctgaacttttctgaccgttaaaaattatccctgaactatcgagattgttagatttaaggacttttgtttagtttcattcaattttactatttcagtgattgtttatgt

SEQ ID NO: 381144 - DNA, 5260 bp, Cannabis indica
ccttcttaatctcaattggatatctaattgggcctcaaaccgagcctcaaccggattccaacacactctctcacccactcgacttgcctggttgcgtcttgtctcacacgttttcttcatcgtcgattactggactgccacagagagagccgagcgacctcccaactaagtttccggcccctgctttggtttcagagaactcgattattcactccacgattttcttttcgagcttcgtcctcactctactaccagttctttatttcgatttcctaagtctatcatctctaacgcccgaaaatggtaacgtttctttatttgaacttatcttctgctaaatgcatgtccttatttccatttttgcgtttttttatgatcttttagtgtttttgttgccgagaaaggtgggaaacgaaaaagacaattgaactttggggattgagattttcagtgttacactagctgagtatttttttttttatagtcttccttaaactaaagcagacttcgcgcgatgaatacctgtgtttgtggttgaattttagcgttttgttgaaatagaacgatgatgattttttttttgttcccgttactttgtttagcaatcaatcgattgagtagctggttagtttttgtaaactaattatatcttgaaattaggtgatatggagttttttttttccttctctaaattttgaatttgaacttattatgtttcttcttttcttttttgttattttcagcctctcaggctggacatcaaggtatgtagcttaaacctcacaaaaacaatggcgtgtactttatttatttccttatatgttttcggcttgtgctattccactaacaaatttatgctattgttcagagaaagtttatacaaagaactgaaagagtaaaatcagtggatttgcatccaactgaaccatggtgaatttttcttacaaacacacatttagtatattttgctatatttgttgcttttcacttggacctcagtctctttaacactatgaattacaaatttatttttataatttgtagatacaatatgtattgcatttttcccccttctgattattaattatatagtactcacaagtgccacaccttatgttttacacctttttgcaggcttcttgcaagtttgtattcaggaactgtgtacatttggaactaccaatcacaggttagcggctttaatcctccaaatcctagctgcctagtgtgaataaactatttgaatatctataagaaagtattatggagaaactatactgcactatatatgttcaagttaccagcttccaaggggaagataagtgtaaaaatatctctacatggatttgtttggaatcatatactgttgattctgacaacaatgtaactttattctgttgcattgtttattctgctgcagttattgtgtttagtgcgttaatatttattattctatttttttttaaacttgtatgggtggtcattaaaatctgaatcaccaactgagataaatgtagggaactatcaatgattatattttctatgaggatgtatgatatataagagtatcttagaatgatcgatatttataattgtgtaaatttatgcaaacaactaatacaatagggttgagcacttttgcataaagtaaggttaaatatttgtttttagctgggtagagctattttcctttagaattagattattgaaatggggatatgaaaatttctcactaatatatgagaaggtaacatgcatatgttgagatatatgatttgcaattaaaaaaatagttatgagtttaataggtttaccgccaacattggtagattttatttttggaatacaatggaaaactttgaaaaaagttcatctgatgtaacaattaatggtattcaaacattgttttttttttttggttggaatttcaaaagataccgcacccaaaaaatagtgaaattcggttgaatagttgtttggtttggatgcatgcattcctggagctattgaaaagtgcttgcaccttgttacatgcacttccgttgagctcacttccaaaagactaacctggttcctaagtgtttatagactaccattaattaatgtaggatgttcacaatgcacctattttacaactgacgtttgcgattccatttttacaaccacacttaggtagaactcactcccaaaagattagattagcttacaaagaaagtgcttgtacttgatgttgttatgaaatcaatataatctctcacagaggatggtgttgctgctgtatcgattttgacttatcacaagaagggactgctaacaccaaagtagcgtgttttagccattataagatcagagttaattagaagatggtggagtcaaccaattgctaggatttgttataatgcacagcaaacctgtttatattatattcattattgtttcccaattgattcttacttttgggataatagtttaaaatttttaagactatagatgcatgctttatgagaacgacatttttgttagcgctgactgaaacactcctaattctcttcagaccatggtaacatcttttgaagtttctgagctcccaggtactcattgtgtatgtatgccttgtctattaccttgttctccttatggtaacctatttgacaatgagattccttctccatgcagttaggtcagctaaatttatagcacgcaagcagtggatagttgctggagctgatgacatgtctattcgcgtatacaattacaatacaatggacaaggttaagctttttgaagcacatgcagactatattagatgtgtggctgtccacccaacacttccatatgttctatcatcatctgatgacatgcttatcaaactctgggattgggagagagggtggatgtgtaatcaaatatttgaggggcataatcactatgtaatgcaaattacttttaatcctaaagacactaatacatttgcaagtgcctccctagatcgcacaattaaggtaaaaatggatttttgattttcgaggttaatgaattgaaattgtatgaaggtcttctttacagtgtaagttattgtcctgaaattgtaatttccctgccaggtctggaaccttggttcgcctgagccaaattttaccttggaaggccacttgaaaggagtaaattgcgttgattacttcactggtggtgataagccatttctaattagtggttctgatgatcaaactgccaaggcaagtaaagaatttcccatacagcatatgtattacatgcatatctaggctggcaaaattgtaatctcagtccatgggaacaggtatgggactatcaaactaaaagttgtgttcagacacttgaaggacacactcacaatatttctgcagtttgttttcatcctgaacttccaataataatgactggttctgaggatggaactgttcgaatatggcatgcaaccacttacaggtaaaatgttaatttcaaatgaagccctgtctacattattcatccagaatttcactctcaactcacattgttttatgcaattttattagatggttttattgcaaacctctgactagactaattctgtacgatgtttttattttaatggaactattagctattgttttgataagtaatctaaatggcttatccattaattaggattgatcccacatatgactgttctgttattatttaatcatcattctcagtagtatgaatgtatgaaactttttattttcatgtgtttcttctccttatcttcacgtttaattttctgtgagcacatactaagacgtatatttcttattagttacttttttttataccttttgatttgtattatgatttgaattgcaggcttgagaacacgctgaattatgggcttgaacgagtttgggctattggttatatgaaaggctcacgacggtgagtttgtcagcttttgatttattgtataagtaattcttctggagaattttacaacaaatttctgaatccaacatgtgaaggaagataaattgaactgcgtcatctgatgttttatcatgttgaaactgtatgctgattatatctttcttttattgattttttgtaagcactctttctttatttgatttttgacttcttaattgtgctccgtttttctttctttctttttaacaaataattactgctttggtaggattgtatttgggtacgatgagggagcaatcatggttaaaattggtcgagaagaaccagttgccagcatggacaatgggggaaaaataatttgggccaagcataatgaagttcaaattgtgaatatcaaaagtgttgggaatactgaggtttgatcatcctgcttgctcaaaactatctgagactcagcccctttctttatttattttgtattaaaagaataaatcaagtttttgtttgatttagtttaatatttttttttaaccaatgcttctattttactactcaggttgcagatggagaacgattgcctttggctgtcaaggagttgggaacatgtgatctttatcctcaagtaagtttaattatttaatgcagcctatttaggtgaaaatgatgcagctttgtttagctcagtttattacctcttgttgttggctttatgtctttatattatatatagcgttgactagtggaagataaacaattcattatgtccatcaataataggcaaagttgttggctctatgtctttgtttttgaaagaatacctactcactaaaacaaatttgtgtctagtctaaggtgcttttttttttttttatggaatggaagaaaaaagtccctttgtttggttatttaaatgcatgagagcagccattcaattgtaataactatttttacatctaatggaagtgtccgtatataaaatgggtggaataaccatttcatttttacgtttttttttcctgattttccacccttaatcttccaattctttttttgtttttttgcaatcatattaatgatttttcttgtcaaaatataaaagagagcattccactgtaaattggatcaattcttactgcattccctttctacgggaatattgacgaatttaagatattagcttttatctttgaaagtttgtacactgctatgacaattattctttcctacctaggtttctattaaagtatccactcaagaatatttgaaaaagagggtataaattttgccctttatccctctatatcttgagcttctaccatcatcttatcatccatgg

SEQ ID NO: 381145 - DNA, 3013 bp, Cannabis indica
gctaatggtcatgcttggcatcttccttgtggagcttatgaaacgataaacctacttaaagatgctggaggtcggatttatcgagtatttccctttgtttttgtaaagttcctgttctttgttactgaatgtgcaagcaaaaatacagttaaagttgctgtagtatccaatttcgacactcgcttgaggaagctcttgaaggacctcaatgttatagacctgtaagcattagtacttctcttttacaaacttaagaagacaaataaataattgatattccatcaccttttaagcaggatatgatgaacagtgcctttgtttcttttcaggtttgatgcagtcattatatcttcagaggttaagtatgaaaaaccagatccaaagatatttgaaacagctttaggtaaagaaaccataatcagagcaatatcttcctctaggatcccaacttgtcaggagtttgatttatactagatgttcatcttatttttaatttttttttatggaattgtaaacataactccttgtttacatcagttattgtgaaaatacgtagtttgtgggggaaacattgtttaataaatctttagcatttcaaactctaaactataattttaagtcattctgaaagaatccatcgaggctacctttaacatttgttttctttatttgaagatcaaattaatgtgaaggcttgcaaagctgtacatgttggagatgatacgaaggcagacaaggttggtgccaacgccgttggggtcgattgctggttatggggagttgatgtgaagacattctcagatattcaaaatggcattctcatttccgagtcgtagtgctcatttcttgatattgattcaggtttctttgttcatgacctgtatcttttattatgctttcaattgtaaactcaatttcttcataaaaggaaaattaactagccaattttacaaagagcccgtttgcctttcatgagattatgaaatgttctgtgtttttcttggtcgtattccattttattatgtcagattctgttcatgattccatgaaatgttttacttataatatggatttgatggttaccatttatttcacctaaagattgatcacatattttttttatgtgtttgtactatagactgtggacactttttaggaggatggaaactgagtttgacacaatttcctttttcctcctaataataatattatatattagtatgaattatgggtttggaccctttcatgtacagaaagtttgaaactttattcaattgcaaattaaatcatggaacgacttaacaacattggaatttgaaagagaagatggtgctgtgtttattgtacaagtaatagtttgtggttgtatgagccagcaactactccttcagacaatctatatggcttttcccatcaagttttttgctgaacaaaagtctgagataatcctctgtgctaatagttttatacataggcttattctttttcactagctctggtaaagggccaacattgcttttagcatgtggaccatgaaaggcagctatggaaatacgtttcttctccgggttcacaacagctctgtgttctatgctcttgtactcaccattgctcattatctgcataaatggtaagattttgttaagaataatctattatcatgtgagagttttcttctcaaactattgaaagtgtgatcccattatagagtgcatttcttttataaaagatgtatgagaatgtacatttgtatgataaattgagtacagggcaatatggttacaaatttgtcccatcatttggactgtgtttagaagaccactctataattggatttgagtaagatttgaggcaattactaaatttgacatgtttgtgtgattatcttattacacggtgcccctgtaattagaggtaattgaggagtctcaactcccaattacacgacctatctagtaattacacagtgacttctaaacaaaaatagtatatattatgcttagtttacctcaatgacatcaccaatgttgactatgaatgaatttgggacaggtttcacaactatccatttgccatttttcttaatctgcagaccttgtacatcatttacttgtagcagcatagtcaatccagtggcatcagaatgtggagtgagccccataactttgttagcttgaacacaaggagggtagtaatttattctcataccttgtcttccatcctcaaaattactagtaagtgtctctgaatttagcctaaggtttctagaaataaatttcaataagcaaagcactactttctgcagctcccttgagtatttatccacactttctctgaaatttacaagatctatgtcagaaaggatttgtttctcacaacaatattatgtatttttatatgttgggaatttgcatttacctcatggaaataggttgagtaggccaaaatttcatatttctggcagagacaggaagagcttgaacatagaacatatctccccaatcaagcttttggtcttcagacttaacaaaggcctggccatagccttcaagactatttggctgttgggcataagcttttttcttctctaatggcattttgaagaattcttctgtgtcaatcttcatattctcaatgacttcttctggaaccccatgattaattaactgcattgaaatttgcatcaactatctcaattggaccatttccaattagagatgtgaaaatagtgctatatttggcacaagaaataactttgtgatatatttgtatcagttttgactattgtgtttcaatgcacaattgtaaaacttgatgcaaaatttagggcgcgtttggagagccatgttgtaattggatttgagtgtaattggaggtaattacacaatatgacatgtttgtttgaccatataattacactataactgtgtaattgaaggtaattgatgagttacaattattctcttcaattctcatgcccccatgagaattgagtgtaattacactgtgtaat

SEQ ID NO: 381146 - DNA, 1450 bp, Cannabis indica
aaaaaaaaaatagtaataaaatggaacaataatatttgtctacaagaacattgctattacctgcctagcacatcatgaaagtttcacatgcttcccaatagtcacatcacaaaaaagaccctttatttcttaataaatcaaaagccgtccacacaagggaatataggtatagccggcttgggaaatatttatattgatttttggaaattttttagagagaaaaaggtttcagtttgacattcacaagtaacaagactattttattagcattaaagagaatattgcactggcaattaaattgaaaaaaaaatacatgttatcatttcttaaaattacaaaattaatatgtcaaaaagatacaaaattaaaaatcatggcataatttgatgcttgatagcaacatctaagtagttccatcacatgaaattgcatttgataaaaattgaatgatagataagaaggtggtccttccatagtttggtccacatagatatatttcatcttgattgaggacaatatacattacacaccctcactcaagaaacaaaacatgattactacaaaagctatatatcacgcaaacctcactccaattcaatacatatctcactcaatcttattttattttcttttttttttctctctcctataatggtgcgtttgatgggtatgtatgcttagcccaacattatattgcatatacatccctttcgattttaggttttcccctttttccaatagcaaaggaagtcataacaatattattagaaatagtccccccatacacacacaaggagctcgtccttggtgaaatcttgttttgttttaggattgtatggcttcttaatttaaaaattattttcagtttaaaaaaaaactaaaaaaaaaccaattttttaaaaattaatagggtgtgtttagctaatttttttaaaaacaattttctaaaaattgagttacaataaactaaaaaatagaaaacatcaaatgttgctttctattttcaaaaacaacttttatttttttgtctgacatatttattttttacgtttttgctcacatagctggacccgattttgggaccctagacccagactaagatctcgaagcctaacatggacctggatctggatccggaacccgggaggtggaccagggacatgggcctagaccccagacttaaacccagacccggacgccaaactcaaacccaaacctcggacccaattttggaccccggccttgatctaaatcgaagacccaaaccccgaacctcgaacatggaccccaaaccccggaccccgaatcccgggcttgcaattggactcaaacttagccttggagcatactccgagtttgggtttggagtcggagtcaaggtttgggtttgaatccgagtctggatttggtccgaggtgggttgggttcatgtcatggtatggtgtagaat

SEQ ID NO: 381147 - DNA, 3799 bp, Cannabis indica
acatcaaacacttttggtgtcatatttgaaagaggttagatatgaattatgaagaatgaataaaagtagcaatagacttacaaatgctcattgttgtcctccttgttgaaaagtaaatcttcaatggcaggtttgaaggtagtaaaacgcctttgtttctctgtgtggggaaagtagacagtttgatcagctccaggagcagcaatgttgaatttgggctcgaacacattgattccggaaactactcggcaaagtccaggcatggtaaacactgtgtggctttcatactgtccaggtcggctcttgctgtacaaaaacaacagtgttaggtactactgttaagttaactacagcagttcatttatttagactttcacctaaaaatctgttgctcttcaagttagtcaaacatttaacattactgaatttctattgttttctgtgctgtgtaaaatgcagcttcttaggtttgtaattgtaagctttaattctaaatctatgacctttctgattcatttctctattgtttttctctgtttttgaagacattaataatatgtctagtttggcttcctaaaagggactaatttcttaaacataactaaccttcctgcaatttcttggtaagtacttgttatgataaaatcagttgagttcattgagatcatatcagctgtgaactgacatgaaaaatggtacttgggatccaattccttccatttagcatctgaatcttcatactttgttttctctagagcatgagcaatagttccctaaaaggaaattacaatgaatgagaagaactgatattacaatctagcattgccaaattaagctaggcaagcataagtagttgtaaagaacctgagttattcctagtttgttggccatcaaagatgcaaccagatttccatcagtgtagtttcctattatgaggtctggttttccatccatgagctgaagaacctttgcagttgcatcctatggaagaatagaatcatcacaagtcaaaacaaaagtatacaaaggaaaacttctcatacaaaacttgacagagcttaaattacctgagtaaacctctcaaggtaagggtaaatatcgaatcgcgaaacccattggcgaagaattccttgctctgtcctgaatgggactctaactatatggctgtgcttggtgttgatgataggctccatctcttggttgcactttgtcccttttgcatctggtatcagccttgtcacctgttttgttgtaaaacattatatagtaacacaaaatcttatatataatgatttagaaagatttgcaactccattttatcattactcaccacaataattcttggcttaaatgcaaggccttgttgcttgattcttagtaacatctcttcttccaaggctctcacttgatcaagaatgtagaccacctagtaaaatattgccaagataatgatgattatgatgaagatgataatgtatggataataattaatggttgtgctgtgttgtgtttgtatgaacctggccaccagtatctggcaatccaagcacatcagactggccaaagtagccatgaggtgaaaagatgacaatgttgaaaatggctggtagcctggtgaagatcaactccaagttctttggatctggtgcttggagtacctcagaaaccatcttcattgtctccctaactctctctgctgtatctccccatcccttctcaaatcccaactctttcaacctgaccacgcatgtaccacaaactcaaatcataaactcaagaaaacaaagccatataaatatatgtatgtatatatatactatatatatatctcgaaaagagttttcagagtttattttgcactttgttcttgttttcataattctttaggtcattttgtttacatcatcaaaactagcccaacatgcaaagcaactttaaagattaaaaaaaatgagagttcagtttgccaagttctctattggaaaaataataagtatgtaagctgtgaaaatgctgacctcagctcaaaattatgatatggggtgttctttgggagtgtggagacgaaactttcacctacaatcaaggcaccttgaagacattcaactgtgtctagtgtctcatcaatcatcagcttctgctttgtttttaagccaaagaaattagattaagttcagtagtaatattatatatgtataaatatatatatatatatatatgtttatacatacctctcctcgatgagtgagagattgtaagtaatcaaccaagtgcttagcattgccagtgaagccgctgaggcctgtggacatgtgttttgtgatgaagctgagtccatcaccaatggaagaaggaagagttgcacgaggacttagaaaatctattgctccaaaatctatctctacagcattttcatcatttgccctgcattcatatagcattataaactttcactaagatcaattcaaattaatgacaaagaaagaaaaaaaaaatacaagtgaattattattattaccagtcatggtcgaaaatcaactctttgtactttaagaaatcggatgctgaaattccatcaacagtgagatcatcagcattgatcttcacatattcccagtaaccaggatttggtcttatggccatagcaacacaaggtggcacaacagctgcctcctacgaaaaattttaagaacaaaaaaaaacaagaaagaaaaaaatatttggcaatatggctaaagtcatttatgcacaataataatttatatgaaaattatttttaaggggtggtgtggtgactatttgcaatgttcaaatatttatattaaaaatatataagtaaaacttgaatacttgggtggaagtgagaatgtagccaagcaagccttctaaaactttgctcctttcttgaacgtctggtatagattggtccacctctttcataatattttgtgctttcattaaccttttcccttgtgcaacaaacctttaaaagttaaagcatttttgcatgaacttttacaaattgtatcaagtttatactattatgtagacattttgctgttatataaaaatgacaaaaataagtattttgttattatatataggcattatatattacggatgaaaagctatatataagtaaaaataaagatgaacctggcaaaacatttcttcatataataacggctctgcttcaaagcatcaggcatgctatcagcgatggtatcagacctctttaatgaaggagtggaagccattatatattatgtaaataaaacagaatgaaagaagccaaagaaaaaaaaatggttgaataaaaatccacaaaaaaagctatatggcctagctttgtggagtttggttttggtttttgtttttgttttatttggctgtgttgtattaaaatggaaggtgttatttataagagagaagaagttgaatgagggtaagcttaggacatattatgaaagaaaggtaaaaagaaagaacatctttaatgtgattgtgggaaagaaagattgtaagaaaaataaggaatgatatgattggtgtgttgtaagtaaccaaatcagctgtgtcttttcttttcttttttcttaaaaaagaaaataataaaaataaaaaccagcataatttgatattaaaagtgtagggaaagaatttgaattaggtatataattattattattattattattattattattattattattattattattattattattattagaaacgtggtcctttgttctcatcttatgtttattctttacttgtattttgtcctcaatac

SEQ ID NO: 381148 - DNA, 5077 bp, Cannabis indica
acagactctaacaacttgataataatctcttaatccaagtatttttttttatggaagcacttttaattctactctttttatatctaactcacgtaataaacacccatacataaatttttatgacccctaaaatatgttttatgtcagaattacaatgtaaactcgatatatacgtgacacttttttttttagttttgagattacgtgagactttgtaatctatcgaaactcattaattttttaaaaattttctgaaggatataatagtctatccatataggtatatagaatgggcaagttaaataagagaaaaatattaaaaaacaaaaaagattcatttgagagtaacctaatgtcacatatatgagcttaagttgggccattttagtggcacacaccaaaatggatttataagcttaacttggtttataagttatgtaatataaagtaatcttctatcaataaactaatataattatttttcttttgaattctagaaaaaatttgactatttttttgggggtgaatgaagaaatttgactacatataaacattaatttattctttgttaatggattttaattcttcaatgtggttttttttttttgtttgtgaagatcttagaagctggtttactaggcttttagaagtcatttctttttattatttttaatgagtttctcattttaactcaaaaaagcattttaaaaaaaaaaattagtaatttcttgaagaagagcttcttaagaaagaaatcccggaaatatcttatcttcatttttcttcttgattttgtaataaactgtcaactacttttataatgtagaaatttttttttattacttttacacttcaaatcaattattttatatttttacaaaatacacataacaacctatatcacaatcaaaattcacataacaacttatataaaaactaccagaacaataaatttaaaaaaaaatatatagtatataaaataattctcttaattttaaacttaaatatgcctaataaaagtactagtttcacaaatttttcaatatatatttataaaaataacgagatatatgtatatatatatataaataaatcattactacttttcacttatgggtaggaacattattattttaaacatttagaaaaattataacctaaacttttgttatataactgtgaatattgtagtaacattgtaataataataataataataataataataataataataataatcgacacacttggttattgacatttgatcaaaaagaaaaagaaataaacaaacaaaaacaagtaattctaattatcccgtttcacatacattttattttacacttattaaaaaaaaaaaaccaaaagagtgcaaaccactcataaagtgccacatcgagcaatttaatatacaaacgtgaaagacccctccagtcatgcagcaaataaaactgagttgtatgactatgattctgaaactaattataataaatagattaaggattctgtatgtacatacagtaacactacaataaacaagttttaaacagcagcaacaggaagtgaatgaatgcatatagccaattcaagttggcctctacaaccaaaaagattcatgggaataagtaggtaacccgacgatggaccggtagtaacaacccgttgctgattgcagctcgtgaaagactctaatcgaagagtggtttcatcggttttggccagaatttcgtaccagaagcccttaaatgggcaaggccatatacaactaatccagaccatgtacccgaaagttttgaaagtcgagttaaggatgaatatgacattgtcctttcgttcttgaagaacaacgaaatcaacacaatttaacaaggtgacagaaaaagtcgagttgtagtcgaatgaacgaacgccagtagagattgagtgttgacttctgaagtggcggtataactctgtggatgaagagatgaagtcacagctacgaatagggcaatggcatggagagtaagtgcaactcgtttcgtgctctttcttcttgttgtaactcactgtttctttacaaccatacgaagcgtttgagcatcttatttttacagattcaagaaccttctcaattgctcggcaacggttatatccgatgggaaaagagcaggaaggacatttattattaattttagtgcaacaggtagagcaagctgtatgcccattctcacactgaataataatcacacaagcattgaaataagaattaatattataagcactttcattcaatttcaccttctgtcttaaatgtttcagaaatactacacacaaataatcacatcaaattcaataacagggaaagtgggaaaccttatttgtaaataatataagcttgagaaacctgtgctagacataacattagcaagagctcatgccagttcttatcaatgactctcacaatatgttatatcaggatgcatctcttcataacacaacaagatggactaactaaaattatgttatgactacttcagactaactaccctaactgccacgacgctacccttatctttccctctctaaccgtgtagatgtaagcttaaagtgaatcagagaatcaccaataaaaactcaagccatccctttctccttaaaaatcaataggaaatttcttagcttctaagaagcattaaataacaaaaaagaataaaaccataaaagcaataggaaaatgaaaatgaaaggttacttgtattaatgaaatggaaggagaagaaaaatacatgaaactaaaccaacacactacaacccacccactataatggatactcccagcccagatgaccagaattgaggtcttattggttactcgaatacatcaccaagaaactaaaggttagcttgcatacatttgattaaagcttcagcattcacttgagttgagactcaatggtttgtactaaaagaatgcacatctaggatactatttcattaggttaagactttgccactattgcatttcacaaagaccacgacttgtttgtgcctatccacagattacataactaatcaaatatgggttctatagtatagtaatttacctagaatacttcctctgtaattttcaattgtaagaacccaattcggttaaggatactggcaatgttttttatattacaatggaattttgcaactatcaaaatcaatataaattttgtatatgtgcaccaaatttcaatgataaagcaataaaatactaaattctttatcttgagcaaaataagtacctggaaaacgggaatggtcaagggctcaaagcatatagagcaatcaagaacatctggatcggtcaaaacaacgggaatcgatttgtccctggtggttgagacagaaccatctgtaggagtcggagatcgacccagtaatgaaaaaggagatcgacccagtaatgaaaaatcatgctcggaaacattgctttcttcttgttcacgttcttgttcttgttcttcctcttgttgttcttcttcttcttcttctacttcttcttcttcttcttcttgctcttcttcttcttcttctatttcttcttcacctcctgttacgttaatgtcttctctttcttcttcacctcttgctacatttatgtcttctatttgtggttctcgaagtggttcaaaaggaaggtcataaccaaaagggtgctcatcttcgctggaggaataggagcattcgctttgcgcagaacggtgtcgtttcagtcttgaactactactgggaaaggctacgcgtttgcccccattttcttcttcttcatctccagacacagagaatctcgtcattcctcttgctctgaatctcctcaggctctgattctggtagttttacaacctaaattcacaatacttttcatattcacaaatcttcatctcacaatcttaaagaaacaccaataattacacttggtacttttgatgttagattcaggtatcatctatcttcacttgcctaaattctttcaacttcttataaaatcagatcaaattcaaaaaaagacatcacaacaaaatatttacccagttttattcttctgcaccaatttacccaataaatcataaaatttcaaaatcacaatggaaaaaattcatatcttctttttttctttcattatcaaattgagaataaaaccttatattcaaattccgtaaacctaacaaacaataaccaatcaaattcgcaactcatacaataaaaaagctccaatccaacaaagtaccaaatctgaacaaggacgcaaacaatatcatagattcctctagttttggtcaataatatcaaataattgaaatcaaattgaagagagcgatgaaaatttacctaattagagatttcgagcgcgagagtcgtcgtaatctagatgaagcgccaatacatatacacatatatataattatgaatttgtaattttgaaggaaaggaaaggaaagaagaaaaagcgtttgcaggcggcgacggcgacggcgaggctctgacctctgagtgtgaggtaagaagggatgaaattggaagaagatagcaatgttgagggtacatccgtaatttactcgtcccaggctgatgagtggtccatagtgcatccttagatgtgttgactttgactaatgatagtaaattggaaaggaaattctataatgcaccagggtacacctatattatctgtttagtatcgaaaataattattgacccccttaaaatggatatactgatgcattcttaatttgttttgacattcagaggaattttttagtctaattttttttcatattcatgtacgttatatctatttaagctatcctacaaaattttaagaaattcagaataatttacaatatagaaaacaatgttcaaacagtgtaaattttacacgcgtgtaaaataaaatagtcacgcgtacaacacactgtttgaacgtagtttttggcgtgttaaacttttttcgaattttttaaaatttttcagaatgtcttaaataactataatgtatatgaccatgagaaaaaatttgactaaaaaattatttcggatgctaaaacag

SEQ ID NO: 381149 - DNA, 1971 bp, Cannabis indica
tccaagggagactcatctatagagaaactatccaaccaagtcctcagaactaggaaaaaccttcccaacctgaaggaggacaaaccttaccacagagattcgatggcgagatagcctaaccctagcagccattggcctaggggtcagctaggaatccttgacactgcaacacccccaattgcccaacctgtggttggccagtaccctagaaatgcaaccctggttagccaacaaggtgaaatactgtcctcgaacatctaggagcgagtcacccacaagccaatctttaaccgatcaagctgaagaacgggtggaaacacccagataacaacaatttaagaagtgaacacaatcactttagacagttagatcaactaaactctagcaattggtaagatctgacgcagaggctttgcctattaatcaaggaagagtgggcggccatgccctgcccagcacatggcttgccagccatggataactttcaaactcagggatggccgacattgaatataacctctcacagggtatggtcagccaggctctggccaatccatggctacaactcaatcaagaaagtccaatcaaccagggccctgcaatacagatccttctgcgcaagcacaactagatcaaatacgagacatgatcaagggcttgattggcctaaaaccatcagacctcgagctggataggtcgaggggttcacctttctcggcatacattagtgccttacctatacccaaattcaagatgccaacttagatgtacacgggaaaagaagatcccctagtacacctaagatagtttgagatccaaataaatctccaacaagtatctagagatgtgagatgctacatctttctggaaactctagttgaaacaaccaaacaatggtacttcaagctggccctaggaaaatttaattcttgggaacaattctctcgagagttctatattcagttctctgcttcaagacaaataccttcatgactggaggagcttgtcgaaataaagcaaaaacaagatgaacctttgaaagaatatattcaatggttcatggttgaggccatataggtgaaaggcatgatagaagaaggccaatatacatccatactcgaaggcatcctactgttgagtaaattgtggaaagatattaaaggatctcaatgaccaacaataaggagttccttgagtgagttgatggcttcttaaagctagaagaagctattcggcaagctcaggcaagagggtaagtcaatgctgaatagacatagggcataatattgccccaagtgcggtccaatgtgtcgccagcagacaatccctgtcaattctccaacaatgagaatattggaggcaagcgaaacaacaatggctctgaccaacacaatagcaaaaaaagggcaattcaatgattcccttacaccataaaatctaaggaagaaagaggagaagtgtgcatgcttcattctcctgccaaaattcccaaagcaatgcatgtcaaccggccatggcaataggtgtcaccaaaacgtgaagtacttggtcgaccacttatgtcaaccgcagagactgcccaaactatgaggccacctattaatcaagcatggccaacaaaggtcgagcttttgacaacttcatggctaaacatagaagcatatcacccaagtccctcaaagtttgagagaaaagtaggagctggagaagaaggaagagtaagagaaaaacaacttaacccaagagatgcattgaccacatgcccgatgcaggcccaaccctcagaacacctgggggcaatggctgcatgaggcaacaaaggtcagtttcaaatcttctaacaacgagggtaaacatgaagctgtgagtgctggcctcaggctggcaaatgaagcgcaggctcaacacctagacatacagcacgactcttaactagtcgtcggtcatgtcctaggtgaatatgcagctcaa

SEQ ID NO: 381150 - DNA, 2437 bp, Cannabis indica
gtaattctgatttcatatatagaaagaatgttcttggagctaatgaataccagaagccacctgcaaaagggttctcacttttgtgttgatgcgtttaaagacaccgttattatcatactcttggtttgtcgccctgctctcgtttggggtttggtatcaagcaacaatggctggaaagagtgggtggtttgagtggggggagtattatttttgctgtctttcttgttgttgtggtctctgctgtgtctaatttcaaccagtctagacaatttcagaagctatccacaaagagcagtgacataagggtggaagttgttagagatggacgacgacatccaatttctatctttgacattgtggtgggtgatgtcgtttgcttgaagattggtgatcaaattccggctgatgggttattcttggaaggccatgctttgaaagttgatgagtctagtatgactggagaaagtgaccatgttgagatcaatgttggtgggaatccctttttgttgtctggaacaaaggtggcagatgggtttggaaccatgcttgtgacttctgtgggcatgaacaccgcttggggagagatgatgagctcagtaagcagggacttagatgaagagacgcctttgcaagcacggctcgagaagttgacatctttgatcggaaaggttggtctgtctgttgcaacacttgttcttgtcgttttgatgattcgttatttcacagggcacaccactgatgataacggattgagggaattcaatggcagtaagactaagtttgatgatatcatgaatgctgttataggcattattgctgcagcagtgacaatcgttgtggtagcaattcctgaaggtctgccgcttgctgttactcttactcttgcttattctatgaagagaatgatgaaagacaatgcaatggttcgaaagctctctgcttgtgagacaatggggtcagccacaacaatctgtactgacaaaacaggaactcttactttaaatgagatgaaggttgtggaggtttggcttggcaaagaacctctgactctgagtgaagatgttgtgtcgcaaatgtctccaacagttatcagcttactgcaggaatccattggtttaaacaccactggaagtgtttataagcaaagtcctgattctgctcttgaaatttctggtagcccaaccgagaaagcaatactttcatggggtgtgttcagtttggggttggatatagatcaagtcaagacaaaatgcgagataatccaagtagagtccttcaattctgagaaaaagaggagtggagttttaataagaagaaagcaggagaagactcttcaaacccactggaaaggagctgctgaaatggtccttgctatgtgttcaagctattatgacagagatggaaccattagggtcatgaatgacgaagagagaagatgcattgaaataatcatccagagtatggctgccaagagcttgagatgcattgcttttgggcatagagaagaacttgaaggagatgagcaacaggttcatgagaagcttgaagaaagtgaactcactttacttggtattggaggtctaaaggacccatgtcgaccaggagttaggatggctgtcgagacttgcactgctgccggtgtgagcattaaaatgataacgggtgacaatgtccacacagcaagagctattgcaattgattgtgggattctaaaacctgatgaggatatggaaagtgatgttgtagttgaaggtgtgaagttcaggaattattcacaagaagaaagattggagaaagttgaaagaatccgagtcatggctaggtcgtccccatttgacaaacttctaatggttgagtgcttgaagcaaaaaggtcacgtagtggcagtcactggagatggaacaaatgatgcaccagctctcaaggaagcagatattggactttcaatggggatccaaggtactgaagtagcaaaggaaagctcagatatagttattttggatgataattttacttcggtggtaactgttctaagatggggaaggtgtgtatacaacaacattcagaaattcattcagtttcagcttactgtgaatgttgctgctctagttatcaactttgtagcctctgtgtcttctggtaaagtcccattgactgctgtccagcttttgtgggtgaaccttatcatggatacattagcagctttagcattagccactgaacaaccaaccaacgaactcatgaagaaaccgcctgtgggtcgaaaggagcctctcattaccagaatcatgtggagaaacctcattgcacatgctttgtttcaagtcactgtcttgctgactctacaattcaagggaagatcaatcttcaatgtagatgaaaaggtcaagaacacaatcattttcaatacttttgttctatgccaagtcttcaacga

SEQ ID NO: 381151 - DNA, 3197 bp, Cannabis indica
atccttcttggtcccccatgatagagaaatacttgagaagaagaaaaaaaaaagaatcttttttcttttttaatttattgtaagctatgatctctagctactagaacattttttgcttgtgagtgtggacaaaggctcattcaaagaaggggactatagtgaagggtcattatataaatatatatgggtctaatctcatctcatctcatttcatggcttgtgctatttgctagctagttgttggaagtagtgatcattcaactatatataatctctgttatctttacatgattttttcccttttaaaaaataaaagaaaataaatttgaaagctacattgttattgtacatttatgatatggacaatataataaatatatgatatttagaatattatacatttggttttgcatcatattcaatattagctccttacacatgtcattttttttttattatattagcaaaaaatcgctttctttttatataatacgtgttaattaaggtgtatatatatttataaatattttttatagttgccattaattattcagagtaataattattcaactaatatatacttgtttttgttcacactatgtatcatcaaatttatatatgtcattcaaaatcaataagaggagaaactaattagggcttgattatatattaatcgacaaaaattatatacttatcttacttgtatcattattatatataaattttttttgaaaaaaaaacatatatatcgtgtacgaattgatatatcaaccaacaaaaagtattgaaaacttattatatattatatatagaatgtaataattagaaattatatataggaatgatatatattgattaaattaaggataaggatgaaccatttatttgagtattattagttgtggaagagcgaaagagtaattctctctataattgattagaatgagaaagaattatatctatagctcaagtagaatagattaacctctattactataatagaataacaaacaaaactaactctaactaacttatttaactcagctaactacctcattaactgaactctacaaagtttaatactcctcaagatggagtgtatatacttatcaatccaaaattttgtcttttagaactttgaattgagctgcaaataatgtcttggttagtatatttgcgagtttctccttagtcgaaacatgtgtagttttggtcacccccacttgcactttctcacagattatgtaaatggaaatcaatctctatttattctttcatgaaacacgagatttaaagttatttgttatatgtgttgctatattattgcaatacattgttactggccatttgtgtttgccataactctgtattctgcttcaacaaataattttaaagttgtttgatgctttttactttttcatgacactataaaatcaccaagaaacatacaaaatcatgttgttgatcttcttatatcaacacaaattacgtacccaatttgaatcaatataagccttgagttgagccttgatgttgcagagaagaataaacccttccttatgaagatttgatgtattgcaagattctttgtgcaacaaacaagtgtgttgtcctaggaatagagtagaattggctcaatttattaatagagaatgcaacatctggtcttgtaatagtcaagtactacaactttccaattattttctataaagatttgagtctacaagactatctttttcatctagcctcagtttcatattggcctccatggttgtacctgctagtttacatcctaagtacctacgatcttctaattaaattgcataacccctttgagatacaaaatacctttttttgatctagcaatttcaagtctaaggtaatactttaagtctttccaaattcttaagtttaaatctagtttttaatgattaagactcaaccagattattgcttgccatgttggataaatctccatactaactgtctcataaggaaataccttaaacaagttacaaggaatataaagcaagatttttttacaagcctcaacaggccattataactcttggagcagttggttttgtttcacaggctaaaatcttatagttctttcatagcccaacacaacaaatcacatacaacaacaacattataaaaaggaaagcaacctgtccatttaaagagagagcttcagtccagcccttggggagttacagtagctcattattgtggagaaataaacccaggaataagagagtaaaaccagagagaagagagagagttagagatatatgttgtaatatcaaaccagaaaaattgagagaagtatagagaaaaagctttaagattacatgctggtttatggcaaggaatctccaaaaccttgtaacctgagtttgacattgatagtggagaatcaagttgcttagagggtcgcctgacggagacgtacctctatttttagagggaactccaaaatcaatcgttgtggttatttactcttatttttttgttgtttttctttcttttttgttctctaacagacaaagatcggtctagatatttgtgaatttttgtgtatatctcggcttggttttgctggaggtttgaaggttcggtttgggagctcaagattagagcttggagaagaagagtagaagaaggatagtggcttggctgttagggtttcaaagaagaagagagagttgttggctgctagggttttgcagcaaaagattggtttatatactgccttgaacgacagagttttgagggaaaaagtactcttgatccgcacaagagggaaaggtcatttctgaccttgttttctgcctttgggagttgttggggcaggagcgatctgggtagtgcatgatttcctatagtggtatcagagctcggtgaagtaagaagattcaataacacctggaaacaaagtcaagaaactagaaagatcatcaaaacattaaagaaaccagatttgtgattatcaagaaattaataaacatgaaaactctaacctaaaatctatcttgctacattcttacttttattatcttgttcaatttgattaacatgagtaatattagagtggatgttgacaagcttgatggatcaggggattacatgatttggaggaagaagattagagttcttcttgctcaaaacaaattacttagggttcttagtgaacc

SEQ ID NO: 381152 - DNA, 1383 bp, Cannabis indica
gggactttaagaacagaattaagtttcaaaggttgagaagtagtaggaatagagtgaataccaagatgagttatgggaagtttcttaccatttccaactgtgagagtgtcaggaccagcatagggatagtcatgttcaagattttccatgccaagggcaatgtggtttgtggctcctgtatcggcataccattcttggtcaatggcaaaatcagggatcattgaggaagagtaggcttgatgttcctcagagtcatcaagttctgtgagaaatgctcgagattctccaattttaggggtgacaaaacctttgtcaaacctataatgacaaacagcagcagtgtggccaagtttatggcaaacttgacaaatcaaccgttaattagtaggagcacctctaccaaagcctttggggggaagacgattgttgtaaggttgatttgaactgcggcctggagcagagtaacgatttgcagcaggatttccatagcgattgggtccaactgcaagattggctgtgattttgttgctggtatctgcaatagtacagtgcctttctaacctactctcatgtgttataagtagggattggatagattcaaaggaaagatcatcaacaagactagttacatgaacaacaaccggatcaaattctgggcctaaaccatttaggatatgcatgattaagtcattttcatccatgggactaccagcaacagagagagagtcagcaagaatttttaccttgtcaaggtaatcagagattgaaagattgcctttttgaatggtagagagctgagatttaatttggaggagacgagctttagattgactagtataccgttgttcaacagcgcgccaggcagtgtgcgagctttgaaattgagccaaagatccaagaacggattcagacatggaggatcgaagccaactgagcaagagttgatcttttcgcttccaggcagtgtattcaggatttgtttggccattgaccaatctttcaggtggagaaattcctccgaggaggatatcatcaattccatggccgataacagtgggtatcacctgtgatttccaggcaagaaagttggaacgatctaacttgatggtgagagatgagtgaagagaattttggaacggattccatggatgagtagcaggagcagaagcagtattggtgggtgtgggagctgaggaacgaggtggattttctgggttttgaggatccattagagacggaggtcaagggcaatctgataccatgtaagagcttatctatgctaagaactatgagaattcaatctatgagattgcaattcaagacttgcaaaagctgcagagtcttttggaggagtttcatttatataggcagtgtacagtgaaa

SEQ ID NO: 381153 - DNA, 2124 bp, Cannabis indica
agatttgaattagaatagaaacatattatatgattattttgataaatcatttggtgtttagaaatatattttattaattaggtttcaattattaatgagcaatttgcatattaatattataagattaaacatatttattcacaaaataattaactcatataatgtaaatcaaattcacaaagtttaacttcttctttgaacttttgaagagaaaagttataattttaattattttttactataatttaaattaccacaaaacaatttgtatactattaagtacaaaataaaaagtaaaaaaaaaaaaaaattaaacataccttgcaactcagcacattgttccaaagtcaaatcccctaaaacaacaacatgcctatcatccatatgagccttaatagtaaactttctttgcaaaatcgaacccttgtcttgcacaacacgcgtctgcaacttcaaaatatcttgacctcttcttaccttcagtgacagattcagaatttttatttaaaattagatcattaaaaatttaaaacaattatattaaatatacaaatatatgtttttataaattgagctagtcacaaactagctaggacttcaccttaatccaaaccacatcatgaccatgttggctaataatctttcccaattgggagctcaactcggacttggctttgatagctaagaacatctcatcctcgacattctctatctcagagaatccctcgatgatgtcaccaggcaatggcatgctctcgtcccactcctcgggggcttggtcttgcttcacttgcttcacgcagactactgtctctatactagtttggctcattttgttgttgttgtgatcgtctattctaagagtattagaagaagaagtagaagttaagtgtttgttccccatttagagatgaattatggttaactagaaatctttctattttaattgaatatggaaagctttgggttttttttaaccatgtttgactttgagatcttctaagaggaactcttttaggttttcacgtccagaacatagtaataatacacactcttgtcatgttttgttcttatatataaggccaagagaaccgtgcctacttattttttaattattacataaataattaattatttgtaattaagctatgcttttatttttcatatatattatgttggtataatatatattgattagattataaggatgaacaaaaatagatggttggcttacacatatatttgctagtctaattaataattaatggaaccattttgagatgcccctgaaatttagagggtcttaggaaaaaaaattagtcctttatttagagtaaaatatagtattttttaaaattaataaaaaaatttataattttaaaagaaaataactttttttggactcttagtctaagtggaccatagtcacaggcttagtctccctatgtccaaagccaaacttattttcagcatataacaaattttataatatttctaataaaaacaaaatgaaaaaatatccaatccaaaagtagtgcaaagagagggaaaccaccatattagactttgaaactcaattagtcattattttctctataatacatcaccatttttttttttaaaaaaataaatgtctaaatttaatttttagcggtaataatacttaagttatatttctaaaactttccgagataccgttaaatgtcaagtcattatccacatgttatagaagtttcataatgtcaagtcattatcagtatatttaaaataattttttaaaaaaaacaaaattcaatgacctaaaccaatcagtaattgtcacgtgacaatttacttaacacttaacagttagatacctatagaagtttcataattataacttaaatgaccttgtttgacttagtttatatatttttttttagcttttagaattataaaagtcattccagatgtgtttggataaaaaataaaaaacattctttttaatttaaaagttcttttggaaaaaagtaagatttgtagcttctttcaaaatgacttttgagaaactatttttaaaattaaaataatttacataatttttaattggagaattatcccatatactgtttttttaactttttt

SEQ ID NO: 381154 - DNA, 2926 bp, Cannabis indica
agcagacgagttcggcttctcatgcttttccacaagccacaaatgagagtgaggaacaggttaataatgaagatcaagaacagtgtcctaatcccattgttgaagaagaacatgaaagtgatggtaatgagcaatgtggtgataatgatgatgatgatgatgatgatgatcaaagcttaaaagatccactttgagattaaaaatatacatatatgtgttccttgaactttttcttccttttttttttatatacaatatgtgtttcttggtttttcattttttgcttttattttctcttttgattgattttgatcactgaatgatatgatataggtctcttactgtaatttggctctctcatttttttttaaactaaaagaagaatagaaaaagaaaaagaaaaagaaaaagaaaagcatatgcatggtttattattattattattattattattattattattattattattattattattattattattattgtgatatgtatacaaataacaactcttactaaagaagaaaaaaaaaatgaaacttcttataatgatgtctttctttatttcttatccactaaatttggatatagttagtggtgttgtattaatcgatatgtccaagtgaaaaattggataatccattatatacattgacacagactaatttaaactatttttattattattaacaaaaaggagattattttttttttgagataaattaacaaaaaggagattacatgttgcaaaactcagtcgatcctttcgattttttttttttgacaattttggagaccacgtgtcagtaataagaaaattaatttaaacttactatgttatgccatatgatttttggtatatattcatgtatttttttaattatctttagggggaaaaagctatactattttcagttaatttcaaaatacaataggttttggtatggtggtggttagagagtctgttgggtgtggtggcagctagtgtggtggtcggtgaatgtgtgttacacactctagaggtggcggaagcattggcgacgacggccttatacggctacaagcctacaacaaagtgcaactagaatttgattgtcaagggctcattaacaagatttagaaactatattgccctaaaaattctttcttcagtcttattttttaagttatcgttgatgtttttaatgagtattttgatgttaatttcacttattgatttaggcgagcgaatacagtagtttatgctttagctaaacatgttagacaaactactgctaaaaatatatcaagttttttgttgagattaggtttaacaaaattataaaagtaagttaatgaaataaaaggaaagagtagataatcctagttattatggtctactcttcttatgacttggtctataataatccacatttttttttttgcaattgggcatgtttctaaaaatatgaaattaatgaaggagacacaaaagaaaggtcagaactaatattattatttgatgttgatttttgattttgatcatctaatgacttttaaaaatacaattgaaggaaagtattttgaaaaatctttgtgaccgattgattaataaatgattcactatttgaggagaattcttagcttgttgaaatggtatttataatatttttttaatcatatctaatctgattatgtaatattcaatttaaagatattatttgaaatttattgtcatatctattaattgttaacataaaaaattacaatattcttacaagtcaagtaaattatttttgaaaagaaatcatcaattattaactgaaatcctttaagattatattatgttatgaaaattagaagaaacatcattacttctgataacacgatcagtaaattatttaatttaggtccaatttaaaagtccatagaattttagaaattattcaattggtttaattaaatgtattggttgcattagataaaaatttatggaattaatattaaaaaaattataaatttgaagaaattcgtgggtttagaaattattttagtgaaacaaccataattgaagttgtaaaactctaattaaggtgatttgttggcattagaaatatctttcaaagatcaaagattcgcataaaagtaattaataacaacaagaatttatatccaaaacgaaattcgaataactaaagggtcaaaactgaactctaaaattacaatatgttatgcttagtaaaaacttctctcgtgatcagatcgaaattcttacgttttttttaatctattcattgatagtgataatctctcctaaagttctaagtattttgtcttttctgcccaaagcgtaatcaatcttaagtgatagaatgctctaaatctctctaaatatttcacgacactaattttagaaggaatatttataaatctctgcataacatatatcactgttggggtatcaatgcaagtctaacattgaaagaatagacaagaattacttagaatacaagtattctacctatttcattagtataagaccttttgggaaggtacttaaaaccaaaattgtaaggtaggccctaatccaccttagcccaggcccagccttggaactatatttattctcacctaacattggcctcttatttgtaccgacaacgttatcatacaacatacaaaatatacaagtcatactatatatatatatatatcaattcacattgattacatcagaataaaacaactccttccattcaatcattctaaccttaattcccttttgtagcaggggtattttgccaagtgatgaacttagattaatttttcttgaactcataagcgacaaacaatacaatcttttacaaggaattgagtatcaccttaattagagtggggtagtcactcaatcattataggcttcagagagagagagagagag

SEQ ID NO: 381155 - DNA, 7427 bp, Cannabis indica
atatatacaaatacaaatcaacatcaaatataatattacataaaaatataatataaaatataatttaatgtaatactatacaatacaatacaatatcacacacaatatatcaaaccgaccctaaatctattattcaaaaactttatgtttttcctaacatttattattcaataaatgaatatgaatatgccaaacacaattaatatttgctggttgtagtcttacctatcaagttctcaacattgtttgaaattgtagaattaattggacatgctacttaaacttgtagaaggagaaaataggaactactctctatacatgtaaactaattgtaaatgttatgcaaatttaaatctatgtataaatatacttcttaaactaaacattcaacaaagaaaaaaaaaacaaattcaacatggaactcaacattgtctcaagagagttaatcacaccatcttcccaaactcaccatcttgaaccttacaaactttgtcttattgaccaaatttccccaaaatattatttccctgtcattctcttctattccaatagtgatgccaaactctttgacctctcaaaaaccctaacccaaatgaaaatatcattgtcagaaacactcaacttgtattatcctttgtccggaagagcaaaagatgatcaatacatagatgattttcaagctggtgttcctttctttgaagccaaaatcaattggcaaatgtcagaattcttccaaagagaaattgagtttcataaccaattactcccttttcaaccatttggaaaaacacccaataataatattcctccaattgccttccaagtgaacatatttgcttgtggtggaattgcacttggtattgtcttctaccatatgattatggatgctgcaacaatgagcaactttctcaaatcttgggctgctttttcttcgggttcaactaacaaggtaataaaccctaatctcgttgaaggaactattctttttcctccaaaagaaattgattttctcaacaactacacatcagtagtgaatcgcttctttttcaatgagggagagtatacggccaagagatttgttttcgccattgaatcaatacaaaccctaatagagatggcgaaaagtaaacacgtaccaaaccctactcgtaacttggctgtcacttgtttcatatggaaacatattatggcagcatattgggctgattccgagcccaatgatcttattacagcttgccaagtgatgaacattcgtcctcgaatgaagtctcgccataatggtgattcattagatggtgttgtgggaaacttagttgggcatgcaggctcagtttttgatcctaataacgaccatcaaaatgttaagaatagttctgacattaagttgagtgatttggtgagacgactaaaggaagccatggaaggatttgaggactattttctatgccaagtgaaaaaaggtggtgaggaggcttcatctgagatgttggaacaagtagggaatctgagtttattggataagttaggaaagcctaatcacttcatttcgttcaccaattggaaagggtttttcaaagaggttgattttggttttgggaagtcatttaaggtagagccaatcttaggaaagatcatgagtaaccaatgtggaaatatggtgatattggttgatgctgatcgatggggtaaaggttctatggaagtctttattatattagaacacaaacaagtgtcactattagaaagagatgaaaattttttagcctttacttctaaaagctcctaactaatttaatatcttctagtaattaataaatgttacctctatatttctctaaataatttgtactgtttagtactcttgtcatgattactattttactatacctataaataagaaaaaggttgtgtttgttattttattacaagctagtatgaattattatcttctagctagaatctagtcttccctaagtttatttcaaaagaaatggtaaagatactctcttttttctactttctctttctttagatgacaagtgttatatagtgtgagtatggttaaattttggttaataattagtaataatactctaatattattacaaataatgccctactaacttaataccttttataaagagaaatgctaaaggacaccagtggtgcttagcactctcctacgtgtcaacattgctattggtccaactaaatatcggatcccatataatttaatataatagcttttagagagtatcgctaaccaatcgcaacgcgacatattgagaaggtgttaggcaccactgatgcctaatagcaatgctctttttataataattgaatttattataatcggatcattacttttgaccctttttctcttttaaaaaaatcactatacttcaaattcagtctactccttcgaccaacattccgtacaataaaaatattttcaaaaaaaaaaaataattacgttaaaaacaaagcaaagtaaattaatatgtataaagatttttgataacgcagatcttcgttaactaacttaataagttttttttacaataaatttactatagaaataaataactaataaatgataaaataacactaaatattttacgtaattttgtagttaaaatttatatactttacgagtccttcttattagggatattttttggataccaaatacaatagaaatatttgaaaaataatcttgtttctttcaaatttttcgtcccatttttcatgaattttgctcctatttataggtacataggtgtttaccaagtttttcggaaatcgaataattttagagcttaagaaagtaatgaaggtatgaataatacgacaacatgcaaaagattttacgtggttcaggcgttaactatccttagttcacgagtccattttattaggctctttcgccggagattatttatacaaatacaaaatgatgaactttgctcctattcccccgtgttcctcttgaagaagaaaaagcttattaggaatattttggagttaacagtagggttaataaacgatatgtttcctttttgtgtgaagggaaggtcttggatctactttgtgagagtccaaaggatgggtctggatcccttctcttgtgcactcattggagtatttataggttgattccatggtgcagatcatcttgaatggatcttcatagggatgaacccccatcgttggattggtaggtggcatgttttccatgtggtctttaccgatgtcagattgtactggctacaccggtggggcttcggacgcgtgtcgtctcagggccattctcttttgaatttctctcgtccccagccattggattgcttagcatggtacgcaaggacgagactgctctgcatggcagtgtgacatgggagacaaactttgacaccgtacacacgaaaaaggtgtggtcagtgcgcggactaaacttttgcgggttgaaggtgcatcccgaactgatgcaccctggtggaaggctcatacccctcacgggagaagggatcacatcttctataatggagaatgtcgctagctcgcggacatctttttcgtggtctcctcccgagaaggctcctctcgctaggacctattctgcgagttttatgctgctatcttcccagagcacaaggcaaggaactttggtggcttaatgactcctcgtccttcctcaattattatccacgtgttgttccagcaaaaatgtgaataacatttaccgcccaagcttcaggaacgtatcatggtccgagagcttgcagtatcttctcttgagggattttctacgcacgtgatgtttatgacaagtcctttaatgcgctacatcatcaaccgtcaaaccgaagtgccattacgtggaagacatgatttcttctgctttcttgtcagagtgttaaatggtggcttttggatttctgcgtgcgtgctgggcgtgtgtccctgggaagctcaaaagggcgacgatggacttaggcagccttttctagagtgtttttcacgatgcacgcaatgatgggagctatctgttgggatgtgaggtaccctttcagcttctcacgtctaatcattggacatctcttggggcgaactgaagcgtatgcttctcacgaaatgtgccacttccagtcctcccataaatacttgcaatggccatttcatttttcactcttcttgcccgtcaaatcataacttttgagttcccttcttcccagttgcatttttgttgttggcgctacatcaaaacctctgattccaacattcttccctcaatcgataagttctttgtttatttgatgttaagagctttggagggaatcttgaatagtgcactggcctgcttctgggaatagcagtgtcacttctaggaattatggggtcaaacaataaccctgttctttgttatttttgcttcatattatatgcttaaattaactctagttttcaaacaagcaaatacaaaaattaaccaaaatagagaatgaagttagaagtttggttattaaatattgatataaaatttatatgtttgaactggattttaaagttagtatcatttttaaagtttggttattagacattgtgtattttttattatgttgttgaggaagctattttttttttttttgcctcttttaataaaatatttagtttcttttaatattgatgaaattggtttttaaagttagtatcgttttcagattataattttttttcatcatcttgttgatgagatttattttttttgtacttcttttagtgaaattattagtttcttttaatgttggtgaaattgatttttaaagttgtattattttatattataatttttgaattgtgttttttccagtatgatgtagatgtaagttttttttttttttttgtgtaagcctttaaaaaaataattagtttcttttaacattaataaagctggtttttaaatttgatatagcttttatattattattattattttattaaactggttttaatttgtgattctcttggagatatttacctcatattgaattattaaatcaattctgatttttgagcaagcaaataagagataaattgtcaaaatagagtttgaagttagaaattgggtattaggtattcaaataaatttatatgttggaaactgatttttatagttgatgtcgtttttatttatattttttgcaatgtattttttatttttttcattatgttgttgacgaaattagttttagtttctgattctctttgttatttttaccccattttgtatgcttaaatcaactctgctttttgaaaaagcaaatgaaagattgaatgacaaaataaagaataaagttaaaagtttggttattagctatttatatagaatttatacgttcgaaattggtttctaaagtttgtatcgtttttagattataattttttacattgtatttttttttattatgttgttaatgaaactggctttttttttcttctagttttagtgaaataattagcttattttaatgttgatgaaactaatttttaaagttgataatatttttagattgagcattgctattaggtaccagtggtgcctagcaccttctcgacatgtcgttgcgatcggctagcgatactccctaaaagctattatattaaattatatgggacccgatagtttggaccaatagagatattgacatataagagagtgctaggcaccattggtaccatttagcatttctcttttagattataattttttgtattttttttattatattgttaacaaaactggtttttatttaaatgcaaatattctccttttgatgatcactggtacattttaggccttcttgatttggaaggctatatacacatatacatatgaagggacacttgctttccaagcttcaaaccatctgcctctactcaaagtaaaagctgcctgtaaccctctctaaaactttcttaattaactccaattccaatttccaactccaattccagatggggaatcttaaattccattcttaatggggtttgtttggcagttacatatactttctttacaataaatcttcataagagaactaagatgtgaatgagttttgcttgcaattcatttacttgaccaactcattcatatcttaattcataacttagtagtactgtaaacatattattaatttttgtttcaagtttttaaaatatcaactacataaacactacttgaccaagacaaaccaatgactttaaatggcctgaaaagttggtaaatgaatttattattttttattttttgctgaatattagtacatgaatttattgatatctgtatctgacatctgtactatgttgatccaataatgcaacattcataattaaccatccccaccagaaacaaatggctcagatcaaaaacaggaaatttaatgtctatctataactgaatgaccactaatttttagcaggtaattttaatttattctatgaaaacaaaatcccttcttttcttattactgacccaaacaaaagcaaaccattcagataaaaacaagaaaaaataaaacatagaagagataatgagtttaggaaagcagaagagaaatcccaaatgagatagtgcaaaccataagtccaaacagagccaagaacccatatttgccgatcttgaggcgattcatagggtcaccagtggcatagcctttgaagtagaaaaaacgagtgattatatagagagatccaagagcagaggagatacaaggatgctttattcctcccaaaatcattaacatgaaatacacaggcatcatttccagagagttctggtgacctctttgaacacaattgaagagattagcctctttgttattagattcagaggcatagagagttgggtagggcaccttatatctgtatcatcatcaaaaaaagaccatttaatttgatgaaaattgaagaaaaggaaaaaatgaaaaattgagaaatggggttaatttattacttctttcgagctttgccgacttgaaaacccatccagaaattgagaaagcagtatgaaacaagaacaatagggacataaccgtactctttgggaagaaattcagcgaaccccattttctgattcttcacccaattcccttagcttaggctatatagcttgtattgtatggttatgattattcaactttgttttctcttttaatgcttttaatagacgtatatacttaggtcagcagcgacttgatggacaaggcaaaaaggggtaatctcaaaaataccacttttatttatcaattaatcaaatactctaagagagtaacatggagagtatcacaagaaaaaaattggtataaatatttaaaaaaaaaaaaaattaacaatggtatactaattttaatatttttatataaaaatac

SEQ ID NO: 381156 - DNA, 5026 bp, Cannabis indica
ataagggagagagtaatagttcaatggtaccacttttttaaggtagtaccctccccctacgggtaaccaaacaacaaacatagtaatcttaataatcattaccatagcggagatagttcatgttatttttagatctactcacgcactgttgaattaccatgatattagctgtgatattagctgtgatatttgcagtaattctaggattaatttcttaggtgattctttcctattttaggaatgaatagctgtaagtgagtgaatgaaattagctgtaaatgagaataatgggttgtaattatagaatgaaaatcctatatataatgattctgtaaaagcataacagtaatacaaaataatggatatcaatgttgagatggtaccaaagtctagccaaaattagattccaaaaaaaaaaaaaaaaaaaaaaaggggcttcatcagaaagtttttccaaattacacatgccgtggtcatggtcctctgttatcaagcttcagccactaaaatcacatccaaagtggtgatatctttctattatcactaatatatatatatatatatttctgtcatcatatatatatatatatatatatatttctttcatcaaacttgttatttggcacaatttgtcagatcttattattattattttttgtttctttcctggacaatattctttgaatcttcaataacataaaaatgtctgacaagaacaatgaaacaattagtgaaccttcggcaataaaatctgttcccgtatttgtttagtctgaaagcatgttcaatgcaggaatcactcttacagaatcaaactatgatgtgtggtcacagattatggagatgcacatcactgaaagagaaaaattattctacattcgtgggaagaaagaacttcctgcagaatcagatgatggttatgacaaatggcaagctgagaatcaaaaagtcaagagatggttgctaatgtcaatgtctccagacatcatgaaacgctatctgcgtttatccactgctcgtgagatttggagtgctctagccaaagctttttctgatgacagtgatgaattacaggttttttctttgaatcaaaaaggttttgctgcaaaacaaaatggcagacaactctctgtatattatggagagttaacggaaatattccgagaacttgatcatcgtgataaaatcatcatgaagcatcccgatgatgttcttgcatataaaaagtcgattgatcggcttcgagtacacatttttcttgctggactagatggcgatttcgaacaaatttgtagagaaattctacgaagagattctattcctgatatagaagaatgttactctattgttcgtcgggaggcagtgcgtcaaaccaccttcaactcagcaaatcacgacgcttccgcattagtcacgaagaatcgacccaactcttcaaggtatgaaaatcatgtagataagtcatctctcaagtgcacccactgccagaaaactggtcatacgaagaatagatgttttgagctagtgggttatccagagtggtgggatcataatcgctcaaagaagaatcaaaaaggcccttccagtgcagcaacagttgctgcaacaaaaactgaagatgtcattactaaacaagcctcggcattggtaatttcttcaaacaatggtggtaaggttttaaatatttctacacctgttttgcatagtacatggataattgattctggtgctacagatcacatgacatttgattctagacaggtttcatcacttaaatcttccaaccaaaaatttgtctccactgctaatggtgattcaaccccagtcattggggaaggatctttgaccctaactgataccttaaatttggattctgttttagttgttccatctttagactataaccttttgtctgtttctcaaataacaactaccttatcttgtgttgtaattttttggcctgatttttgtgtgtttaaggacatcaaaaccaggaagacgattggttgtggtattaggagggggaagctatattacttggacatggagtcacggagcattgaaagcctccaacaagctttgacagtaggtgttgagaagaaaaaaagggaagcagaaatctggttatggcatcatcgcttggggcatgcttcatttggatatctaaaaaaattatttcctagtttatttctacaatttgatgtgtcttgtttccagtgtgatgtttgtgaacttgcgaagagtcatcgcgcttcatttccattacaattgaataaaagtcttattcctttcatgattatccattctgatgtttggggtccatctaaagtgactacgttgggtggatcacgatggtttgtaacatttattgatgattgtaccaggatgacatgggtgtgcatgatgaaatccaaaagtgaagtgaattcgctattccaaaaatttcataagttaatccaaactcaatacaaaactcagattcaagttcttcgtagtgataatggtggagaatatcaaagtactgatttgcagaaatatttggaagaccaagggatgatccatcatactacttgtcccaacacaccccaacaaaatggagtagcagaacggaaaaatcgacacttgcttgaggttgtccgagcattattaattagcgctcatatgcccttatcttattggggagaagcagtcacatctgcagcttatttgattaatcgagtaccctcaagtacccttgatttcaaaacaccactccacacactaaccgaagcgatgattgccccaccagttcccaatttacccccccgtgtctttggatgtgtagtttttgtacatctccataaccatcaacgtacaaaattaactcctcaagcattacggtgtatttttatagggtatgccacacatcagaaaggctacaggtgttaccatcctccaactcatcgattatttgtcacaatggatgtcgttttccatgaaaacattatgtacttccccgagtctgaatttcaggaggagtaccgaaaggaaattcaaactctcaactatgatgaaaatgacaaccaagatgttgtcaacttggattcaagtggtatgatattggatcaaagtggtgatgttgtcaacttggatgcaagtgggataacattggatcaaagtgttgatgagcacccaatacctgaagaaataagcatatcttcatctcagcaagaaattgaggatacagtcccaactccatccgacataccacaccaatctcttactgaagatgttcctgagacacacaagagacaactacccccacgtcacactagaggtatccctaaactcacatatgaacctgatttatctagtaaagtcaaatatcctatgagccattatgtttccaaccatcgcttgtcagactcaaatatgtcttttatgaatcaattatctgttgtatctattcctaacagtgtgcaggaagccttagctgatcccaaatggaaaacagctatgaatgaggagatgaaatctctaaaaaaatgagacatgggatcttgttgaccttccaccggggaagaaaccagttggttgtcgatggatctacactatcaaatacaatgttgatggcacaattgaacgctttaaagcaaggttggtggcaaaaggatacactcaaacctatggagtcgactatacagagacatttgcacctgtggccaagatcaacacagttcgagtccttttatctcttgcaacaaatcttgattggcctctacaacaatttgatgtaaaaaatgcatttttgcatggagaattgtatgaagaagtttatatggatctaccagcgggatgcaaaatgccagaaaaacataatcagaaggtttgcagattgaagaaatcattgtatgggctgaaacaatctccaagagcgtggtttggacgatttacaaaggccatgaaagcctttggatatcagcaaagcaactcagaccatactttgtttatgaagaagcaacaagggaagatcactgtccttatcatttatgtagatgacatggtggtcacaggaaatgatctagaggaaagaaaagctttacaagaatacttggctaaggaatttgaaatgaaagatctaggtactttgaaatattttcttgggatagaagtgtcacgatcaaataaaggcatttacttatcccaaaggaagtatgtcctagacttgctgcaagaaacaggcatgtcagcatgccaaccaattgatacacctgttgaagaaggcttgaaattatgcattaagagtgatcaggttccagttgacaagggaagataccagaaacttgttggcaagctgatgtacttagctcatacaagaccagatcttgcatatgcattgagcattgtcagtcagttcatgcataatcctggggaacaacacatgaaggcagttatgcgcattttgagatatttaaagtctgctccaggaaaaggaattatgttctctaaaaatacagaggaacaaaccatagatgtatatactgatgctgattgggctggggacaagaacgataggcgatctacgtcagggtacttcacttttgtaggaggtaacctggttacatggaggagcaagaagcaaaatgttgttgctcgatcaagtggagaagctgaactaaggggaatggcacttggaatttgtgaagggttatggctaaagtttctactagaagatttggggtacccaccaaagaaaccaatccagttatattgtgataataagtcagctcgtgacatggcttataatccagttcaccatgatcgaacaaaacatgttgaggttgacagattcttcatcaaagaaaaactggaagacaagattttggaactaccggtgatccgatcagaagaccaattggctgacatccttaccaaagctgtatcaaaccgagttttcttaaagtttttgaacaagttgggcatatgtgacatctatgcaccaacttgagggggagtgttgaattaccatgatattagctgtgatatt

SEQ ID NO: 381157 - DNA, 1467 bp, Cannabis indica
tattcttggaagatcaaaacattttctgcaatcttcaataatggtttcaggttagtgtttctgcttatcttttatcagcatcttcttctttaatttagcaaaggttccataaatttttgatttagaattttctatattaaaacacttttaggaatatatttagatctgtaatatttatatttcttaagtgtttcctcacaatatatacaatcccatatttgtatagacataaaaataagggtaccctataatgataaaaatatttatgttatagaatcgtataaacaaataaaataattatatatctaaatttattgaatgattcattggttgatagtttcaattctgtggtgttcataattcattgacgaaatctatatttttaagggtttgaagttattcaattttaactaaaagatgagtgggatgtacttataattttaaaattaataatttattaaaaataattaattttaaaaatttccactctcgtcgtttcacacaaaattaaaaatatatttaaaattttagagtttacttaacaataattaggatggaaatataacttttaacttttaaaaaatcttgacagggaccatggccttaatgtacacccgtctgtgtgggtgcttgttgggggtctcattatatttttatttctgattttaagagagaaagtgatccatgtgtgtagttgtgtgtgtgatcgatgtggctagcattaacacataattaatatgaatttttttttagaggtttgagtacagtgaggcgtgtgtgtgcgtctgggtccaaattaaatactttttattctaagagcattgctatttggtattagtagtgcttagtatctttgcgatatgtcgcgttgcaattggctagcgatattccttaaaagttattatattaaattatgtgggacccgatacttagttggaccaatagcgatattgatacataagaacatactaagcaccactggtgccctttatcatttctcttcttctaataataatgttatgtcaaccataattggagctgtaaccctcaatttttatctggagctgccaccgtaattaaaggactagatcagagagagtgagagagaggacagctaagataacatatgataacagatatgtgtttcctccttttatgcccagtcgtaatgaaatagtcatacaatactctcacttgtccctcatcagtggaccatcttaattaattagtatatctaagtcaacctaattatttgtttagcatgatttaatacaaccttcccttactacatacatgtataaatctacatttccttctaacttagtgatatgatacagaaaaggagagacacactatcctgacattattttcaataaaatcgaattttatccacatgtagtcagatttaagtaatataaaatcatttttttttttgtatttttttaaatttttttttttttatttaat

SEQ ID NO: 381158 - DNA, 2202 bp, Cannabis indica
cgtccatagagaaatgctaaaagacacccacgtgcctagcaccattgtgaagtgtaatatcgtctattagtacaattcaatatcgggtctcacttattttactttaaagattatataaaaccgctaactatttatagggcgccaatctcatagtggtgctaggcaccttgttgcctcaaagcagtgctcaagtcaataagtagaatactaacactttatctggaggagagttacactatgtttggcatgattatgaaggattttagggtggaaggaaagagttagaaaagagaataaatcactgtgtttggtaggtaggaaagaaggagggagaggaaagatggaaggatatcttctccctccaaatgtacaaaatccaatcctaccaaaggtggaaggaagagaggaaaggacaaaataaagtttattaaatatcctaaatacacttcataaaaaagtaaataatatatatttgaagaggacaatatagtaattttaataaataactatctttctatccttccaattttacttctaataccaaacaacatgaaggagacttgttatcctctccatcttttctaaactctccctccttcctaatttccttccctctcaccaaacatagtgttgaagtttaaccctagcaaaattagttacctataatgctatagatgcactagatataagttataagcttaacaaaatgcaggctttttctagtttgggaaaaagttcaattttttaataaaattgtttaggcatgttatgaacaatcaaaactgacaatactctgttctgaaacacaagttattgtataaacagaagaagacacaagcaattaaatatgtccttttttctagcagcagggtcaggcatttcttatcaaaaggacccggttggtacttggtgcagactcagctcagctcaactcaactcaactcacctagagttaacagtatacaaaaaataattgaacttactcagccacgtgagtctttacaagagcaaaatatattccccaaaattgatgttccttcatgtaacctgggcatagcttatacctaagttgtgaaatttcctgaaacatgagaaacccatatcagacttacagtaatgcagaagctgaaacgtgcatacttgcaatgtgtcaaagattattgtctaggaaatttaagtttcagaaacttcttcttgtaaaaagcacaacttcacgtgattagtgtatgatacaaatatatatatatatttatatgtgtgattgtatataatatatatacacatacatagctagagagaaccctcacaccttcactttagagagaacaagagttgcatgccgttcctgccattcagaaagatcacttcgaacgctgcccgatgttgttgggaaatctccaccatttttctcttcctcgtcatctacgtaacaccattatcaatttttattctaattcagattccttttgagtgttgtaagctaaattaagataatcccataacctaaattccaagtaattgcaacaatgtgtgaacaaaatttagagaaactaattaaatggataaagtttcgatttttattatcaattaggttacgattttcccaatactcaaaacaaaaacaaaacattaaattgatgaaaagaaaaatcaaagaagtaagtaataccaagaatttattatcgttttctttcactttctcagcaaccaaacaagtacctgaacgaggaaaattcttaaaggtgtctaaggtgaaggatttgacgaaatcgatcaacttgtcagtgactccgagaatttgatcgtcaaatttgtgtggttgctttggttggtcagaaagatctgagtttttagtgcttttactgttattgttccttgtaagactgcgtcgaaaccaggaagaaatgtccatggctttcgatgctttttctgctctgaaactgaaaactgaagaatgaagatgaagaagcttcccaccacttctcactcctcatctgagatttgggccgtaagcccatgatatttttggaccacaaggcccatatctgtttcaacacaaactaagctcagaaaatatgggcccagataggccctgtttcaagaaagttataatatctatatatattaaaagtacctatctaacggcattttttggtttaaaattcttggtttaagagaataaacttaaaaataaaagaatat

SEQ ID NO: 381159 - DNA, 1826 bp, Cannabis indica
gcaaatagaatttaaacattcaattatatgtaattttttttagacgcatataattaattatttgaattatattttagtacgataaattatatgcataaagttttatattttttaaaattattattatgattaatgtcacatgaacaactatttgctagtctacccttgtttttgtagacatttatttttatatacatatgatcattatctcatgttactttcttattatttttcactatttattttacctttttttcaataatgatatatatatatatattattatctccctgtattatttatatatatgatgggacttatataaaattataataatataatttcattttcatccaaaatatatatatagaattgaaaaatatgcacaataaaaattttagttacaacaaaaatagtttgtgactaaatacgtgtttataaataatattttagtcacatatttgtgacaatatatctttaaatttttaaattttataatttattaaatatcacaattataaaattttatgactaaaatctgtgactaattattatttagttatcacttattttcttagattgtcactcataattttcttttagtcacaactatttattttgcatactcattagccacaacattacttaattctagggttgaccctaaaatttagtaggtcatagaaaaataaaatatttttgggcccttatttaaaattacatgttggtattttttaaaaccattaaaaaaagaataattttaaaaggaggaatttttttttgcctttgggctaagtgggccctaagcacacgctaagttcacccagagacgggcctacttaattcctttgttactaaaatgtattaaaataaaatttaaaatctatatttacagtatagttacctctctctctctctcgcttgccatctcgctttgtaactgtaacttctccaattcccttttcattctctgccaccctcactggccccgacaaagctctttttttgttcttctctgttgcggcttataatttagttgaaagagatgttgtggtctttcatttagtatcttctattaaatttaaggtaattattttcaagactctagcatgttattgactttttaagggtcatagcatgttcaagtctctagcatgttttttaagaagcatcaacatggtattagtatttttttaacttacttggcatttgaatgccagaagtgccatttagttaatattttcgcatttatatacatattttattgaactgtgaatataaattggattccacgagtatactatttcgtataaatgtatgttcactaatctttgttgttaataattttgggtttgattttttgtgtaacgtcccagtttcaagctttcattgggcctttcccactgaccaatggctcttatacatgggtacgccactctggctgctttctggattaatgactgaccctacgaaccaatacaagtattttcagtatgctttgtcctcactcgcacgcttaactgtggagttctttcatgatgggctaccaaaaaaaatggaccttgttgatataggtaataccaatcaatccatttaaaatctcttcaactgtgtatacacagtctcataatcatcacacttgacttttcctaagcaatgtgggattggacagcttacccggtatctccccttacggatcacgggactactaactgttaattacaattaccccccttatggggtccgacgtcctcttcgaccacactttcgactgggtcaaggctctgataccatttgtaatgtccccgtttcaagcctccattggg

SEQ ID NO: 381160 - DNA, 4180 bp, Cannabis indica
tttattttttaaaaaaaatagttgctccactccactcaaaggttatgcatcattttcagtgaaatcctccttgtttgtttgaagcaagtttgatgcagaatttaaaacactacactaattagtaaagaacattgagtgttattataaaggaggattttactgaaatatagctatatgaaagcaattataaaggattttacagactataacattgagtgtatgtgagggagaagagcttcaaatagtcaagtatgccttgtttgtctgcattttttctctgtatttagccatctttaaaaagggaaatcttaaagcttatggaaattttgtcctggatctgatttatcacaatgttgcttgtctgaatttgcacttctctctttgttattctgttgggattgtccatccaacttgttttaggccttgtgtatgaattgttggcaacgcataaaggagaaacctggaaaaaaagtagcgatgtcaaccatgtttattaagtttaaactttggggagaactgataaattaaaagaaatcttttacactaaattcctttactataatttctcacagagctttgaggaggcattattggcagtggaagcagtgagacctgttatgctggtgactgatgaaagctgcaagttatggtcttcgaagctccaaaactatgattttccttttctaaggtggcatgtttccttggaatcctcagactcagaattgtcaaattcgaagaatagtatggcatttttcttattttttagtttttactatgacctgaaatgtgtgctgatgaaatttagtttcatattcttatttttgtccagcactaactactgaaacactaaggaagaatttggtgaaagattcatcattgaattactcatgggcacctgatggtgctgttcttatatgcttcacttcaggtaatcatctgtattttcttctgacaatatatccgattatccattcaacattgtctaaggaatttcactgagaaagagaatctttacatgtgtatgataggagcagaaactatgtttatagcttttcagcttctaattaagtcgcataaagatctagaaggaagatttttttagttttaatagtctgattttatgttatgtttataggaaccactggaaggcctaagggagttattataagccatttaaatttgatcgtacagtcccttgctaaaattgccatcgttggttacagtgaggatgatgtatgccttttctcatgaaccttttctgttactccaatgtttgtagtttgcaatatcaagtttatgtctttcataattatgttttaaggtttaagcaaagttcaaaaggaaatgaaggaagtattactgaatgacttttgcttcatatatatacaggtgtatttgcatactgctccactttgtcatatcggtggtttgtcttcagctatttctatgctactcgttggagcttgtcatgtcttcatgcctaagtttgaagccaaattagcccttgaggtcatacagcaatacaatgtcacttctctaatcacagtacctgcaatgatggctgatttgagttcttcaacaaggtataacatatttgtttgatagacccgaatagggatcctcaattcaatagacaaaacattatgcagaaacaatgagagattgagggtagaaggaaattgacagcaggcaaatttgagaattgttgtttgaattgaacaaatcgatatcgtgaatttgaagaatatgctggtaattcagttaggaaatggatatggtgctatgaaattgtcactctcaagaatgttctatcacccgcattgtcctgtttaataataaaagtttataaatacactaatagttttctaagtacatatcttcaaacatgttagggaaaggataactggaagggagtagagagtgtcaagaagatattaaatggaggtggtggtttgtcaattgcactaaccaaagaagctgtcaaattatttccaagagctaagcttctctcagcatatggtgggttaatcaatttcagtccattctagcataataaaatcttgaactagatgtactcatattataacaatgtctctgctgcctcactcattttcttttgtgtccttatttggaaaggaatgacagaagcatgctcttccctaaccttcatgaccctgcatgatccaacagtacacaaaactgtcgatatctcaaagaccattccagcacacaaacaacaaggtgtctgtgttggaaagccagctccccacatcgaagtaaagatccattctgaagggtcctctcatgttgggaaaattttaactagaggctctcatgtaatgcttagatattgggatcaaagtcccaaaaattcatcaagttccatcaaccaagattggcttgacacaggtgatataggttatatagatgagtatggtaatctttggctgattggaagaacaaaaggtcgaatcaagagtggaggggagaacatttaccctgaagaggtaagcttggtaatgttcttttgttgcaagttacaagtactaaaagttgatttaatgttctgaaaaatctctgatctttaggtagaggcagttctatctcaacatataggagtacaaggcgttgttaccgttggaattcccgacactcggcttacagagatggttgttgcttgtattcaagtgagaagagattggcattggtcaaatggaagttttgagcactcaattgggacacaaaagcaattcatatctcatgagattctacaacagcattgtagagaaaggaatttagctcggtaatgctctcttcttggaatccataccttagaaatgttgaaggtgtctttggctatactatatgatcatgttattgacaacactttctttatgattttttttttcaggtttaaaatacctaagaaattcatgcattggaataagccatttcctctcacaacaactggaaaagtaataagagaacaagttaaacaagaagtaatgtctcaattacgatctttaaatagtaatttttaattgttattattcataatttaattcttttgatgtattttggtaatcaaccatcgtgggtaatctcataatccaaaaaatcaaattgagcctcatatcatatttgtttatggataggagccactaaagaaccttactttataccaaagattattttacatataatttctattaagttaatataactaaaaaaaactaaaacattatttttaagatggtttttatgtattattcatttatttttaggaaataataaaaaaatgaaataaaatttgataagcctttgaaaaatattaagggtattcattcaattcaatctagactattttattcatagtgcatttaatccgcactaagtatagatctcatattttggatctaatccaatccgcacaatagtttaaatctattctgcaagcaaattagatcgattattttaaatttgttaatttttaatattaaattatttaatatttataaaaaatatatatatatttttatataattagtaagaaaataaaataaattattgttattttatatcattaataacaaattaaaataaataaaataacaaataacaagttttgaaatataatattttttttatattaaaataatattgtatatataattttttgattttttttttttataaaaatgtgtagattaaattagatccattgtttttacatatcaaataatatctaatccatacgagtacggattttaaatttttcaatccaatccaattcgcactttgtggattgcactggatcgttttataaacacccctcaaaaaatacggtcttttgcaaagaactccatcaaagactcccctgtaacttatgtatagtttacctttccttttttttttatcttttttaaatatatgacaaaacaatatatgtgcattcactaacaagcatatcagcaagaaacgacaaccacatcagcaaagggaaaaagggcaaaacggacgatctgaatctgaacattactctgtaagaagctaaattcctatctgctctagggacatatacaattctgcttttctatataaacaactgaaaaaaaaataactcttgaaaagaaagaagagagagagagagagagagagagagagagagagagaacgtaca

SEQ ID NO: 381161 - DNA, 2308 bp, Cannabis indica
tagtagatagtagtttttagtttttatttttttttttaaaaaaaaaaactaaggctatataattgaattgttatatattcatttactatacttaatgtgaaataaaatatatttatttcttttttaattatattacagagtgttaagggttgtcttgtaacagttagctaatttagttagacagttatattagttgactaggttcttgttcattatagttagtttgttatctttgcggttataacttatcttgatcagttgctttcaatttccttgtataagtactgttctaactattctcttcaatacaattcaactctttcttttcatctttgcaattctttcttctacatttctctctctattttcagttttagtgtttagtgctaatgttcattttttgaacaacaatgtcaaggagattcaactctcctaacatggtatcagagcaacgacctccactcgtggcaaacatggccagttccgatcttggaacaactacaaatggtgcgacccagccgtcaatggtggaaatcagatcaacaatcaaagttgaagtcgaaacagagattcagatgagaacacacatgtttactttaatcattcgatttccattaagcttaatgatcacaattttcttctttagaaataacaagttctggctgctattcgtggaatcgattgctgaagtttatccagaatgttgctcctcctcctcaatttcttaatgatgcagatcaagctaacagtgtgtacaacccaacctttgttgaatgggatgttcaagatcaaatccttgtgtcttggcttctatcctccatgatagagagtttgctaactagaatggtgggatgcaaaacggcaagacagatttgcagctcccttgaaaaatactttactcttcgagtttcctcaaagatcttggaattttgcacccagacttcatagtcttttgaaaaggacccatgtctttgaatgaatacttactcaaagtgaagcaaactgttgatctgttagctagtgttggagaaactcacaatgatcgtgatcatatctttgcgattttcaaaggccttctctgcgagtatgacacgttcataatctcttcaaacacgaggatagaaggctaaactattgtagaaatcgaagtcctactgcttgcatctgaattaagaattgaaaagactgatcaggagcatgagatcagtgtgaatctggctaaaattgaaatcgatcatgcctctgatcaagatctgaatcttgaagccaacattgctgaatataatcataacctgcgatatcctatgccaaattgcagcaacttcaataactcaagaaaaggatacactggaaatcacattcgtgaaaatggagctcaagcacaataacaaaatccatataatcgtggaacatctttcactgggagagctggaaggtttcctgctccaccttcaaaagttcaatgccaactgtgtcatcgacttggtcacatggttcttgattgctactacatgtttgataagagcttcacaggtgtggctttcagctctacataacaacagaatcaaccacaagccaatttggctcagaatgcaaccactcaagactcaaattggtaccccaattctagagcaaccaaccattgcactcatgatgttcagaacctaatgaatagaaccagctataattgccctgataatctttatgttggtgatggtacaggtttgtccattgaacacattagtcaatcttgtttttatccaattcctatcatcttctagtcttaaataacttttgcatgtgcccaaagttataaaaaaatcttctcagtgtctctaaatttggtagagacaacaatgtatactttgaattttaccctgacttttgccgtgttaaggaccaggtgacacaaaacattctcctgactagtgttcacaagaatggcctatattctcttgaggattctcatgtccaacttcggccttcccatctggtgtcaagtgtcaatccaaaccaagaaattggagccagtaacaagtttgtccctgcccaagccaatgtctcaattttagaaaacaaagattgtagccaaaccagtaataacatgtttcaaatatggcataataggctaggccatgttaggaatattttaccaggatctagatttactaacaagtatgttgaattaacatcctaaatatgaattatctaaaacaatgaaataaacacataagggtctaagaaaaccttacattgattgcagcagaatataatgactccttctgttcaagatctctagccctcgatt

SEQ ID NO: 381162 - DNA, 3640 bp, Cannabis indica
atatatatatatattttcattgtttctttagttgggagttcatgatagagaaattatattcaatgttttttcacaccaaactctgccttaagtaaagttgccaatgtgattagtttaaggaaacagttagtggtataaatagacagaaaaaataattcagccagtcgtatttactaaccatttatttttggttaaaataaaaggttagttaacttcatcctttttttcactaaccatttattttcttatgcagttggttgtccttacagtatatgtttacttgtacgggaaactatatctgtcattgagtggactagagcaagcaatagtgaaatttgctagggccaaaggaaacaatgctctgaaggcagccatggcttcacaatcagttgttcaattaggcctgttaatggccttgccaatgatcatggaaattggattagagagaggatttcgaactgcattaggggacatgataattatgcagctgcagcttgcagctgtgttttttacattttctcttggcacaaaggttcattattatggacgaaccatcctgcatggtggtgcaaaatatagagcaactgggcgtggttttgttgtcaagcatgagaagtttgctgagaattatagaatgtactcaagaagtcactttgtgaaagggctggaacttatgatattgcttgtagcatatcatatatatggttctgctgcacctgatactgcaacctataccttccttaccttctccatgtggttcttagtggcatcttttctgtttgcgccttttctttttaaccctatgggatttgaatggcaaaagattgtggaagattgggatgattggagtaagtggataagcagccgtggtggtattggtgtgccagcaaataagagctgggaatcctggtgggatgaggaacaagagcatttgcagcacactggcttcttaggacgattctgggagattgttctttctttgcgcttctttctttatcagtatggaattgtataccatttaaatgtggccaggaatgaaacaagcatcatcgtaagtgtatcatctgtcatttactttcttggcttcttctaacgggttacatctttattaaatctaatgatgctagaatttttattcatactatcaatgaccagttttatgtatttgaaaaatcaatattcattctttttgctgggtgggatagcaaattaattaatcattgtattgcttggactatggaaaaatagtccaatattaaaaaattaaattagagcttgcgattcctgtgaataggtctattttatactgaagaactttagtaatttatggagaaaatactgaaagcatttatctttccttttacttgcatcccaggtttatggtttctcttggctggtcattgttgctgtgatgatcatcttaaaggtttatacttcatgcctccaatagcttatgtgtgatgaatgaaaatgatctgtctatgacgatttattttactgacctctgtaaacctctgagttgcagattgtgtccttgggtagaaagaaattcagtgcagactttcagttgatgttcagacttctcaaattcttgctcttcattggatttatagtcactctcactatcctgtttactttccttagccttacagttggagatatatttgcaagcctactagccttcatgccaactggatgggcaatactgcaggtacatcctgatgatcttaaccttctttcatagtaatttttctcttttaccatttatgttcgttttggtgaaaaacatccaaactaaaatgtagctctcatacatcactagagatatgtgggttttaaagtaatactatgatcttactgatttcaatgttgtggacagatatcacagtctctcaggccattaatgaagggccttggattttggggatctgtcaaagccttgggaagagggtatgaatacatgatggggctagtaatatttgcaccagtggctatactggcatggttcccctttgtatcagagtttcaaaccagattgctatttaaccaagccttcagccgtggacttcagattcaacgtattttggctggtggaaagaaggacaagtaaacaatttttctttccccaaggagcatgaaaaatattcaattgcaaaaaaagacactaatcatattcagagggattgaattttttggaaaaagggaatgatggtggcttaaaattggaagttcagttacattatgtcaaaaaaaaaaaaaaaaaagaaaagtctaaaagtcgccttgttctactgtgtcatccttgtagcttacagaattttactttaaacaattgagtccaatacatttttaaaaaaaaataaaaaaaccatgtccaatacgtttagttgtaacttacatttttatattgtaatgtaaaaatgtcatacactgatgacattgttttgcaaatttttgcttataaatttactgttcgagtgtatctaacttgatcacatcagatttacattcctctttttcttttttctttatttcttttttacaattctagagttcaaacttttaattgaaggtgtttaagcttttagcttattatgtcaaaactcagccgttcatacggttatattattgttggtctgattcgttatttacggtactggctcggtctctttcctatcgggtttgtccatgtgcattgaaaacaggggtattaaatactaaaacacgaatatagttttttcaagggaatgtactgtttttttttttattcagacttttcttttttgagagaatagcagtatccattgaataaaaatttagcagttgaggatatagagtacaacattggtttatattagaagacagccttcttattcaagtctaaagcatgtttagctagacaatgagaagtgtcattagcctctcgtgaaacatagctaaccgaagcttgaggaaatgaaaacagcaagctgttgaattgtgcaatgaaatcttgcaaatgaagattgttggaataactacaaataaccgcatctacaagcgttttacagtcagactctatttggtgaatcacaagtgactgctcttggcaccatttcagagtataaagcagagtgtgcttccatgattagtggctggtggattcctttccaaggggtagccaaggttgtgatagtttcatggttgtgggttcgaactatcatgccaaagcccatcttgttccgttgagtatcttgcgctgcatcaacgttgagcttcaggaggtttggaggtggtggctgtcattgatgggagaagtttgtagcttcatgagtattgtgctttgttgatttggcatttgtgttactgatattagaacaaatagtcttccatccattggatggtcgtataggcatcagtagggatgtaaacggggcggggcaggtgcggggattgctcccccaaccccatacccgcttcctaaattcaaccccatacccgcctcaatacatgtttaaattaaagcgggggcggggtggggattacccaacggggtaaagattctcatcgggtacccataacatatatatttttgaagggtaaatggcggcaaaaccccccaaaactttcattttggtttcacttaacccccaaaacccaa

SEQ ID NO: 381163 - DNA, 4310 bp, Cannabis indica
aagtctttagcaataaagaaatagaaataaataaattgtgttgttgcagagttagtaaatagttctctcatttgttataaaaaaggagaatgggggtattgtaatgtatagtggggtgactgagaatgtaagatattacgatgtggttgagcctaaatgacttttttcatctacatttacttaagtctaatgttaaaatttattaaagtctttttgattttaaagcattgttggtgacattagtggagaacgttgaatgatgcaagcatattgaaaaattagtttgtaaaaatatttcattggagttgagtatatatggtggattccaattattaaggtcatttgtgaattatattgtcaattttcctaattgagcattaaggttaaattttggagcggttggattgaaattatggttaaaaattgtaattgaaattttgtgagtaatgacaatgtagtgtagacagtaatggatgcttaacttgtttgttgtttgttttgtttttgttattttgtcttgctctttacttggggacgagcttgtttaagggaatttgttaggtctatttttatttttctttagagtatagttttaagggtatttttagtatttattttatttgttattgtttgggtctacacttgtttttgagtttatgtgaatttcagatgttagatgaggagattttcactttttggtgaaaaatagtgtttttttgggtttcttagtgataaatgttatcaaattttgcaattggaaccttgggattggatttcatggcttggtggggttcataaagcatgaaaattgtaattttttatttttagcattaagagtcgtgaccttctcctaagagtcgcggctctccaatctttagagaaaattattttggaagaaaattcaagactcgtgacctttgaaccaaagttgcagtgctcaagaaaaattgaaaaccatttttctgtaaaaaaatcaagagtcgcgactctgataaaagttacgacgcttgcgtattttgggaaactttccaatttcttcattataacaagtggagcctaggttttgtaaggaaattgactttggagagcaattttggactggaagtacggttggaaggaggagaacaaaattgggttcaacaacgtgtgttctttcatttctatcttgaatcttttatgttttccattgaatctttggatgtttagaatgaatattatgaactaattttcttgttacgactattatgtgaatcacttaaatctcttttatggattaatgtagtttttcaatatcttcttcatctcctattcaattccatgcaatctattttagtttagcaactatttattggacatttataactgttgtttatgatttcgaatcaaaacttgaaatgtgggatttgattatgctatgattgttgtggagacaaattaattaagaatgaaagtatctaggttgtgtgtatgaataaattgagtttctatgttcattgctttctttatgatttaactttgccatagaaatattgggagttatcacttagattgagtttgtaagtcttaacttgattatgaactacttttatcaacttgttaattgaatagaatgaagaggaagtgggtaaattaccttaagaagtaaaagaggggatagttgatgatcataattgtcctaatcaatttatccttgttatttcttaaatttttattattattttaccgttattttgtttgctaagaattctcaaaaatttatttgatcaaatagaaacaaggaattagttgattgatagttgataattaattcttgtgggacgatacttggtcttaccaagattattacaaattatgattgtgttcacttgaatagctgtttattttcgcaacgctcaccatcatagcacagagataaatccactcaatcctgtcataagctttactcatatccaacttcaaagccatataacccaacttcccagacgattttctcttcaaataatgcacaactttaaaagcaaccatgatattatcagaaatcaacattccaggaataaatgcacaactttaaaagcaaccatgatattatctagccaagaagtttcctacccaaggaagggttgccaccatgaaaggaaagcaaagagaagccagggagtgtgataacacttcccttcgcattgttaccaagccttgagagcacttgactatgattatacatggcgagaactagcatgtttgaggaagcccatcaaaactaaatcccaggttagtggggaaattcgtgtgaaacatcttaagaggtactatcattgagaggagcatccaaggtatcctttatgctttaagtttctgtatgaatcaagtaggtgacccttcaggcaaccccactagtgtagttttactttttataaaaaaacaaaaattccaatgtaatcgattaaaaggccaccaagatgacctttcaaaggttaaacaaattaatgatacattggatttgttttattgtttctttatatgtgttttaagtgaatgtttaccattcttccactttagaagaaagaacaagatcgaaaataaaacataagtatttagtgccataaataatgctacacactttggggcaaggaggaaaagtaaaaaaaattaacttggcaaggattagctatccttgaacaataaaaagaatcaacatgcacattaaaatacttctcctcgaaagaaaagtcaagaacgatcgaaccgtttagccaaaagaggttttgaaagatgctcacgaccttatgctgaaaagagaatgacacttctcatgcataagcaaataattacaagcatgcacaataatgaaaatacaaattaaaaggttgaagcgagattaaggaacaataagctccctcaaatccaaatataaggatcagtaattaagaagaggttgagactgctccaagaatcaataccccctcaacaaaagtcaacttacctttgtagggaccctatggggtcacatataccaaaaataaaacagcgtcaaagacacatggaatagaaagcagatcgttacagtcatccaaaataaaaacatagccaacaggaagcgtcattttaacaagtcctatggagcccaagacaacatgtttacatgaaagaacactactgccgatcaccatcactgggaatgtctgcctcctgacagtgtttagcttcacgcgccattcttttctccacgtgctcggtcttgaactgctcaatcaaattgagtgtaaaggggtcaaaactgccaagtctgcatcgatattcttcacccacacaacaagcaataaatgctcgatcttgcaccctttcactcaaaactttttctttctccacagagacgatatgtttcttcaaccagtcgttcttggtcttgaaaatatcttacttgtttagagtttgggagccacgcgagtagcctcttcttaaagggtaagcaaggtttgaagtcgctaagttaggtccaccacctaaggcactaccttgtccaacttggaatctgaagatgatatgtagacaaagttggcctaatgggcactttgttaggattccccatagacacaaagtgagatggaccatgtcaatgagacgtaacaactcgacaccctcacctaataggtaaaataaaagtactaagtttctagctaagaaaatggtggtatacaccctgaggagtgcacatccaatgactcacaagcgataaggagagtaaaatcaacgcgcaagagttacatcttaaaaccaataaatcaaatatggaaaggacagtagaaaggataaaagaggtgagatacatacctcagggcggtgagggatattagttggagtgagaaactcaactagtgtagggcaaggcacctaccacgaaaagaagaagtgttatgagaaagattatcgaagttgcttctcgggcgcctcactagtcaaggatagagttcaaaattcaaaaatatgaacaaagacaaaacaccaattctttcaatcaataagaacgcataaaagaattcttgtagactagggggaagtgctaacctaaaaatttagcaaggctattttccaagtttagccgatgattaaaccaagagattagtatagccgtcttttgaagctaatcaaaggtgacccgttcaacatataaacccttgagtcactcaaacaagcatgaaaacatgccacttgtccaagcatgcatgaaagccactcaacctagcatgcaagcaaaggaaaagggaaattgggcatttcttaagctagaagaaatttagaggaaaggtgcatct

SEQ ID NO: 381164 - DNA, 4226 bp, Cannabis indica
tcaggcggttggaggtcggccggttttatcataggtagtatagacctaaaattccatcactattattacccattcaaattcgagattttgcttaaattttgaaaaatgagagttttaaaattttgcttcttcaggtgtggaggtagctgagagattcgcttactatgggattgaatccaacctcataagctatttgaccggacctttgggacagtcaacggcttcggcggctgccaatgtcaatgcatgggccggagtgtcctcgttgcttcccttgtttggagcttttgtggccgattcttttcttggccgctaccgcaccattattgttgccaacttgctctatattatggtttgttaaaaaattttaccttttatttatttagttattataataaaattaggtgttttattttagtgtagtagacgacctaataaactgaaaatgaaatattgtgatttccagttcataaatttttccaatttgtttaaatatttccttttggagcgtagaattcacgagtatgaataagaatagggtgggttttgttttcatctgaagagaaaggaggggaattgtctttagagaaactttatatatatgtgtgtgtgtataaagagagtctatttagcatttctcatatttatgtaagtttggacttaaatttctccgagaagattgagcaagtctaaagtttgaaatgaaaatttcatgaaagctagaggaaaaaagaatcatgtacaagcagtccaaaacagagtctatgggttatggttagttctgaaaattaattacttctaaattttttgtgaaaaataacgggttacttctaaagatttttgcaaataaaccatcgagaagaagctctagtggatgcaaactcatttatgagaccaattactaaataagctgattggttgtccatactttagacaatattcattaaactgcactttatctaatcaaatatagttggtttaagtgtttttttaatacctcatttctgtattggagttctcttattttttagtgttattgtttgatcacaattggactgattatttgatctgattttgttatctttttattctttaaactttgactttcaggacatttgaaaactcggaatatactttgttcagactttcacctcttcttttctgcttctatcttctcttgcatgtccaaaattaattatgcttgtagtttaagcattacatatacaaataggtgccaaatactatttatgctttggttattaatttaaaaatcaatctcagggtctaggtttgctgtctctctctgccatactgcctaccgctggtgcttctggctgccaaaccaacaaaacgttgccatgtttgccttctcagatccaattaatcctattctttttctcactgtatctagtagcaattgcgcagagtggacacaagccctgtgttcaggcctttggagctgatcagtttgatggacaagatccacaggagtgcaaagccagaagctcattctttaactggtggtattttggtatatgtgggggttcattagctacagtattgattgtaagctatatacaagaaaacatcagttgggctttggggtttggaatcccctgtattgcaatggttcttgggctgtttgtatttttgcttggaactaaaacatataggtatgctgtaatgagggatgagaaaaatccattttttcgtattggtagggtgtttatagcagcattctcaaaccgtcgaacatcccccttaccagaagttgctaaagaggattttcaggaaaacttgcatcaccaaagctatgaacaattcaagtaagagaatttgttttctgatttatgtcaagtgaaaagaaaaaggtgatactaaagcatcattaattaatatgaaagctcattcccgtgccttttggattttctttgtgaaccggtgctcttaaaatttttaatataaagtagaaatctccaataaaatcaaatttcttaagattatctacgttattactaatgttatagatcttgttattggtgattaattcaatgatgcacatatcattttttttgggttcctaatttattttgatgctgtatatttgggttcctaaaccattttgatgttgtagatgcatgaatacctatataatatgctgagtcaccttacaccttaacgtttgaactttgttgactatgcaatataatagttgctttgtgctcttttacttgatatctagctgaatgaattcctttcctttattttaactgccaaagtatctgctaccttaccttgttttttttttatttacacaattttattttaatctaaaattacttgtctatctgatcaactattctctcatggatttgttaggtttcttaacaaagcattgctaacaccagatggcttgatccaagatggaaaagcatcaagtgtcgttgatgttgaagaagcaaaggctgtgcttcgacttgttccaatatggggaacatgcttggtgtatggcatcgtatttgcacaggtgcctaccttcttcaccaagcaaggggctacaatgcagagaaccatagtgccaggatttgacataccacctgcttcactacaatccatcgtttctcttgccatttttttcttcatccccatttatgaccgtgttattgttccagttgcaagagcttttaccggtagaccatctggtataacaatgctacagagaataggaactggtatgtttttatctgttctctccatggttattgcagctctcgttgagatcaaaaggctcaaaactgctcaagactacagtctagttgattctccgggtgcaaccgttcccatgagtgtctggtggttggtacctcaatacctcttacaaggagtatctgatgttttcaccatggttggtcttcaagagttattctatgatcaggtgccatcagatttaaggagtgtgggacttgctctttacctaagtatctttggtgtgggtagttttctcagcagctttcttatctctattattgagcagacaactggtgggaatggccgagatagctggttttctaataatcttaaccgtgcacatcttgactactactatgggctgcttgctgtactaagtgcagtagcgttcgctctctacttatattttgcaagattttacatttatactagaactcattttgtataagctctacactgccttagtgtccttagaaaaagtggcactcctgaggtggaacttaaaactactgtattctgtaatgtgtaattcttgtttataattttcctcgtgaaaattaataaatgaaaaggattggatgaggaaacactataaaggctataaagctttaatgtgtcaaaatgaattgttctagtagatgtgtgttttgatttgtaatactaaactaaaatgatatttatgaaccaaggacagcatgagttctatgcttacaatctcttttccataattcactcatgaattattgtaagctatcaagtcccttgattaacatgtacatgtagaaggatggccgtcatgtggcacatgtatagaagcattgctataaagcaccagtagtgtctagtaccattcataagtggtgtcttgcaattggttagcgatatttcatagaagttattttattaaattatataggattccatatttaattgtaccaacaacaatataatatgttggagagtattagaaactacgagtccgtttggtacacaggattagattggattggactgaaaaatattagattggattggacaagattgaattaaacttaaagtaattctatgtttgatttaagattagactattttatttatcttctataaaaaaacttaaactaaaataaaaatatataataataaataataaaaataattaaattataaaataaaataatatatcatatataatcaagtatatatcataaacatataaacaaataatttatcatatttttattaaatacataaataaaatagtaaaataaaaatacttgaagaatataaaattatttatgctaaacactaatttaatataaatattaattttttaaaatattgatataaatttttttagtaatttgaaaataatatataattttattgttatattgtttctcttaaaatcaatttaagtaactattgtttaattaatattattttaaattttaaaagcttatgtatgataatttaaaatt

SEQ ID NO: 381165 - DNA, 3303 bp, Cannabis indica
aatagctaaggtgaatattctattttgagtgtttaatattttatatagtttaatattttatagtagaataatattgttacaataaaatgacaacaaattatgttccatgtaataaatatgttttaattctgaattattgaaattattaatttaaggagtttcatataatatattcaattttattaatgtaataattgtctatgtattaaattattccgctaatttttttaagttaaatatattatttaaaaaggagttataatacaatagtcatttatgaagatggcagttcctccatctatatgtattttatttttattaaaaaaagtacattttgctaatagtatttatagatctaaacatatgagaaatttatattctgagaaattagacatgagaatagaaatatttgctaatatacaaatcagaaacatatcaaattgtatcttttcatttacgacaaactcatattagtaaaattagatattttttttttaattttataatcattaaaagggaaatttgaacataatttaatatatgtgatgtgtcgtaattaagttgttattttgtcgacttcttctaattacctattttaagggttttttttacctatattttaaggtgattagaatttagaagtatacatatttattgttttagtggtttttttttgcccagtgttgattattctcttttatattacataaaatcagatcctatgtgttcaggatgattagaggaaaaactgacaaataattttttttgtaaggaactgacaaataatttaaaataattaaacaaaagaaataatagtgtttgtcaacaaacaattttatgtggtttacatttaagagtctatataagccacttaataagtcaaggtcttctttcatgctagctgacaagtgggcaattaaaagaattttttttatttggtaacttattataaactatgtttaattgtataaggaaaatttgggattaaaccctaaatattttatattggtaagatggtataatattttgttaattatacgtgtattgcaagtaaaatcaacagataaatgagaatattaagatcatttttaataagaatttattagcaataatctcattagcctcattctaaatattgatatttttttaataataaatatgaaaattttaatgatggttttgacgaaagaattacactatttatatgagacaaagcattagaatattccttaataaattcttcttccaattccaattctaattatttttattttgttgtatatgtaaattattgttattataataatgagtatttcttgtcctaatcactaatatattatagccgttgacataagatactaaactcatgagtagcacttgaattgagttctatccactcttttgcagagtttgaaatctccaaactgtccctcaaatacaccaaaccaaccaacccaacaaaatcatcgaatcaacgacacagtaaaactaacggtaaagattgtcaaatcaagttttgacttccacgtccccacacagtcaaattgacaatgagtcataatacaattacactaacaaataattaacaatctcacttttactagttccttttattttttttaaaaaaaaataaataaatgcagtttccattaaaatagtggtgaaatatttaaaggtaaatagtattttcaaatttatgttttgtaaaagtttaattagattttttgttctgttaaataataaaataaatttgtattttttaaaattgtacaaataggaccctgaaataattttttatcaaaataaaacttaataataatctgatctagagatattatgacaaaactgattatattttttatatttgttcttgttagaaattgtcttgaagttagttattttaaaaaataaaattgttaaaaattgagctcatgatcccatttttatcattttaaaaaatataaggtccattttgtcatttaacaaaatagagtgtccaattagtaatttttataaaatgtaagatccaaaatgatatttacccatataaacctcattcatgtatcgagacatttaacactccaaacatatgtgagtcattggaattctgacaaaagtgtaatgtgtatcaagggtagatatagagtattgatattgcagcagtagtatttagtactttctaaatgtgttatcttataatgaattaatgatattacactatatggtatcacttaattgaattaataacgatattgacacgtaaaagcatactaacatttcttattcatctcggtaatacatttgacctaaaatggtaattgggctgaattttctctttcattgtaacacactatatttaaaaaattgagttaaattgatagagtgaaaatgcaacaaaaaaatacttctttttttaccaattattgaagaggtttttccattcctacacgatgaacaagccatccttagcaacaatgttagcaacaattgtattccacttctaattaaaaaattatgtatatattgatagagcaacatgtctttacatgttacaacattctctctcttctctattgtctctttctttgcttttctctcattttttctgagcaacactcatttgaaactttcctccttaattcacagaaaacacattttattgaccaaatagttctcttttcttaaacatgtatgagttatctgaattttgttcattttatttatgctttttgtaattatattcttcaatcaaaatatatttgaggattacctgtaagaggcttccaatacacgtatagtaatcaatctccataattagcaaaagtgaagtggaaaatttgttagatttttatttatgcttacattaatttttatttattttattaagatttaggttgattgtccaattagagttatgtagctaagtctcttccctaactctatgaataaatattgtctcaccacaattatatactctttgataatcaaataaataaaattgcttctcctgtcatagattaataaggtatgtatatctaattattatatatattattgcattttatattatatacaattttatatcttaggattattaatttttctaataaaatcgagatgatggaatcggtagaaactaagaatattcaaatcatcatccccttcacccaaaaaaagaataaaaaaattctaatatttattgttgtaggtgtaaacggttaaaccctgagacagggtgggccctatgtataggcgggctaggcctgcgcttagggcccaaattaaaaaaaatactttttaaaa

SEQ ID NO: 381166 - DNA, 4546 bp, Cannabis indica
tttttattttcgtttatatgaccgaattatgctgtgtgtgtgtaagagtactttgttatttattatttcacgtgggaacatataatcttacttggaatcattttttcccttttattcttgtcacagaaacagagtgaaggcatgttgtcaaacaactctgtcgtggctggtaactgcattaccaatggtgatgcaaaatataagtcagagagcccgttgaaggatctgtatgaaagtgcaccaaaggtttccatctgctccttaatctctactaaggaggcctcgccgttttttgggcaaatatttatggttgagggacattgtggtctgacctgttttatgtttcatcaaaatttataggttagaaaaccttacacaattaccaaacaaagagaaaagtggacagaggaggagcatcaaaagtttcttgaagccttgaaactttatggtcgaggttggcgtcaaattgaaggtaagcttgttaaattgttgcccatggaatgtatatttttggctgttctgttgtgtaaaattcctttatatcctggtgcagaacatgttggtactaaaactgctgttcagattcgaagtcacgctcagaagtatttctctaaggtcgataagcttcctattttattgttcactaaaactcttgtcataatatccacttccatacattaaaatttaatcatgtcttgtttactcatatgttttttcttttgctttcaggttgttcgtggttcaagtgggagtgttgaagggtgcatgaaaccggttgagattcctccaccaaggccaaagaggaagcctatgcatccttaccctcgtaaatttgtcgagtccttcaatggaacatcagttttaaatcaactagaaaggtctccatccccaaattttgctgcaacagataaaggaataaaatctcctacttcagttttatctagtcatggttcagatgcagtcggttatgatgcttctgaccaccagcataaaaggtccccttcgtcaacctcatgtacaactgatatgcagtcaatcagcctatctccttcagataaggaaaactgttacttgatgtccaactcatctgctgaagagaagataccaggaaatcatttatcttctcaatcaaatgtggagaatgtcttatctgtggtaagatgatttgtctatttagtttcccagatattttcctttttgaaataaattgatctgtattttcactcatatactaaccagatatgctttacagaaaattgagccaggttgtaaggacacagcacacaataacaaagaagacaaactatcaacttcaacaagtttcaagctttttggaaggacggtgttgttatccgaccttgagaaggaatctcattgtagtactgatgattctgaagcactgaaaacggatgaagggcagaaattagacacaaatttgtctctcggtggatttggatttgctagtaactgtagtccattggaaagttcttctcctagcaaccaaacagaacaacagaaagaaagctccaatattgtaaaactaaatggtgatgctcaaatgctctggtggtctatgccccaatttccctttcattaccaagcggcatacaatccaagcacaggtccaacatctacagaaatggaagagaaggaaattaagaaggaaagatcttgtaccgattcaaatgagggttcttccagtggagtggaaacagtgggaaacagaaacatagaagcttttaattccttttctcaagaacctcatcgtaaagcgagtgttgaacactgcaattctaggaaggggtttgtaccatacaagagatgcttagcagagagagacaaccactcaacagctaccagtgacagggaaagacggaaagttcgagtttgctgacaattttctgcacctcggttctccttgactcacatgtagttagagcatttattgaccagaatctagagaatgtcttagagaactggaaagggtgaaaaggagcaaaatctattttaccttagccattttgatttgttacaatttcaactagcctgccactattttttcccttctgaagttgtctgagagctttccaggctgattctgattggcattatgcattctcttctctcctccttgcagaagttaaaagaaagacttaagaagagtagtagaggaggagtaagggcaagcattcatgttgggattttaatcagtttggagtctttggacctaacaagtgtccatgcacctagtgcaccccagtttgtttagagcattactgcatttggtttttgctttgtagcaaataattgtaactttatttttagaaaataaatttctacttatattcttttaaaacagtctcacaacacgaatttgttaaacgaagaaaaagaagaatcttattcggctaattaattttcctatgaagtccgaatagggtgtcccgtcaaaccaatcctaaactaacaaaaatggaaatagtttaactttgtaggaaatcataaaaggatagagagtaattgagacaaaatgttgctatgagctaagctctatgaaagcttgatccagactgagccaaatctttatttataacagtattgtattacaagcgaaactaaaaagtaagaaaatgtacaacttattgaatgaattgaattgaacaatactagaaagggtacaaatatatatagtatgagcagtgtgttcaactaacttaacaccctatgatcacgctaaaagactaacccaaacccaactaaataatcagaactaaaagagaaccaagggaaagaaactgtcaacagacataacggtcaccaattgaacttactagctgaagactaactgaactaactgaccaattcttaatacatccccccctcccccctcaaggtggaccgaataggttatatacagacatcttgcttgtattggcagttagtatagtggagggcaaaggtttggtgaaggcatatgccagttgtaaattgctggagaaaggaattaggcgaatagtagaattgttaattttgtcacgaatgaagtgacaatctaactcgatatgctttgtgtgctcgtggaaagttgaattatttgcaatgtggatggtagactgattatcacagtatatgaaggcaaatgtggcttgtttaatttggaagtcatggagtagatattgaagccatgtgagttcactggttgttgcagcaagtgctctgtattcagcttcaacagagctcttggaaatggtgggttgcttcttggttttccataaaatgagacaatcgcttaggaatatgcaaaatccaattgttgatcatcttgtaatggggcagaggcccagtccgagtcagagaaacctcagaggtgaatagaggaattcctggaatagagtaatccttgtcctggactacctttaaggtatcgaagtaggtgagagacttgttgcatatgtgttatgcgagggccagacataatctggctcaaagtgttcactgcataggtaatgtctggtctagacaagattagataaagaagtttcccaatgagttgtctgtattcagaaggattggtcaatggttctccttgttggtcatcgagtttggttttaggatccatgggtgtttttgctggtttgctaccaatgtagccattgtcttctagaagttgaagggtgtattgtctttgagagagaaaaaggtcagatgtagcacgagctatcttgaacccaaggaaatatttgagctgtccgagagctttaagattaaactactaatgcagagtggtttgcagttgatgtagagcatgaacattagggcatgtgatgacaatgtcatcaacatagaccaatagggcaatgaaagtgtcattatttccatgcgtgaataaggtgtaacgtgcttttgattgcttgaaaccttcatgcagcagggcatcagtgagttttttgtaccactgtctcaaggattggcgaagtccatagatggatttgtgaagcttgcaaacaaggttagaacataaggaaacagaattagacaaggttagtcttgatggaagggccgtgtagacctcttcattgaggtctctattcaaaaaagtattgtttatgtcaatttgtaaagtatgccactgttttatagtagaaatagcaaggagcaatttaaaaaagaccattttggccacaagtaaagtatcaaaaaaattgaggccttcttgttgtgtatagccttgagcaacaagtctggaattgaatctctgtacagaaccatcactattgagttttattttgtaaacccaacgacaaccgattgctcttttgattgggggaagtaaaacaattgtccaagttatgttgttgcgaagggttgtgagtttagtgtccatagcatctagccattgtttgaattgaataggaatgccaattaggaatgtcaatggggcgggtcggatttgatctgactatgatccgacctgatccagatcatgtacggatctgccccgccccgctagattagatactcggatcggatcagatccgacccaact

SEQ ID NO: 381167 - DNA, 3031 bp, Cannabis indica
caaaccccaagatctgagccggagctgaagctgagccgcagccgccaagaatttcacgctctgagccgattcaagcacgtccgtaactttcaacgccgtcgacatcctcaacctatcagcggcggtcactacggcttccaaccccgacttgagcgccgccatagccgaatccgagttggaatcctcctcctcttgttcgccgccgtgaaccgatcttcttcctccgcatctagcgatctccaacaacggcggtgcaccaatgctctcttggatcttcgcgagctcatcatttaagctacgttcctgagatttggtctctctcataagccgattcaaggtctgtatctgatcctcagacagatcgtcgatcgaattcgtcaccagacgaaacgcaagtccaggtttgaacccggcgatccagagaaaagcttgctctaaagaagtaaaccacggcgggaaaaagacgaggaatacatttcgctcggtgattttcgatttctcctcgtagtattgctgatagtgagcgagaattcgagaaacaagctctctaagatcatcatcagaagattcatcgaagttttgattggcgcagattagctcatccaggtaatgttcttgacgaactaaccatccttcgaaaaaattcttgaacaaaactccattaccgttgttgttgttgttgttgttgttgttgtcgtcggtacttgatgtacctttgaaacctttagacatagaacagaatcacacaaacacagagaggggggtttgagttttctaaaacagagcaaagaaaacaaaaacagttttctctctctctgtctgtatatagggattttccactatacggtggaaaggaaattaggtttagagagtgttaggtttgggattggagcagagtctacgtctagagagaaaagttgacaagttgagtgtttcctttggagacaagtggaagccattactaacaacaactacgccattagagctgcttttatgggacaagagtgatagaaactgatcttaacatttgaaccaataatcatgggaatgggatgatgttttcaaacatggcaattcgtattctactcaaaactattctcttccaaaccccaaaaccaaaaccaaaaccattctcttcctcaccattcttcaattccagctccagtaatggtgaaattccaatctcaactatcgtttctgtccttacccaccaacgctcaaaatctcgttggactaacctccgatctctctctcctaatggcttcaatccacatcaattttctcaaatcaccattcacttgaaaaacaatcctcacctagtcattcgtttcttcaactggaccaaccaaaactccctctgccaccatgacctcctttcctattcaactctcattcatattctcgcccgaggccgtctcaaatcccaagccctgatttacattcacgaagcttttcgggttgtttcggggtctcaacctcagtcccaatctcaatctaaccctttgaaactctttgagtcccttctcaagacctacaaccaatgcggctcggcgccttttgtgtttgatttgctaatcaaagcttgtttggaaaccaagaagattgattcttccattaagattgtgaggatgttgttatctcgcaatattacccccaaatttagcacctgcaattctttgattcgaaatgtatcgcagtctaggggagctcctgaagcttacttgatttacaaagagatttttgggttaggagattgtgaaagtgttgatgatgaaaagttaagaagaagagtttctagagttaagcccaacatagagaccttaaacactttaatggtagctttttatcaggatggtatgttggacatggtgagggagatttgggaccaattagaggaattgaattgtgaccccaattgctatagttacagtattttgatggcagcttattgtgatgatgagaaaatggaggaagcagaagctttgtgggatgaaatgagagcacagaacattgtacccgatgttatggcttacaacacaataattggtggattttgcagagttggagagattgaaaaaggtgaagagttgtacagagaaatggcaatgagtggagtagagagcactactgccacactagaacacatagtaagtggctacataaaggtgggaaatattgattcagctgtgtttgtgtataaggatatgtgtagaaaggactttagggtagaggccacaacaatggatgcattgattaaagggctttgtgataagaaaagggtgtttgaagctttggagattttgaaaagggcagataggcatcttggtttttgtccaacaaggaagagttatgagtttttgataacagggatgtgtttagaagggaatatggaagaggctttaaggcttcaagcaaaaatggtttcgaaaggattcaaaccgacttatcagatatacagtgcttttatttctggttacagaaaacaaggtaatgtggaaatggcagaattgttgaagattgagatgttaaatactcatgtgttggagaaagaggattagagacattgatgattacagaattagactaatctgtaagaatttatgttataagagagtgatagaaatttcttttacttaactgtgaactgtactaatgtcatagtctcatcaatctaagttaattttttcaattctatcaaatatgtaagatgaaccaaaaacagtgtaaatctcatatgaaagagtaataatgataaagatgcttttattgaattatttggaacaacttttccttttctatactccttgtccaatcttttttaattctcatttagtggttattttgagtttggaaaataattttgttgtgcaccaccatagttggtgattaagctccttcaataccagcttaattttcaacattatttgcaaaagggtaaatactattttggaccttctgttttacaaaagttaccaattggaccatgtgttttgttaaatgacaaaatggaccctgtattttttaaatagta

SEQ ID NO: 381168 - DNA, 3221 bp, Cannabis indica
cgtagacggtaaattcttataaatatatttatatatttattttcacacgaaactctcgtcgccaaaaatacatatgtcatgtttaataaactggacacaatctgtccttatatatggtataagtgttggaatgtaactttcacatgtactagtacacgtgtccgtagaatatttgacaaaatgatttgagaattaaattattactcacttttgtcaactaacacatatgctctcgaaattaaatggattatacgggtttactagcaaggtcaactatcttttggagtttttgctttgctacaagggagataattattattttacatataattgtttgtataattcattttttttaggaaagctagaaagaatgcactattaggcccggctcagccaaagaggtatgttttcccggggctaatataatcatcactagacatttctgttaaaatacaccaagtaatcacaattggagtcacaaaaccacttgatctaaattaattacaaactcacaaattattactttattatttcataattaaaatatttatggtatacatgaattatatttccaaaagtctaacaagcaatataatgaacgagaatttcgcatatttattggataatcatctatacatgacagagaattatacatataaaaaaagggaagaaaaaaaatattgccatatggccaagcatatacagctatgcgagaccatgtcgtgaaccatgcttgtttattataggttcaaatgtccaattactataaattggagcctaagttcaacagtgtttcatgtactagcttaacatttatagtcatcaaacaaatatagcctccatccttaatttctcagtttgagtaattaataagatggctaaccaaaaggttttattatgttttgctctacaattgattttcgtaatctctgcccttcaccacactgcaaatgctcaggcacaggggttgaaagttggattctatgcacatacatgcccaaaagcagaggctattgtaactcaaatcatacatcaaactatggcagtagcaccatcacttggtgcccctctgatgagaatgcattttcatgattgttttgttagggtgagtagaaaacaatatatataattagatatctcttgtaagtatatatttacagatatatatattaatcttttatgtatcgcagggttgtgaaggttcagtactgttgaattctgccacaaaccagtctgagaaattcgccataccgaacttgagtcttcgaggtttccaaattattgacaagattaaggttgcattagaaaaagagtgccctggaattgttcgtgcgccgacgtattggccctagccgcaagggattcggtggctgcggtaaggatcgatttttgtgtataatatatatgtatacaagcaacaaatacgtaacatacactgtaatatacatcatatatgagaaaattataataataaaaatggtgtatatatttcagttgcatggaccaacttgggcagttgaaactggtagaagagacggtgtagtttcgaatatgaccgaggccctgtttggcctacctgcacctttttcaaacattactactctcaaaaaagacttcacaagcagaggtttaagcgtaaaagatttagcagtgctctcaggtggacacaccattggaacttcacactgctcttctttcaacaaccgtctttacaacttctctggaaagaacgattcagacccaaccttggattctgagtacgttgacagacttaagatgaagtgcaagcctgctgaccctataacattggtggagatggacccaggaagtttcaagacctttgatgtcaaatacttcgacctcgttgccaagagaagaggtctcttcacatcagatgctgcgcttcttgacgacagtgagactaaggcttacgttgtgaatcacgccacagcatctggaacagccagtttcttcaaggactttggtgtttccatggtcaacatgggaagggttggagttctcaccggttcagctggtcaaatcaggaaggtctgcaccaagattaactaataagccactgatcttctaccattttgtttgatttgaagaacttaaaattaatccttattaattactttggtcaactacgtaatctgtaattaattgcaataaagaattgcatctactgctctcagttttttttttttaatttttttcaaaaataataagtgcgccctttattggtgtattgttttggaggtttgtgtgaggacttcaaatcgaccggtttgcttgaacagtacttgttgatttgtaatacttcacgagcttaatttttcttgtacttacaatctatgtattgattcatatgaataataatttaaagtttatactatatatttttgtaaaggaataggtattttgctcatgtttgacgtgtatggtactggtcccttgggagaatattctctttaatttgatattgtgctacctctctttgcttaaagacgctattgtaatgacaattaatataaacacactccactcactcattgaaatgagttgagatttacaaattcatatatttcatatgttttaaattggtatcagagaagtcacggtctctgccattgctggaaacaataatggtgcttcagcatctcagctcccaatatcttttcccaacctactctcagtcagtctttctctttgatgcttggtcaaatcaactacaatttgtggaagacgatggtatccggccaccacactgagaggccataggcttcatgggtatctcaccaatttgtctttcaaagtttatcatggttggggatactgaacaaaccaaccctgaatatgagaattgcataattaattagtgaccagttattcatgaagtggctctacagctccatgatcgaaggcattccgactaaaagcactcctttctcgttcctgtagtcaaaagttaattctattcccactacaaagaaatttactttctggtgataatctttaagtcacaacataaattttttgtgattaaacgtgacttttagtcacaacaaaaagttacttataacttaataacataatatttaattacaaattgttactaatttaattttaatcataataaatattgtgattaaaaatacatttagtcacaataaattataatttttttgactaatacttttagctgcaaatcttgtactcac

SEQ ID NO: 381169 - DNA, 4132 bp, Cannabis indica
ctacctctgactgggacctatcaaatatttatattctacccctagaatgggggcaaaacatagtcctctacgagataaaatttttatatttttttgtttactttggtgaattaattttttatagataaattaattgtaaataattaatatatcttttgctttgattactattattttcctttcaatagtataattttatggactaaagttaaaagaaaaaagtatttaattataaggaaaaaataattaaataacattccataaaatgaaaaagacacgaacacaacactcacattttaattacaatatataatactacactttactattactatgataaatgatcttgttattttcaaacaaaaataacatataaaaaaattaaaatattattaataatatataaatctgctgctattatatatattaattgaatgactaatgagttaattatatttttattattaattaatattatattttataagagaaaatgtgaaaacaaaaaatgcatagcgctaaactttcactatttgagttggtttgctctcataagccatatcagtagcacttgatctcttcagcatatttcttgacaaaaattcaagaacactgtcatttgtcaaatattaactttatgcactcctctttttgcaccattagtcttccttcctaatgcattatatcttcacaagtcaattcacttcaacaaatggttcaaaggtgagtatgtaccgcaaaaggcccaaaatccagttactagtagtacagttgatgaaagctgaactaaacaaatattaggaagagttccagctataatttaaaaacgattctgtaggtgataaggtactcgaagaaatagaaataaatttcacacaaaaacatttgaccttaaaacatactattttaatattttaaaaaaatgatgagataggtagatcaaatgcccatttgtgttgctgcaaaagaatgatgataaataaatattatgcaaacaacacaaaatattttctaacatataattaccttgcaagcaaaaattcgtaaaagataaaacagagcacccttcactatgtcaaaaaaagatagttacaaaggagtaatatgaaggaaagtgtcgtattccagtgacagaagaaactcttataaacaaaacaaagattaaaaaataattgctagatagctttttggtttctttagggccaaaatattaactctgggtaatgtaaaaagaattaatcctacttaataaacctctgcttgctgtgaaggtcggattcaaccctattgatgatgacctcaccttgtaaagccatacttttattactctggaaaaattacattgaagaattacccattagaagagaagcctatcatgagatagaataattataaagttcaaaccaagtatttcaaaaaaactcctttaatgccttctttacctcctcagtgagaccgagagatacactagtgattatttactgtagttaaccactacttgtgactagctcagagggtgtgtgtgagttaaaggtcttgggttcaacttccagattatacattgtgtaatatataaacgcttaaataaaaaaaaatatttactatagttagacattcacaatatatgcagacaactagataagataagatgaatatgctactcctagatgaaacttattcatcttctctaaattattgggccatagttaattatatattgactttgagagaagactattctaatgatcacagaatatcgttccatccagttttgtatcttttttcaaatgaaactctcacattttctcaaacctgtcgttctgttttctttttaaaacaaatataatacaattacaactataacaaacttctcattgtcgaaggcaatcaaagaagaacctcaaaagcacaccagtttactcttgccgaaattccgtttctttttccgaagttttacaatatttttatatgtaagaatccacacctatataaaacataaacatgtatttctaatcaaatgttttcctaattttcaaattagtatcctaaaaagcatgcttcaaatattttgtaagaaagaacccaacatgtataaagagaaatagatctaatatataattatcatgaaagaaaaccattgggttgggtcgaattcagccctattttgatgatgatctcactctgctaagccattctcttattactctgcaaaaatttacagtgaaacattatccattacaagaagttcaaacaaagtatttcaatttcaagcaccctttaatgccttctttaactcctcactcgcgactgactcagttgacattccctgatacccattaaaatctgaacctttcttctcattgcttcgcctatctacattacctgccggataagaaaaagccctcccgtcgccggaaatatcttgccggagttcctccacggcttttctcagtaacccattttcagcgtggatcaactccagctgtcgcttcacattgaaacaagcttctgccacatcagaattctcggacttgttcttagtagtaaccgtcgttgaatcaggactccccacgtgttcgatcccgatcttgttcatcaccaggaaaggaattttctgaaatgaaatcccagccgttagattggatccacttctaatctctgatggagccctaacgccccaccgaaaattcacgacggctcgtccacgaaccggcatggacgtattcgctgtcacttccatgccgcccaacagaccggcgatggagctagtcaacggagttcccgatgacagaacagagattttctttccgggaaacgagccgatcatcgcaggcgtctcgcctacgtctttcgacgaagattcatcgctttcaagcccaacaacgccagtttggggcttcaccaagctgtcgaagactgaagaatgagtcttcttcaaagagaaatccccaaaagccggtttgaaatgaagcatgaaccttgggtttccacgacctagtaaattaaactctgcactcatcatcatcgaacttgaaattggagaaccaaaggctccagttccggtcttgacgacgagggagaaaggattccacgtgtcgtttggacgataagagattctgacggacggtccagattcaaagaaagtgccgagattaagggtgagctcctttgaatcaccagcgacaatgccggattgaaaaggaaatcccaatatgttgagtgggattttggctcttaagagcggcttctgatcgtcacggaacttgaccgaagctttcatggctaagattcgcagaaaccctaatagtgcgaatttagggaagaagaactgactcgagttgagtctgtaaaataattttccttttctaatttataatactaaaaatttaacaacagatctgtctgaaatttgaaaaagaaaaattaagtataatgagctgacattactgcaaatttggtctggatcataggtgtttatcgttacacatttgccctaattgacatttatttcattgaattaaatgtttattatttatttattttgagagaaaacgtaaattattattattactaggctgttatttttgtttttttggacaccattaattatagatttacaaaaggaaaaaaaaaaaaaaaaagaaaccattatcattttgttatttagtgtgattttgaacaaatttaacgcattttaataatatgcccaaattatttatttctctcctaattaattaagaaactaatttaaaaaaaaatgatttgaaaactgccgccaatgagcatgggattaaaaatcaaataaagctaaaaaagagaatcaaataaaataaaaataattatatatggataaaaacgatagatgagaatttataaatctatctatcttatatctataaaatctaaatctatttaaaagacaagagtccgttggcaccaaaacattatctaaatctattttataaggctctgacttttagcagcaacaattgttgtataaattaagctgtcgattccataatgaatgaagcgattataaataaaaatatggaataattatataaggcattatttttttttgtaaaatatttacattttaacgttcaaataatatttttttatatttttacgg

SEQ ID NO: 381170 - DNA, 2367 bp, Cannabis indica
ttttttcgtctaacatattatatcttatatttttgctcgtatactcggatcctagacccaaaaccatacatgaacccgaacctggatgggttcatgtcatagtatggtgttaaaatattaatttttttagtaaagaaaaaatctaaaaataattttaaaaaatttgtgccaaacaccattaaatttttaaaagacaaaaaactgttttctataattacttttaaaaattgaaaactgaaaacacagctaaacaggttctaaactattcgaaaatttttaaaaatttacagagataacgttataagcataataaacactaccattaaaaaaattaaaaaaatattcagtgtgttttcaaacacaaaaatggactaaaaacttataatagaaagttaacgtaacagtactactaaaagaattagccccacattcacatgtgccgtaatttgatggtaatgattaaataaatttaatgaaacgaaagccaaccataccaaaaagctattgaaatgtgttctctttctcaacgaacgagacagagactgaaaatgacatccaccacatattttgtccatagatatttcttttctcatattatatatacaccataacattacttccatttatttgttatcgctttcttttctttagtcttttggagtttgggtcctactctttgttgttttaaagaggttaaaaaattgtcactatagtcttgaactgtcattatggttagagatgatctaagtagttaaattgggaaggtgctccaatccattatttatttatttattttatttttttatttaaggatgaagaactaattgattttaacagtgagtttgtttgtactgaagtactattatttttttcatcttttctttataaacaatagttataaattcaaatgtactatattgttgacgcgacttttcgttaatagatctaagaaaatcataaaataagattgaatacaagttatttaatgatgaatgaacaattataaagtaaacaagacacaatattttataattgttatattatttgtaatttaaataatataatattaatattaaaattgtgatatatgtatttggaggttatattatatgacatataatgtaataaacacataaacgttataacataaggagttctaattctgaaaatagatttagaatctacgattcacagttgataaatatataattaaataaataaattacatgcgagaattatagaatcaaatggagaagtttctagttggtgtgcaaaagttgtcccaggcgagggtgatatgttgcctaaatcagtgcataggtgaatttcaacgttatgcaatgtatcttgaggggtttaatgatattgctccaagcgacatgtcgcctaaaatcttttttgggtaaaaatgttacataacgttggaaatttaacgagggacgtttctagtatcaaggccaacgttctctatttactgccctattacggctggtagcaatcattgggtgtgtgatatcaaatgtggaatcctaaactctatataaagaggtataaggtgctcattcaaatttttatcaacaatcacttgctaaaaaacacaagacttgataattctcaaaactatttcctagagaattctcttattaagtggcgtttggttggaagtaataaaatagaatggaatggaaaggaaacaaacttcattccatttctttgtttggttgcatattaagtattagaatgtcattccaatggaatgacctttctaccattttggtgaaatgactattctattttgaaatggaacgaaagaccactcctgtaacgccctgaccctcagggacgtcacgtgtatgcttttacaaacttatttctttctaatttattagtttagaaaaaaaaaatgtggtttaattaaaaactttttgattaatttgaaataaaactttcatacttattacaccataatacggggatcccctgtttataaaattcttttacaataggttacacaatcgctgttacaaaaattaaggttacatttccaaacatagaaaagaagtcaatcttgcttcccggaagccaagacatcacaactaatatgtacattgctgggagacttccgactcatggccaaacgtagcttctaatctccttacttgcaccatgaagcacccgtgagtcacaatgactcagcaagaaaagctactaattagacatcatggaaagtgcaagcaaatttcatgacaatataatatacataccaataggccatacatattcaatgtacatatacaaatacaacttaacgtttatgcgagcacacctgtaacaccctaactaagataggcgtattacgtgattttt

SEQ ID NO: 381171 - DNA, 2907 bp, Cannabis indica
aaacaaacactaaatttatagcctaccccgttagatgaataattatatgaatcaatggccacgatcatcagaccgtaggggcgggatgacatcggggccctatatatacacatagcctatatagaatactattatgtgctatataataacacaattatagaggggcaaagtagccaattcaatttctgtacagcatggtaactgcaccccagtaaaaaattcttatgagaaggatgattaaggtacatatttgtacaacaagatttggcaacaatacaagccccaactgtagggagtagtagaataaataacactatcatccacaaaataaaaataatcaaactacattacagagttttcactcattgatgattcctcttccttgagctgccccgctccgatcccgtgctcgagattctgttttaagtactaacgataaacaaatggggacaaccaaaacttgcttctcttcaatagaaaaaggaaaaaagtttgaacaacttacaaatcatcatcgtcttgttttttacttctcgatgaatctaatgtcactcgtgacggtccagaggcctgcgagattcagcaaaaactcagctcaaatgtacatttgctaaattggcaaggcctaattcagtgcatagcttaagatgtgactaattcagagatgggaatatccttggtatcagagaaattattaatgtcgttaagagagaaattttaagcctattttgaaacagtaacggcacaagtgatttagctactggtatcctacactagatttatgtactaccagatgaatcataatatcaagtccgagcaatgtataaaatcaaggcaacaacatgaaaattagttaaatggtttcaaagatggtactgacaggactgcatacttgtttgctgcttccgctatgagcctccaggtactcctcataagactgcaaaaaaggatgagaaaagagttaattatcattgaaaataaaacctgaactactttaaatttgtctgagaaacaaaagctgtagaggaatttcaataaagccagaagaactgaatattgaccagcaggcacaggtttgtgaacagcccagatcaagttctatagaatgccaaaaatataaggaaaagttcctcctaccaaatcggaatgcagtccacaagtaccaaacaagaaacacaagaagattgtctaatgacaccaaatgataatgccatgtttagatctccaagttcataattggatgaaacattcttcaaaatgtcacagtgaaagggttctaatagtaatcaaagaaacaatggaagacacaaatgaaagaagctatgattcagagttaataccatttcaagaaagtcgtcctctgtcaaaccactagctataggactttctgctgtcaaagcccacatatcaaatcgagaagacacatccctgtccacttgcacattaggaagatatttattgttgccagagtgtttcatccttgttacttttgaagctgcagaatttacagcaacattttcaggaaaattagtaccagtagttccacaatgggctaactgatatttaatagcttcattctgatgttggtacagtaatgaagaatacagcattggtgactgagaccaggaagaatgcatcagaggcacattgtagtcttcttctccatatgaagatggaggttctatacagggtctttttgaagcaaaatcattcctggaaatagatcgaaattcaagacataaaacataattgagaggtattaaaaataacaaaaagtatatccactttcagctgtgtaaacatgttacctaattggtagaccatcaacactactcttcacatcaagaagctcacacagtgcttctccaatttcagtagataactcctgggaaagaatacaggagagggagggctattgttaacagtattccaaaatattacaaaacaagaagatgcaaaaagcatttgatagaaatcatacctggcagtctctgctaattttgacaggtttatagtcattcaagggattcttgagatgaagcgttttttgaaacggcagatcatttaattgcagccattttaccttaaaactgcgcccccaagggttacattttccatttccctggctccaaacattatctcgcctccatccaacagatgacatcatttgagcatacccttggaaaaaaccactcatgttgacactgaatattaatattactctaccagaattctgcaaggtatgcacatacttcttcataaatataggttgcaaaagttaagcaagattatctcttttttattctgaaaaaagagaggtcacttgtcttaactgtaaaaatttaagcaagatattataacatgaggaatcttacatgaaaggcttcttccaatatcggttcattcatcacttgagtcgcccaaattcctttctcaattgataattggatattctgatgattcaaactctttatgataaaatatctagtatcacataatttactccttttgtttacagttgaatgatcaatgcaattgtgagcatcacccaaatctttttccctagaatgatcaccattctcattacctttataactcgaactctctacaaaaataaaacatatagttcacatctcatacataaaagtacaccacaaaaataaaaggaatattggcggcaaaaccacttaactatatcgattgtaacacttaacccccacaaacttattttttgacggctaaattacataaacctcacttctgttatgctagttaaccttgactgtccatgtgtaccaaaatgtacacaatttatgttttgattggtccacctaattttcaatatttaaataaaaataaaataatttaattctttttaaaaataattaaaaatgagaaaaaaaaaat

SEQ ID NO: 381172 - DNA, 1997 bp, Cannabis indica
gatgatgatgtaatatttggttgctctgcgctattgggtgtcttttatcctttgcagggagaaggcaagcgcattgaaatggttagacacttgacagaataagagcatttgactaacggaaaattaatttgaccctcgaaagttaagctgttggtgttgatgcactctctcttcatattccatttcattttttttttttttttgtaatattcttttgtctcttcctgtttcttccgctacaactatagatcaatttgagttgcagagaagaaagaagaagacgcattcatttcaagcttgagctattcatggcttgagccatcatataaatgtatcagatattgttgctgtaagttctttcttgtaaggctttttaaaataaatttacttaatgaactgataaacttaaagcagtttttttgatctcttaaacttgtcagtgttggctttgacacattattaatttattattatgattatttatgaccaaatagtcaaagaaaggacaaacatagtgtagaagaaaaacaaagaaaaaggaaaacgtattgtagctaaggttaagtattattagctagccacgtgccgtcacgtgtgtcatgccagacaatggggttagtactaacgtggatccatatgcattagctatttcctaggattatacccgaatttaacatactattgttaggacacaatactatatttatatagtgcgttaattataattttatattattattaattaaaaatgtaatatttttaacacataccaaatttgaattaatttacattaataataatataacacattttatagtgcttaaggtattccttagcattactcaatttagtattagtttaatatacatatctttgtcaatttttttattagtatttactgttttattaattgattatactactcgtacatgatgacggtagaaaagtataatataaccccaaaaatgctaatagaccataagctgattaggtgagaacatttgcttaatgaaggtttttgacatggtattttctacttgtaataaaaagaaatttaaaaacatttatataattctcacgaaccattctttgttgaatatgagaatcccacaaatctaacattaattagttaattcggtataatggaattaaatcataataataacaaacataaatatgaagtgacaatttcaggtggaaacaacaccattaagattctttagcatataaacaagaatgtgccatttaaataatgaagcaaaagagttaatggaatggaaggccccatttcatttatgtcatttctgtatttggtgccaaataatgttctttttacgtcactaccagcccttttaatttcatttaattatttcacggataataactagaataattcatggatatttgtggctgctactagatagatattgatgttttatttatttatttatttatttcaggaccatttttataattatagagatgacaatgacactacgaggataacacaaatttattgggtagtggtgagattagataatccttctttcaattaatatgttgttcttggatttaatcggaaagtgaatagtgttacacatcttgtggctgaaaattttaacaatttaagtgtcccatctttcttaatttcaacacttttgccttcttcatataattgacttgacatcattacaagagataatggctagtaatttcaattatggtttaattagtctctattttgtttatagtctcaagtgctaatctctctcttttagatgatgtatttaacggttgtacctcagtttttgttaaataataaattagaacatgtatttttaaaatagtacaaaatagcactgtgagttaatttttttttggcaaaataaaactaaataataacctaatttagatgtgttatgacaagactgaatacaattttacatctattcatgatagaaatttttttcaagttgattattgttgggaattatttt

SEQ ID NO: 381173 - DNA, 1813 bp, Cannabis indica
tataatatgtataaacttttaatggtatacaaggagtcctatcgtaaaagtatacaccttacatcataataaccacatgatctaaaatcaatgataaaaaaaagtaccctactagtagagaatttttgctaggttctaccatatttttgctccatatatataatattagagtgtacttgttaattttgtagtgtaactcatatcatttgagttttaagtgacagagtgaagtccacctagaaatttacgaggcctagtatcattttctcacttatcattaatattggacctacacaaacggaaatacaatagtaccaaaggcaaattcttcagttataaataccctccaaacacttgatataataatataagagccacactactgctagcctaaagtcaaaatctatcatcaccaaaaatgaggtcctctattattttgttatttcttttagtgctcacatacttctccacctctacccatgccgccagatttgacatcacaaacagatgttcctacaccgtctgggctgctgccgtacccggcggtggaaggcagctgaaccccggccaatcatgggcccttgacgtgaatgccggcaccaaaggagctcggatatgggctcgaacaggttgtaatttcgatggggcaggaaatggcaggtgccagactggcgactgcggtggcaaactcaattgtcagagctatggacagcctcccaacacgttggccgagtacgcgctcaaccaattcaacaacttagatttctttgacatctcccttgtggacggattcaatgtccccatggacttcagccccacatcgcgccagtgcagccgagggatcaggtgtacggcagacataaacggccaatgtcctggtcaattgagggcaccaggaggctgcaacaacccatgtactgtctttaaaaccgatcagtattgttgtaactccggtaattgtggtgctacagatctttcgaggttctttaagacacgatgccctgatgcttatagttaccctaaggatgatcaaaccagtacttttacatgccctggtggaactaactataaggttgtcttctgtgcttgaattagtgatggtatacgtcgccacgcaaagcttttgtaataatatttatgttatgtagaataaaagcacatacatatattagtgtgtgtttacttcgttggcatactcaggtgtgatgaaagtttattatgtacgtgtcgatcattcctatataataatataaacttaattatgtctttttgtattcgccttcaaataaaattcactgaaaaaataaaatggactattttataaaatattgtttctaaacatataaattgcttcaaattgaagcctttgagaaagacccgaaatagctatttttataaatgatatttattaaataataaatagatttagagtcactataagaaaataggcctatcgcggcgggcctagcctcccgttattgttctatctcgacgggcacaaaccgtcgtgaatttgaatgccgacattgagaaagggcattctcgacgggctaggcccgccgagataggtgagcaatctcggcgggctaaggcccccgtaattgatcaatttcttattaaaaaaaattacagaaatcaaaattcacttgttattgccaatattatacatctatatttttaccaaaattttagaccacaataacaattgatataaagcaaaaataattttttatacaagtatcaatacataataataacaaaaatctttcaaaataaacaaactcaaataaacatcatgtacattaggaaaaaa

SEQ ID NO: 381174 - DNA, 4408 bp, Cannabis indica
gatcattgtcaataagtggctaacaaactaaatagtatatcatttttacacagaaaataatatatacatataagcttaaagctgggtaacaattacagctgctcaatcaataatagctcgtatacacctttagcttacagtactctagatgtataccgataccataatgcctatgctctttctcgttgttggcttttcccttctgttcgtattcgcccttaggtgtataactttcaagtattttgagaagaatttgtggattaaaagagagtggaggttacttgatgctctttcagaagatttccgcaaagcatatcgtacagtgaatcagatcaaagaaaaggccaatcaagtgtgggactccgagctcaatattggaggaataactctaactttgagtgaggccgagacgcgttggcttaaaaaagcaggaaaagtaggcatttgtgccaaaaaatgggctcaggatctggagaaactacttaagttagaaaagagatgggggtgctgcaaaaagctttgttttggtcctcagaaacgtaggagatattttcgagcttgcttatgggattttcagaacgaagggagagatcacgatcaagactaaaatttccaatggaattttcagaacaaagggagagaagacaatcaaagctgagttgcaagaggttgtgaaaaaaataaacttcactaatcacatcatcaaatcagttgaggaatccaggactaaacttagcagactgcaagatcggcccattgaggagacagagcatctgggttatgtccctgcaatgctgcatgttggtccagtggttccttttgtcttggagcgcatgattgatgagactccaaatcatttgatacgtgggagaactatggtgaagaaaacaagatccattctcctacaaatgcaactacttgagccttacatgagagacttgcgagggatgacaatggaaagtaacattgaaaaggtttgggtggaggaagctatggaaatgaatatccaagtacgcaatgagataaatgttttcttacaagaggcctcaagtcaaaaacagaactttttcagcgattggattatgaggcataagctcaagcagattgtgaagcgtgtagataaagagttaactcatcttctccagttgaaagagacatacggtttcaatttcatcagaagagtcccgtccaagggctatgcccgcatgatcaggccgctttccacacaacaaaggggcattaaggttcttgtggatgacattcagagccagctgcgcatggtcaatgaacgtagccagatatcaaaaggattaagagaaggtttgtgtgatgaatttggttcagtttggagcaagttgagcaatctagaagcaaatgaaggtgcgaccaatacgaggatggcttgcttcgaaatattgaagaaaatgctggtgaatacgcaacaattattggaagatggtcgagaagcaacgaatgtgtcaaggggaatagctagtttaaagctgttgaagttaatggctccttattcggaagaatcacgacagacaaagcaattgatggacactgccaagcttcttaataaatgcatacactcatataaaatcaaggtgatggatgaatcatgctctgttttcggccttgaagaagacatacacaaacttgttttgaagctaactgacactaacaacaatgataatgcactgatcatttccatagttggtatgagaggcataggtaagactactctagctaagattatctataatcatagatacattatcaaccgattcgaagagcgtgttctggtttccatgcgcaaggagtactactctgaccacaatctacttctcaaaggcgttgcaaaccagatcatggggacaaacgaagaaagctctgaaagtcaatattggattgaaaagataagaaatttcttaagggtcaagcgctgccttatagttcttgatgatctttcttccgtggaagcttcggattatttacttaaagaagtctttgaatgcagagaaatggcaaaaaaaggaagcaagattgtgttcactacacgtagcaaagatgtagctgtacttagtactagcatccacaatcttcgattgagaactaaagaagaaagttgggagcttttcacccaaatgatccaatgtcctgctgatccgtgaagttaagtcactagcagagaaagtggtagcgaggactggtggtttgccactggctattttacgcctgggatatctcttgtcaggaaaaaaaagtgagctgtgatgttttgtacaagagtgcttgttcgtgtatctcaaggagatcaaaacaaagcaccatggattgagatcagagatgtgaataaatcccagtacttgcgggggcaaccaagtactgattttgataaatgtctttcttactttgagttgttcccttgggattttgaaatcccagtaagaagattggttgctttgtgggttgcagaaggattagtgggagagacaattcatgatgagagggcctacgaatttgtttatgagctcattgatcgaaatatgatccaaattgtgaagaaaaagaataatgggaaagttaagacgtgtcgctttcctagtatcttaagagaagtttggttgcaaaacagacgacaggacaagaattctctgtcttggtcattgtataccagtttcgatagacaagttgcctatcatttcgacgataaagaagccagccatgatggcggaactcatggtctagactcggagactgtttcaaaacatgatggatatcctttctccattgtggtctttgataatcgacaaggatcatatcctggtaaagatatacgtagctttttgatcaagggcattcaaagtggacgcttccaaggcttagtggttcttgatcttgaaggtgtatgcgggcctaacttgtctcgcgccttaaaaaaactcaagaagctcaaatatctaggccttagacggactgagataaagactcttccatcatcaataagccagttggtgcatctggagactctagatttgaaacatactcatctcgaaaaagttccatcttcaatttggaaactgaagaaacttcaacgtttgtacttggacaggagttgtagacttcactttaaaggtattttcatgccaaatctgcagatcttatctgcctttttggatcatggtcaaggcaagaatattgctttaatgaacgagctacacaagttgagcaaccttagaaaattgcgattaacactaatccaatggacagagccacaacaacagcaattagcgacatgccttggcaaattgactcacctaatctctttgagtttgaaatcagttgacgagaacatgtcgcctcaagaactagtgttgggaaattgtttgaaagaacttaccaatctttctaaactatatttatcaggaaagttaataaagctgaatagcaacgtcactgaactaccaaaaagccttgttgaagttacgttggcaaaatctaaactctcaggaccagaaagcttggtactaatgaggaagctagcaaaacttccactgcttaatcttcttcatttcaggtctaacgtttgttgtgtaccaaaaatggtcttccctaaaaaggggtttccccagcttctggttatgaaattatgggatctagatcagctggttgaacttaaagtagaggaagacacaatgcaaaaactccgagaattagagattagatgcgggaagttggaaaagaccattggattgacgcacttaaaaaatcttcaagaattgaagttaacagacattggtgaagaactcgtacaagccatcgaaaatgattttttagcagctaataacattatttattttacgagcataattagattaattcacacaagtagcaatttaatttgatgtagttcattattaatgttgttacttgttagttgttgtgtgtagtagtgggaattacttactatacgtttctttattatgtatttgataaattaatgttcacaatataatattttgtattttcaaggcagaacaatgtgtttgaacctaccatttatatttattgcttctatacccaacttttataatatgatatatctgcacgatttgtcgtatgatgatattataattgaagaagataagtcctatctagatcttaaagcgaaagagtcgactctgcaagtttatttaatttttgtcccacgaattaaatattatgcattgtatacaacgaattaaataaatactctttcccactgttttcacatgtgtacctactcaagaaaagtctttgcagatcttactcattaattaactcgatttttctcataaaattaaacacgtttgctcaagtttaattaaataaattgtgaaatctcatccgtcgacttttttttgtt

SEQ ID NO: 381175 - DNA, 2441 bp, Cannabis indica
atatatactttctgctatttcaccattaagattattttggccaagaaaaaggtactctaatgaactacaattcccaagttgtgatggaagattaccttgcaagtagtttctttggagattcaatgatctaagtgaagaagaattgtgacatatactttttggaagaaaaccctccaaggaattctcagagatatctaactcttgtattgaaggtaaattaatagcagtggaaattgggcctgctagataattagagctcaggtctagaacttgtaaatttggtaagtggaagagtgattttggaagggagcctttaaaaaagttgtgggacaaattgagagctttcagctgatccaaatttccaagtgattcagagagcttaccagaaagtttcttctctgcaagatctaactctgcaactttccctgtagatgaagaatggcatgtgattcctttccatttgcagcaatcagaataggattcagattcccacccatcaatcactgtttccaaacccctcacgaaatcctgtaatgcttgaaaatcatttgggtggcatgataggctttgagcctgagattgtaagaaacatcctataaaactgaggatgaccaagaaatctaaagcacccatttggaagaagatgctgcagaacacattcaaatggacaaataatttgtagaattcaagttgtcagttccattctacataaatggtagtcaagtttttgccaagataaagccaactatattgactaagttgagttgagtgcgagtgagatattagagaaaaagtagttaacactaccatcaaagtagttaacactgtctcgaatgccaccaataatttcaagctatttcatcaaaataattaatagaatagatttattaacatttttttaacattactcaattgtctctccaactaattaatttccttttagttacattttaggtatttcactttttcttttttcctttgctatctctaccgcaatataggttaatttttttttctttttctcattttatcttttttgtttgctaattaacgagttgtactatatgtataattattgttttatttatttatttattttgaaaagaaatatatgtatttatgaagattaaaaagaaattaaataattaatctctacaaattttgtctacagtatataatatattgactgctgaatggctagagccaaagagtgtcaattgtattttttttttaagaggttcgtaactttttttttttaattaaattaattattttcttaaaataattaatttttaatttgaatatttaagaagactctttttagtaatttatatttataaataattttatttttttaatggagtttccaacaatttttctacgaagatttgagagtaaaacacgaagaaatttctgctctggttctctaaaagtgaaaatgcctaaaaagaattccttgaaggtattaatccccttttataagtatctaaaggggtaattaattcatttaaaattcaaatatttgaggttttttttttttttcttaaaagtgaatgtgagtactcattgtgaaagtacatacgtcacgtatgcggtgtcacttaacagtcagtgcgtgactcgaggtacaactttcaaaagatatttaatgcctcagacaccgaagagacctttgatcaagtcacgtcggatcaatattgataattagacacgtgtcacccattcgtgcaacttcctagctgaataagttcacgtgtgaccaagaaggtcccgcacagacttgggggcaaatattatcctaattttttaactatgacgtggcatctgactgggtgacatgtgtatcatatttcataacttgggcagatggttatactcctagcatgctatgcagattgatatgaagcccaaagttatacatgaatggtaggacgtccgaacatggttatttgtggacatccgaccagcttgatcacgtaagtaacttgcatgcaccgaccagggggtgcgagttagcaatctcagagatggacatcgttatttctaatctagcatgtcacgaaaacaatccctacatttgtggaattaattcgtatctttagagaataaagacaattggcttagatttcctcatctctttattgtaattatgaaacatactagtttcctattgtatttgttatagattaagggaaaccattcttcatgtaatttgcccttataaatagtggtttaatctcaccattcagggttagaaaataattcagagagaaaatacttaagagtgaaacctcaatctaagagtgaagttcttaaagatcattgtaagaactttcgagagagatcagagtattcttgcttactcttatcacaagttaatacaatgataactctagaaattagagttatttttcacattttttttttactaaaaattggtt

SEQ ID NO: 381176 - DNA, 2590 bp, Cannabis indica
tccattaatatgtcaatctaatttaatttaattcgcacgatcaaatttaaactaatatgtttacgaattgtattggatttaaaaatctaaaatatatacctgtacgtttgatatgtaaaagtagtcgatccaattcaatatacatatttatatatatgaatataaatatatgtatacaattaatattttattataaaataataatttaaaaatctaatacatattatataaatatattttaaacagatcacatatatattttatttttatatatatataaaatataatttagaacaaaattaaatattttcttctacttatattttttatttgaatttgttatttattattttatttattttattttattattagagatataaaataataatactttatgttattttatttttaattatgtaaaaatataattattaataaatattaaataatttaatattaaaagataattaatgtaaaataactatttaatctgcactaatttgaattaaattgaatttaatctaaaatataaaatggtagttaatgaggatcacatgcacacactcattgattattattctatataacccatattacattattaaaatgtataaattcattcccagcaaaaaaatatgtattaattcaaaatttgtatcttttcttaagcaacagtcaaagccaactaggataatcatggtctatccaccctatccaatcagtatccatattaatttgacttttaactttgatatgtaaataatatattttttatcaaaaaaggacaaaatttgatgataaattttaggctgtcaacttggcttgctattataaacattttttttgttggttgaatttggggaccagctaaatcaacttgtcatttatacaaacataaattatcttttatattcatttactaacattagcctttgctttacagaattatgtcttagtctcattgtttgactaaaagactttttggactatctgggaaaaattacaaccttcaataatttgcaaaacagttaataaattatctagcttgcccccttaaccaaaataaataaataaaaagtaaagttatttgggattaaagggatatgcagctttaatctgatcagtaaaggcgaattaaataggtgatagataatctatttattaaatcaagaaataacaaataaggcactttcattttgagatgttttcaaggaaaactcatacaatacttaatgcatacatagatatatagtgtatacgtacatatatgtgtgttggatattgacaattgtaatgtgatgaataaatggacggctgcttaagttagttgttgaggatgataagataaaacataatattttataaatggaaaaaaaaaataggcagagttacgttaacaactgaaaaaaatggagaatggattgcgaattgtagtaaccaaaacttttggatggacttacctaaacaaataatgtgttttgtgggacattggttttgacacatgaacaatgttttttcttttgataattttagtttttaattttgcataatttcacttcttttttaggggggattatagcaaaagaataagaaagacataacaatggaaaattgagaacaaaagatattaaaattaagttttgatacttttcaaacaaaaaaaaattaagttttgataaatttactgaaatgcccataatccaaaaaaaaaaaaaaaaatcactattcacaagaattacaccaatgattgatgaacgattagaccaatgaaaacaaaatctaaacttctgaaattaaaagagaaaaaaattcccaaaaaatctcaacaacaatcaatgataaactcataaaaatcatgaaccaaaaaaagaaaaaacatgtaattttagttctatgatatgacacatgatgcatatactactatatcatcataatcatacagatatacacatatatattagtaataatacatataaaagaaaagaaaaaaacaggtgtatttactattttgccctcctccggttcgatttgggctgacgagccaaaatcggttttccaaacacaccgcaacagccggagaatcgaggagacggtgggtcggcggaaggagaaggttccttgaccgtccgatagggacggccgcctgtggatcggctccgttcaagcgcgccacgtggctctccgtcgtctccagccgtatcagtagtagcagtagaagtagtatgattgttgtcttgtttggtttggtcgtgttgtaaagcctctgctacgagcttatcgtcccaaatcaagcctgaagatccttgccttctgaaagatatttccgacctctgcaactgatccgccatagctcttctttctctctcctctttctctcttctctctctctaggaagagaattgtgggttttaaggtcgaatttcaagtcccattctggagctttgaaatgaggaaattttaagattttttatttttttatttttatttcagggctaagaatggaaattgaatttattattattattacggtttcgttatgttatataatcgacacctttttaatatatttttttaattttaaatgggt

SEQ ID NO: 381177 - DNA, 1448 bp, Cannabis indica
atatcataatataatttctcaatagtacataattaaccttgttagatttgctaatctagttattaaaccttagggtattacatcaaagatcgtcaatatatgtataatcataatcaaagataagatcgagtcacaattcaataagttcttacatgttttagtagatttaatttattatgcatgattagaaaagtgtgataggaagcatgttagcaaactaatagctgaataggagcatattaagttcccatgtaagcagtaaatagattacaattttgattgctacctgacttagttgactcatgaattcttaggcttgtcctataaaatggatgcctgaagaaacataaggagttggaacgatgttgtcgatactagtggtggttggggagattgggatccccatcattttcgaggccaaggcagaggctgttgaatgacttatggaggtggttataaaaatccaccacaagctccgctagactgggagcaataatttgttgaaatggaggccaagattcaatgacaagatgaggagattaagagataaagacaaaaaggatcgcatatcgtaccttcacctcaaataccaattgcttttattctagtgttgccaacataatagagtatggctggtaaccaaatggaaccactgtatgggatataattttggatgtaaggacctctagtccttcaggaagaatcagatgtgatacactttgaccgagagcactgcagagtttgttcaaaagcctagatggactccacttgttggtggggtcactgctcctcttacttctaatcttggtggaaatggtggtagttctttggctgatcaaaagagaaaagctccatcaatagcggtggccttgagtcaataagatgttttgagggaaacaaggacatggtggtcaaaattgtagccttggaggtcgttatacttatccagagtgctcttgttataagaaacatcatttgggtagtgtaatcgtaatgcatgctatcaatttggtttggtaggtcacttcaagagagacttctcatgtttgaagaaggaagaatcaaaaccagaggcaaatccactccaactcgagtgctttccattacccaaaccgatgctgaagctagtccttatgtggtgacaggtcaacttcttgttaacaaatcttttactcagtattagttgactctagagctacacactcatatgtggcgaccaagataattgataaattaggcaggccttgtgacaattgtgaaataggattcggaaccctattacctagcgaagaattaattatctccaaaagatagattaggtcgatgctgattagagttgagtatagggaattgtaacgtccccgcttcaagcctctattgggcccttacacccacggattaacgactcttatacacgagtacgccactttggctgcttcctggattaa

SEQ ID NO: 381178 - DNA, 3505 bp, Cannabis indica
ttgctattaggcactagtggtatttagcacttttgcaatatgtcgcgttgtgattgattagcgatacttcttaaaaattattatattaaattatataggaccaaatacttaattagactaatagtaatattgatacataaaaaattattagacaccactaatcacttttaacatttctctacaaacaatatctacaaatagaaagagaattttctttttttcaatttcaaatggaaaaatacattgctttaaatggtgagtttgacaaattcagattgaacttaattttcactggaatgattctaaactctagttggtgtgtgggtgctgctgagctgactccaacaaaaataaatatttttaactatttgatttattaaatgaggcttgcattaacaatgtacaggagaaatgatagtggggcctacaaaaacactattcatggatgagatatcaacgggtctagacagctccaccacattccaaatagtcaagtgtcttcaacagatcgtacacctcaccgaagctaccgtgttgatgtccttactccagcccgccccagagacctttgatctttttgatgacatcattcttttgtcagagggccagatagtctaccagggcccacgagaacacattttggacttctttgccagctgtggcttccgctgtccagaaaggaaaggaacagctgatttcttacaagaggtaaggcccaattccaactcaaccaggcccaggcccgttttctattgttgggcttaatttgggaaaatgggctaactttcttctcttttcttccattgtaggtgacgtcgaagaaagaccaagagcaatactggtcagagcgaaacaaggcgtaccggtacataccggtttctgagttcgccagcaggttcaaacggttccacgtgggcatgaggctggagaacgagctctctgtcccgttcgacaaggaacgaggtcacaaagcagccttggtattcgaaaagtactcagtctccaaaatggagcttctgaaagcttgtttcgacaaggaatggctactcataaagagaaactctttcgtttatgtcttcaaatctgttcaaatggtcattgttgcgttcattgccgccacagtgttcttaaaacccacaatgaagatcagaaacggaggagaagacgatggagctgtattcattggtgctctgttattttccatgatacataacatgtttaatggcttctctgagctctcaatgaccattgttagactccctgtgttttacaagcaaagagaccttcttttccaccctgcatggactttcactcttcccacagccgtccttaaaattcccatttcagtattcgaatccttggtttggataatcatgacttattactctattgggttcgctcctgaagctagcaggtactaaccctcacttgtttttgtattttatatataataataagcatacacgaagaagactatattttgtgttttggtacataaaacgcaattgggttttcgtttttgcaggtttttcaagcaactattgctgatatttgccacgcaacaaatggctgctggactatttaggcttattgctggagtttgcagaactatgattatagccaacactggtggggcacttggtttgcttcttattttcatgcttggaggcttcattgttcctaaaggttagttttattgtcccatctaagcaaataaaacactctgtttttaaaaatgttcagtggcttatgagaacttgattaatttaacagatgaaattccaaaatggtgggtctggggatactgggtttcgcctataacttatggttacaatgcaattaccgtgaatgaaatgcttgctccaaggtggatgaacaaactggtatgtttcaaacatggaattgttggttcttttttttccttgttttatttactttttccgtttctcttttagcatttctgaaaagatacaacgtattatttccaatgcaggcttcagacaattctactgctttggggttgaaagtacttcagacttttaatgtctttcccgataaaaactggttttggatcggcactggagctcttctggggttcgcaattctgttcaacatcctattcacgttctctcttatgtatctaagtcgtaagtttcaactctttgtcaaatgtttggtatcaaactaagatagtattgtgtgcttctttgtgttgagaatagtttttcatgttttgtttacgaatatcagcacttaacaagccacaagccataatatctgaagaaactgctcaagaaatggaaggagaccaagaagaatcgaaggaagagccaagacttcgaagacccaagtctaacaaggagtcaatgaatagatcactgtcaactgcagatggaaataacacaagtaaggaaaaaacttccaaaaagattcaatatttcatatgttacctttatgtagtattctaaagtggctttacaaaatattttaggagaaatggctatccggcgaatggccagtcgatctaatcccaatggactaagcagaaatggtgattctaaccttgaagaggctaatggagttgcccccaaaagaggaatggtgctgcccttcacccctcttgcaatgtcatttgactgcgtgaactactttgtagacatgcccccagtaagaatccttttcctaattatccttgtttgtgcttatcaatcgagcattgcagctgtcctaattaagcacctcaatattagcttatcttgtttaatctttgaatggttttaacaacaggaaatgagagaacaaggagtaacagaggacaggttacagctacttcgtgaagtaactggtgcatttaggcctggcgtactgactgcactaatgggagtcagtggagctggaaagacaactttgatggatgttttagcaggaagaaagacaggtggttacattgaaggtgatattagaatttccgggttccccaagaaacaagaaacctttgcaagaatttctggttattgtgaacaaaatgacatccactcaccacaagtcacaattaaagaatccttgatttactctgcattcctcagactccctaaggaagtcagcaaggaagaaaagatggtaagtatctgtttgttttgcttttctgcaccaaacaaagaaaaaagttgagatttagttgtaaaagtgccaattttttccttttgtagatttttgtggacgaagtgatggaattagtagagctagataatctaaaggatgccatagtgggacttcccggaatcacaggattgtcaactgaacagagaaagagattgactattgcagtggagcttgttgctaatccttcaatcatttttatggatgaaccaacatcaggtctcgatgcaagagcagctgctattgttatgagggctgttagaaacactgttgacactggaagaacagttgtctgcacaattcatcagcccagcattgatatctttgaagcctttgatgaggtaat

SEQ ID NO: 381179 - DNA, 1685 bp, Cannabis indica
gacttaaaatatattatattattctcatgctattattatatattaaaaaattcgtaattaaaaatattagtcacaaaaataataatttattgtaaatagatgtatgtagtttaaaagtacgtaattaattaatgataacaaactctcgtatctaaatatactaatttttagtgacaaaattaataacattttttttttgaaagtgacattagatactaaaaattatgctaatttttattaacaatgcatgcctcttaggatgtattatatgtttgactctttagaaagctagtttgttatgctcgtctagagggacggaggtagaaattataattgagggggccaaagtgcaaaaaatataaattaagagggccggaccaattcggtaaatttttaataaaaaaactcaaaattataactaattaaaaaaattaaaattcttaatggaaatagaatcctcgagataattataatttattgaaaactcaattagagagaatgaagtataagttcttctatattaattagcaattacgtgatcaatcctgaattatttataatttattgttttgttttgttttaataatatgttttaactttataattcacatgaaaaatcatagattaagcaataacaattaaagggatattttatatttttttacttgtttaataatgtatttattatattagttagaatatatattagaatattggtaacgggaattaaagttaattagagctcaataatattctaaatatttttatttatttaattatttatattaattaattgaaactttaaaattgtaagaaaaatctgaaaaactgctatctaatttctgtgttgctcttaagaaaatgtttcacttaatttgtatggatatatataatggatttgcttatattaattaactactgatatttgccactgaattaagtatatgcatgaaatagtattaattgttttttttttggttaagaagtatagatatatatttatatgctattatattattatattattatatataaatatattgatcagttcagaaaatttagttgattttatgagctttataatgaatctatcgtgtatttttttaacaaattaatttttttttaaaaaagaattcatttataaacctaaacgattacaaagaaaatggctcctcagctcgaagagtatgacgaacacaaggggtgaaaccctaatccacatagcgctaaccttggataacaaagcttgattggctaaaatgtgagccacataattagcctctctaaaaataaaagacaaacccataacagaaaggtgtaaaagcaattctttaatttgaaataacggcccgtcaatgtcccgacatcattctgtctttaatcaattaatttaagttatacatatatatatatttatattattatataaatatattgatcagttgagaaaattacttgaccaaaaagcaattgtaattattatattagtactcaatttattatgaaacaattattgttgttggttttatgttttgtccacatttggaaagaaaaatacaatttctcttgtagttgtaattacaataaggaacacgtacaaattatttcctctagtaaaaagtagtgtgcatataaatattttgtttttgtttaattaattatgttttaagaatatatattttttt

SEQ ID NO: 381180 - DNA, 3023 bp, Cannabis indica
agcctaaaacgcacacctatctcgccttacctcagggctggccctgtctagcgtgtattccaaaatataagttgggatggcgctgcatgcacatatttatagctatagtttggtcttaatcatattgtaattgccaattgtcatagtgaaataatggattcttaagaggagttcaaagagtagtagcacaacaaaaacattgaacaccatgaattcaactgaattcataaaatgaaagtgaagttcatcaatcacaaatgagttgcaaagacttaccacccaatcagtgagagcttttcgatcaattcgaccattctctgtcccaatcataggaagaacaagatccacttcttccctaatcatgaatctcatgagatcatcctcatcaatgtacctatatgtcattacaaaaggccaagttaaacataaaatttaaccaagcaaataaggtaataactcaaataagctagattattatgtcctcacttggaaccaggccgagcaacatttctgaaaatgtgataagcagcagcagttgcctccatctcattagtaatctccttatcatgttctttaccaacattttccatctcatccaacggataagaaatgctcgaaagccccgaactcgaaacaacattgattaaagccttcatagaccaagctgaaaccttctcttgtttcatcttataaagttgaggcatatcaataacttgtgtttcttcatccatgtctcccttttttgtacttgtaaaactcgattgtcgccccatgctcggtgacctcctaaccctctgagcctcctcaatgagtggaggccctgaaagggttttgaatcctatcaaagaatgtgttgacatgaaaacttgaagccaagatttttaaccctaaagtctttaacaaccacaaaaatgccccaatgagaaaagttgcgagagtcaaagttatgtactctagaattttggtagctgttttagaccttgaaacaccactatggttaaagacaaatagccaagttagaagaacaaaacacaaccaaataaagactcgaacactcttctttagcccataaacaaagtaaagaactttctttctaagcaaaaaatttgcctcaatgaagaaaactattacatgcataaaccaattagtcactaacaaaccacaaaaaatgaccataattagaacaaaccatctccataactccaaaccccaaacgattgttttctctaatttcttaatagtcaaactacaaaccaaacaactaactaagatcacaaacaaaacccactcaaccaaaactttagtcttcaatttcttgctcttcactttcttcaactcaacttttttataaatctcctcaaagtcatcaaggcttggtgaagcgtgctcttcttcaaccactttaagggttttcctgcgagtaagagtctcttgtggagcttgttctacattgattacaaatgattctccattgttatctggttttatctccggcgaagaaggggtcgttggagatttattggggcttggccggaaccctgaaatctccggccaatccataaaagatgctttctttggtaattctgagacttttgaaaaagacccttttgccccttcagcttctagaattgattctggttttatcttcggcgaagcaggagtcgccggaggtggccggaaccctggaatctccggtgaattcataaaagatgctttctttggtaattctgagacttttgaagaagacccttttgcccctttaggttctacacttggaatatcaactacaattgattctccattgttgtctggttttaagcttttttcccttacttccatcaaaattcaaaaccttttaaaaaggaaaaaaggttagtttggattgaagataaaatggaaactgaaatgcccagaagcttatattgatttattcataattaaaaattaaacctttcttctttctagatcagatctggaaaattatggcgcgaaaaaagagtttaaatattattaaactaattaaagaaatagtctttacaagttttagttgaataaacatatgaatgactgaactcaagtcaacttaagaaaatgattccattgtgatctgttgttacttgtacgatcagtatcaagtcatatgttactcccataatttatgactaaattattgtttgttttaatgttatttcaaatcaagtgttaatattttaaaaagatcatttttggatttttgccaaaaatatattattttgaattaaatttgactaaaaatataccataaaaccatatctattaaggctaaaatttagctattactatttttttttttttcaaaatttacacattttatattatttaacaaaatattaaaaaaaaaaaataacaatacactatatttataactctttattaaatatactcttatagaacttttcttctcatttaatttctttcaggaaagtcaccttaagtttaaggttatacataaactagagaactaagccgcgctttgcgcggtgttgctcaatatttatttgtaattttttttatatatttttttagtttattgattgaggagcataatataaaatatagcattgtgatgtttgaattatgaaaaaaataatagtttagagttttagaatattttaattcagtatttttaaaacatgtagaaaaatgtggttatttttgttagaaatactgtaaatctgtatttagccctaattaattcaagagaatcaaacaataaaattaaggaatagcggaagcgtaccggagtccatagaatcgattttgtaataaccttagattggtatgatcttccaatttttgcatcaaaaccttctctctggaactttagttttcttgatgatggggattcaagaatacgatatgaagcgatgcaaaaaatggggaccaatacctgtttaaattaatcctttttgactatttccaatttggcccctcatcaaattagaaattgtctaattggtatccacatattaaaatcataacaa

SEQ ID NO: 381181 - DNA, 3913 bp, Cannabis indica
aagtttttcaacataactttatagatatatgctgactattttgtcttggaaatgatccagatgaccgacctgagtatgctacaatacaggccattctttacggcccttatctacttgttggacatagcagtggtgattggaacctaaaaactggatcaattagctctccttcaaattggattactccaatcccttcctcttacaatgattatttggtgtcgttcacccaagaccatgaagactcaacactcgtcttaacaaactcaaacaattttatcactatggagaaacttcctgaatctgggacagactcttctcttcatgccactttcagactcatcataacggactcgccttcttcagacttatccccaaccaaggacatctttggaaaatcagtaatgttggagccatttgattttcctggaatgattgtaatggagcaaggagaagacaatgacctcacagtgacagatccctcaaatgacaaaagttctacatcactttttcgggttgtttctggattagacggaagaaatgagtcagtatcattggagttgcaaagtaagaaaggttgctttgtgtatagtgtgagcaatgaggcaggtggcagattgaagctgggctgtaacttgaaaatatcatcaagtgtgggagccagctttgcaatgaataaaggactcaccaagtaccatcctattagctttgttgctaaaggagcatcaagaaatttccttttgtctccattgtttagctttagagatgaatcttacacagtttatttcaacattgcaacttaaattagatcataacatgaagatgactagccaccttcaatgggagtataaattttcatgtaggcaattattttattgaaagtactgaaataaaattcttttttttttttctaactcaggaagatcgtattacttcataaacctattaacaactccatctgtctacctcagattcccttttacaatgataatagcaaccccatttacaaatccccaaataaatctctatctcctatcccttcttaagccataattcttaagatattaaaagagaatcttgaagccaaaattaaaacaaatcttgttctctctaactcttctctgctagggtttagccatgacggggagaccaagattgcgaagagatgctgctaagattcaggcgactaagagggaaccaagaggaaagggccaagctttactgatacggtaaagaaaacaaagaagattgatgatataatcgggaatgaagaacttcacgtttcagattccgaacaagaatcacaagaacatttgattttgggtgaagagccattaccaacgattgttacgaaatctatgattggagatgatggtgtcgatgtagagcttccgccaagatcatccgacaaggaaatcttccacacatctgaggttaaggctttctttgcagaggtaatgggagtaatggcgagtgccaaaaatatagtaggtaatcctaaatctctacttctatttttgagctacaggagaaattggaggatgtgctaagatcctaaaagaaaacataatagatgaaattcacgactggaaatctactcttgtttgttatatgttggggcgaaccgtccaattcatgtcatggtaggttactcacgcatggtgtgtttactcacgcatgcgtgagtaaacattgattgaattagtttactcacgcatggtgtgtttttggtgagatttcatacaattgaagatagagatagtttgttaaagggtgtataccagttctttgataggaagcctttgataatgacggcttgggatctagatgtatcaagattggttatgaaaattgttagttggttagagtgtcggttaggatgttagttagttagttggttggttgcttaactgtcattttgaatttgcttagctgtattgtttcaaagctacatgtataagtagcttccattggtgtttgtatcagatgagatcattcattcaataaagatctggttttatattttttttctgtcttttgattcttcctgttcttgctctttcgagctgttatggtatcagagccaacttcgtgagctcttcttcttcttcttcttcttattcttctactttctctttgatttggtttttgctttgtgttaatggctcaaggcggtagagctcaagttcgaggtggaggagtacacactcgagcaaatcgtgaagcagagaacacattgattcgaatatgttctctgtccttggagaaaattcgagatcgacaactgcaaacgatctttcgaatccttattttcttttgaatggtgataatcctgtgctattctcgttcctaagattctcaaaggcagtgagaattacagcacatggagaagatcgatgctgattgctttggttgctagaaacaaagttaaattcgttaatggaaagctgccacaaccttatgaagatcacgatgattatgacagttggtgtagatgcaacaacactgtcatctctttgatcttgcacgcaatttctgatgagattgcagacaatatcatgtatcatgataatgctgcagaaatttgggcagagttacatgaacgcttcactgagaagaatgcacctcgtatctttgaagcaaagaagatgatggaaatcctcactcaagaatccaacactgttactacatactatactcaattgaaagcattatgggatcaaataagggagtatagaccacaacctgtttgttcttgtaatgcaatgaaggtgatccaagagtatcaagaagaggatcgattactcgaagttttggttggattaaatgattcctacagcttggttaggtctcagattttgatgcgtgatccccttccaagtgtgaataaagcttacgctgttgtggttcaggaagaaaggcaaaggagtttaactaatggaggtaatacttctactgagactgaaaggcacatcaggaaataatggacagtttgttggagttgttcaacctttcagatctaattacaattgtactcattgtggaatgaatgatcattcgattgagagatgttacaagttaaaaggatatcctcttggacataaataccatggcaagtttcccaatcgtgatgctaaagaaaatacagggaagccaacaggtgtaaatttttcaggagctgatgaaggaaaactagaggagtccttaatggagagagacctcatctctagcttgtcaagttttcaatgtcagaagcttatggccattcttgctaagaaaacaactgaatgtttctgaagatcaacctgtagtctctcacttctctggtaagaaattttttgttcataattctcaatggataattgacacaagagcaacacatcatgcgtgtcatgatttccttttattcaaaaatatttatgtcaattacaatttaaaaactgttcttttgcctaatggtttacatgcagaagtttcctgcataggaacagtcattttaaagcctgaacttactcttgagaatgtcttatatgtgcctacttttaagtgtaatctgttgtctgtcaactctttaacagccacaactaattgcaccttcttattttctgatgaaagttttgtcatccaagacacttccaagaccaaggtgattgggatgggtagaaagtttgacaacttgtactacctgggttgtgatcaaagttgtaattaaaaatttgcttctacttctccatctatttcagactcaaagatttctaatgaaacagtttggcactatagaatgggccatccaccttgtgtaaaaattcaccctttgaataaagctttgaaatttcatgttgattctaattccctatttcgttgctccattttgttattatgcaaaacaaagaaaacttcctttcatttcaaatca

SEQ ID NO: 381182 - DNA, 1521 bp, Cannabis indica
aatgaatgttaagggaaatatacggaaaatatctattcaaatcttctcaaaatctttattagtttttgactcaaaagtttgtttaatgataacttattgtacagagtataataaattatgtctttatgcaaataattttaaaatgagttttatattaattgtttttaataattttgttttaacttcttgcactttatttggtatattggattaaatcgtccaatcatatgtttctttcaatgttgagattacaggagattgtataatcttgtctactccaacctaatcaaatctttaagaatctaattcaatttagtgtaatcttactacgtaccaaataagtcaataatataatataatatataatatatatgtgtgtatatacataaaccctatcgtatttttcttcactcaaattcatttcaaatattgttgtacaattaattatgtctccattaatattatcattcccagaaatctcgacctttctcctactcatacctcctcttacaataattttccttgtctacaactactcactcaaatcaccacctcttccaccaggcccattccgatggcccattgtcggcaacctttttcaaatagggcccaatcctcacatgaccttagcacgcttcgccaaaatctacggcccagatcttttctcattcaaactcggtaccaagctcgtgatcgttggatcaactccagctgcagccatggcgattctaaagacccacgatcgaagtctctgtgctaggttcgttcctcacgttgctccatcaaagtgtcaaaagaaatatgactcaaccatcggttgggtcgatgaatgcaccgagagttggaagaacttacgtagttttactcgaactgagttattttcaggtaaagctataaactcccaagcattgataagagacaaaaaagtcaacgaaacggtcaaccacgtggccaaacacatgcaaggaaaggaaatcaaagttagagagattgcttttggtgctgtgttgaatatgatgggaaatattttggtgtcaaaagatatgattgagcaaagtaatgaaagtttgaaaggggagctttgtgagattatgaataagataactgatgttgcttcttctccaaatatatctgatttttatcctattttgggtccatttgatcttcagaatcttcaaaaaaggtccatggaattgtttgataggagttgtcagctttgggaggctattgtgaaagaaaggaaagcttcggaaacatcctctccatctccacctgattttctggattctctcattcaaaatggtcattctaccctcgacataaataatatttttatggtgagtgttcttattcttatatactatatagcatgcatgatgttgcaatatataagggaaatttgattttctatacttagaaaatcaaaaatttttttccctaaaccaaaaatttaaaatctaaaaaactattccttttttttcaaaaccccaaaaataccccccctcacaatattctctctct

SEQ ID NO: 381183 - DNA, 2026 bp, Cannabis indica
aaattagtttagagaaaaattggtatttcgtataaatttcacaataaaatataactttggacagtaagaactcatttcaaaatgccaaaacaagattacaagacaaatgagatatagtattgcattgcagccaataaatttctagtcactccactccaattgtcaaataaaatgaagggctctcgagaagtccataaaaatgcaatgcgaatcagttatgctttaatcaaatccggttgagcctgtgaattgaaaaggttagagagttccaactacacgaacgtgaaaaggaggcccacgacataagattggctcatcaggtgaatcagttctagcacgagctctgaggaggtcgttggcatcatcaatcattgcagcagctaccagagaatactcacccggaacaagaaaatacaaagagaaagaatgcttaatttcttgcaaaggaggaacctccatggcgattccacccaaaacacctgtattaaaattcaaaatcagctattggggaggaagatatgcataagcaaatttgactcgagcccttgaaaactacagttgagatcacaccaacactaacaaagtaaacaaaaagtcggcaggtaatgaaatattttaaattttcataaccaaatagcaatgagtgctcaaaaagtatagcatcaaataatacaaaggaaagaaaaaaaaaagtagaaaagagtgataatatgatctcaccagctaataaaacagttgctttggcaccctccacacagctctctccagctacatctctgcatgcaatgctaagattcatcttgatcatgtcctttgtgttattacgtactgtaacttccatcggagtcatgtcatgtgccagaacagaacccttagacgtaaaagggtgagcttgagcagtgaaatcttctggctcagaacagcttctaagaagcctgaatccaaatgtcaacggatctgggagcaatacatccataacagatgaccggagagcagcatgtatggcatccttgatgtttagttctccagagctattccgcccagatttccaccacaccttgattttagaaatgaggtttttgatagaagcattcagttcagcattggtgttcttttctgaaaagattgcacttctgcaactgccaaccccatctgtctggtcatccttcgcaaaaaaggaagcatcaagaataggtaatttaaaatgctccagcggtataagtaccctagcagagagatccctatcgattcttgttgtaagataaccatactcggaagtatctttgtcaacagaatgactatcatcattgctggaactgtccagttgaacagaaacggttatgtcaaacacaacatcagttggattagacaactctaactcaagaaatcggagtccccaacttcccctgtatggatcaattttcaccaatttatctatttcactgttagagccaacagcgtcttcagaacagtgactattcacatgagccaattgaggaaggctttcacccacgtgtgcaggaatctccattaatagcaattgagcctttacaaaagataaaccctgcaagacacaaatctgcagaggaacaaccagacgcttgccagggggaatagtttcatttgtttgaggatctttagaatttgatagaggccctgaagagaagaacaaaataagtgtcatactagaagttgtgaaaaactaaatgctgctaggggataacaacaaacagataaacactgctttctgctcaatcataaataacatagttcgatatcacaataaaagatgtccgtatatacgagtataagcaatgactttgctaacataaccaaaagacaacttgtgaatgcttgatataatttagcaataatattaactgaaaattagatccacttctaatcactgaaaatataaaatacaatatcaattagaaaaattctatactacacccttttaaaatgggtgtatcaatgcacccttatctacttcgatatctaaaaaactacttagtccaattttttt

SEQ ID NO: 381184 - DNA, 1789 bp, Cannabis indica
gtgtgcccgcatgcatcatatcattatattatatattcaaatataaattaatctaaaagaatattctacttttattttttttaaaaaaaaaatactataaatacaaggaattttaaattattttaaaataataattaagttataaactctcatcaacatatcgatgtattaattaagaatacgttttctcattttgttaatccaacattagatgctccttaaacttaggtatctgttaaaccaacgtccaaaaaatgcttttattaattaattaattaattatttttatttttgacttggttttttgtttttaatcttttttttggtaagtgtaagattaatttaagatagttttcttcccacttgattatagcttgactcaaaacataatgtaaaattaacataatgagttttgacacatacatacataggattataggataggcctatgtacctaaatttatcaactaagattgataatgatgacattataatgttttcttcatttagagatattgtttggataaatgttttgtaaggaaattattatgtgggtgagtgtcaaaaaagttttcacgtagggttgttttctatttatggtatttagagaattttggttttaagaaattatgaataatttatggtgatgaaaataagatttaaatagtccattgtatatgtctatcttttttctttttcatgtgacattggctttcactctaccaaccaaatcctcacttatcttatttgttgaaactactagttatcgatctctaaggtcctcgtagcaagaataagaatcagataataaatattttttacaaatttgttctcaatctactaaaaagagtctcgattcaacatacataacaacaaaaatagtacatatcaactattatgattttcgattgagtcacaacttccaaagataatttctattctattttttctaaaaacaaaatgttattagaaaattttagaatgcaaccataaaagcattggtgcaactttcttattttttttggacttattgacaagtgaaatcttgttttttatataaggaaaataatgtacattataattatttataatattttctaaatttttaaaagaatttaaataatttatagtgcttagaacatgattcaaatgatatgtttcacatacatacaacaagatatatatggctcgtttggtacgtcttgttgtattgtatggtgttgtattgtataatattgtgttagattgtgtattgtactaatagtatttaatacaaattatgtctagtattgatttgtatgaataacttgcgtaaaattgtattaatagtatcataaactcaatcccaacttcaacctcgtacgagtttggggttcgaggtgaggttgaggtcgggttcgagttcgaagtagggccaggtttagggttcatgtttgggatcagagtctgaggtctggggccgggcgggagccagggttggggtctgggtttgaatctagggtctggggccgaaatgacgtttggggtcgaggctgggtcgaggtttgggttcaggtttggcttccaggtaatgtctggggttcgggactgggtttctagtcagaggctaggaccagggtccccaaccctaaagtctttgaagaatacgatttttatacaatctaccaaacaaactcttaaattatatttaaaacactctaaattattttaaaattttatctaatgtattacatctcttttatattaaatatatattaaattttatatatttaaaaaatataatcaaatt

SEQ ID NO: 381185 - DNA, 2036 bp, Cannabis indica
gtggtgttttctctcgacagggtcaacgagttgaagttgcagggtcgttttcgaattgtaattaccgaaaccttggccaacgacatagaaattgaagccgtgcaaatgaagaggatggctctcggcgccaagaagactagtgtcctgcataaccaactcgacactagcattgtaaggcagcacaaccaccttagtcccattactaacattagtaatattagtactgttggaagaaactcctgtaaagttgaagaacttgagagggaagcttggaaaatccgtagtgtaaaccccatttgatctcccaaagaaatgggcttggagcagagcagtagaaggcagagtaaatgacacgttgttcaccgaagcagcgaactttgtttggttagttggtccctgacacgtttggtttttcgggcatggattggttccaagcccgaccgtgaagaaaaacctcttgtctaccgttttaggaacatttgcagggtacttagaattggccaaactccggagtttgctgctgaagtttgcagcaaacgacgtgtcgtttatttgtggtaaagttggtctgagaagcaataatgtttgctttgtagtatttgaattgtgactatcttgatgttgatggtggtggtggtggtgggggtgattgttggaggggttttcgtattcgaggattccagcaacggtggtgttgtcgaaagttcctaggcccgtggagtaaggtctggctagcatgaggaatttagtgtggtttggtggggaatttggttttgttttgaggagaaggtttgtggtttggccaggcgtgattagtataatgtcagtctcaaatggcttgacgtatagggcatcggcttcaactacggttacagtgtgatttgctatgctgaaaaagagttcatcgttgagtgcagcgttgatcaaacggaggagataggtttttcctggcttcacctttaatctaaaagtgtctgcaacatgcaaaatcaccatgtaatgtaaattattaccaaccaaaaccagtaaataaattattaccaaccaaaatcatatgtttatatataaaaagaagcatatatggtccactaaaggttttggaagttcaaatttgatgcatgtgtggttcatttacctttctgtgaacaattgtacaatgggccaggaagcccattgattgtgtaggcatcagagacatttgggcccgctccagtctgaagagcctggctgataacagtctctgtatccgcattccaccactcacctgcataatattgttgttattattagctaagtaatcacttacgtaatgtaataataagtaattggtatgaatatgatatggtaaaaatgtaaaattaatatttaccaaaaatgatgggaacttctttgtggggtttgggaaaagggtaagaatcattgcgggtagggaggataataatgggtccatagacagttgctctcagccatgagatgtgagcatgccaaaacagagttcctctctggccagttatggtgtagttgtacacataactttggccactttgaatggggcattgggttatatatgctggcccatctgcccacccgcttcgaagctgtctaataccatgcctgcattatcaattaaacccccaaaaaatgaaattattatatacaagaatatacattttaataactaataaataagtcacctttgaggataccactctataaatatgataagcacaaattgcatcaataaaaatgagtattattatttgatttatttatttaaatatttattcaaatttaagagtattgctatttactattaggcacgacaacatcttattttttaatacttaattacactaatattgacaatcatacatattaataacatttgtccgaagtgtaataattttgtgtcaattcaaatatttctaggttttaaaaaatgtgaggcctgcttgatttttatcttcatactattagaatatttctaattaaggaaataaaataatattttttattctgataaatgaatattttat

SEQ ID NO: 381186 - DNA, 4492 bp, Cannabis indica
ctactaataatgatgatcatgatgttaatcacaccacgactagtacaacaagctctgttatatttgacataattaagcattttgatcaaccaaaccccaccacttctggtctaccaaagtcaccaattgtatgcaaaccatccgaatctgctatagaaaaggctctcaagattgccaatcttgatccccaaagaacagtaagatcatcatattacaacacttaataacaacataaataacagttcatgtcatcatcatattatggccacagtacttaattatttatattattcgattttcatccagatgttttttgaagatagtgttcgaaacgtccaagctggaaaaagagttggcctccacacagttctggtgagaaatttgataccaattttcgtaacactctattaattgtgataatgttttattattattaatttattattatttactaatttttttttaatgtaaattgaataaccagattggcacttcccaaagagttaaaggagcagattatgcattagagagtattcataacataagagaagctttgccagagctttgggaggttgacataaaatcagctgaagttgtttattcaggaaaagtcactgtagagacctctgtcacagcttaattaattagttaattaattgagatattactattatgtatgagcatgatgttgatgcttttgtttttattattatattagtgtataataaaaaaaaaacaaaaaaattaaataaataaaagaaaatgatcttctcctttttattcttcaatattttaatgatttctttgttaattgcttatgtattatatttggcattgatttccctagtcttggggtgggtctgtcaatggagtcatcatactaataacataaacatattgcaatttggtaattattaatctgggattggatggtcatgcaattcacgccatattatttaataataattatgatggaattgaaagggtaagggattcacatccctattgatcgagtttggcttaacttttataaatttgtttttagcttttacaaacaataataacaataatactaaaattcgtacccagattttttgcaataataatttaagctattttgagtaattaatgtgaatttaagaaaaatattttcacttagttgtgacattaaattaagagtcgtagtgcacgagtcacttttatttttgtattgtctttcaaagaataatttttttccaagccctttttctttacattcttaaggtatttataggctcataatggtggtaaaaatatcacttttgtcttgcttgtttaattatacttcacacaatttctcaaattgggccttaggtcatgatttcttatctatagggatgtgcttgggctcaatataagtatttggtgagacaagactttctcttactaataacttgacaattgaaaatgtagccgtcaaatgtggcatgggttgtcgcaaaatcagagaattatgagtttaaaccattaaacacactttccatggctgaaagtaggtttaccttctccatgccgtattaaatttgcacacggtgacttagccttggccctcacgccgaattccatacaatcgagctatagcctctccagggcacgtcttctcgcgaaggggaaaagataactaactaccatctcgaaaaggtcctctcggagatgactaaactcctgaagtggttcttgactcacgcgcctcaaatgtatgttttgttgtagcatgtcccgtagtgggggtcccactaccacatggcttcctcctggagtgccacctattttggaaaaaaaattaggcaatatttacccccaagttctggtttgcaattttatgaattgggacttgtgaatacatcgattgatattctccctcctagagcactgactcactgacatcttgtctactcagggcaacacttattatatggtttttggtgggccatttaatattctaatctctcaattttgactaagtcgattcatttctttattatttgattttaagacctctattttgttgtagggttacagacaaacgcttgagtactgcaaatgtccattgatatttgtgctttttgataattcaccctagccatcagatcgtaggggttttgatgaattcaaaatgtgactgttggatgagcaacgatctagatcgcctcttgtggctataagtacctttacctttctttcttttgaacttttactttctcgcccttttcagaaccttaaatcatcaaagattttaggcacactagattttcttatgctctttctctgacaatgtcaagcatcactctaccatcgttgtataccagagcttttaactatgactacttctcttattcataagtagtttaatgaattttaccagtccattcatttattctcttttggtaattgttttgcatgtatgataatatgatattcttgctacgtagccgttatttaaaagattttcatcagtcattcccttttcccttcttcttttaccacggccactctgttcgggagtttaagctatggcattttcccttttttttttttttaaccttgtgtcgttttatcttgaacatggtgtgaccaccacctggtgcatagtataagaaatttttaatttttggatatgccagtatttggagggggcctcttcttggcggttagaggacctccattttcttttctatttaaggtttgatttgggagctaactgttgagcatgtattcttgtttttcagatgggtgaggttctaaaagatctccacccataaggattctacgcttttgaccaagaagttctcacacttcattctgagagaaaaatgtcaattctaggagcttcttcaaaccctcaagcctagcaagtggccccactccccctcattattcccctagaggatgtccttcatggcccggtcccattactcgattatgtccatccgaccaccagttgggagggtgatgacctacattcattattggaatgtgttcatcagctgcaagagatcattgaggagaatatgattagaccccggggagcaggagtattccatcacctagcttgagatttgaagactcccaatcacaattatgaaaggtttagagcctagagctaaactcatctcatgtccggagcaagcttaccactccaggactattttatcaactttttggtttttgtaagattaactccctaccaacttattcctcaaggtgtttgttttaaggtactacatcaggtatgtttggtaaaattgatatgcaagtatatgaaattgaaacaagtaatataataataaataaagtatcattttcttgagaattgattatcaattactaattaattaattctactttgcttctatttgatgaatagtaattgttggataaaaagaaaataaaacaaacaataattaaaatttagaaaaatagcaataatgaagacaaggattattatgatcgccaacaatccttcattttacttcataatgtaattacccaatttttgttcttcctattcaattagttgagttaagaagtatataatgtgtttaaggcttataaactcaatctatatgaaaacttctaatatttttatggtaaattatcacaaagataacattaagcataacaactaataaaatcatgcaaacaacctaggtactttcgtcctaaatcaatttacatctataaaaattaaagtatattcaaatctcacatttcaaaattttgatttgaattcataaatcacaattaaagttgatcagtcaataattagaaaattaaaacagattatatggaattgaataaagagatgaagaaggaattgaacaatcacattaatctataaaataaactcaagtggttcacataataatttaaaagaaattagatatataaagatattctaaaacaataaaaattaaaattaaaaacataaaagatagagatagaggagatagaacactctttggagtcctcgaattgtgccttctactcctagcattccttctatgctcagaatttactaaattatcgaatggtgtcaaagctttgccatcaaccctcctttttaatgaaaaatccaagtttcccataaaaaacaccaaggtcgcggccttacaagagatttcttcttttctttgatgatttttggagtttctagtttctaatttcactacaagaaaatagatttttagtgactaagttaacttagtcactaatagttagtttttaccactaatatttagtcccagaaatttttagtcatgagacaatgtttaattggaactaaaagaattaatgaccaatttttagtcactgtttactatttagtgactaaatttatacttagtcactaaaactttgacgccaaaatatatagttatggcgggagcactaaattttggtgactaaagttacttagtcactgaaaatcctaaatttgtgaaaaaatatttaa

SEQ ID NO: 381187 - DNA, 1280 bp, Cannabis indica
aacaaattaaataaaataaaaaccgaaaaaagaaagatcaagatcgaatataatattaatgctggaagttacctaattcctaactactgctactcttttgtaaatacttataatactaataatataacatggaaattatagtaaaataacaaaatacacgacatgatactttatagtatactatatatgttatgtactacagtgttcctactatttattaattcttacgtatagcagtacccaaaaataatttcaggtgttaagtcgatctattataaagcaaattaatatataattcaggaaattaaattcctatgatggactagtatttttgaatatgtatatatatgtgtaactatttgacagctgaagagtattaatatgagaatagaaaaatgttgatgagcggtccacaatattaaacgccccggttcagaaggattacttcacagccatacatctctctgaagggtgtcatcatgatcagaattaggccatctcaatcatatgtatttattatgattctgaactcatcaaccatatatatatatagctcttcttgccatcattttcacacaatcgacaatatatttttttctttattattcaagcagctgtcctgcactatatatatttatgtttatatatagatatatatgatcaagcctatagatatatataggtgtacgtatatatatatatatgccaaagtaagaaacaaaactgcttaattttgcatagcatattattaattaaaggttctaaacaacatataatatcaacaaagtacgtgattagtattaatttatatgtactagaaaatgtactttcattttcatatatatgattaattatatatgatgtggctgcaatgataataatatatttattaattattatgtatagagtaggatcacctgcatgactccctcaatgccaagtagggaattcgccaattcattttgacaaacttcctatatggcattcagggagccaggcaagaacgtctaacgtcatccacaataatattcataaattaacatatatattcactaattaataattaatttgacatgaaagaacatatatatatatatatacataagagtaaaattataagcagttataaattaacttactacggcgtacgtaccatatcaaatgtgatttaaacagcaactactccagcttcaatatctagacatcatatgcttcttatccagaaaatgaggagctgactagctaagaaaaattaccatacatgatctctctctctctct

SEQ ID NO: 381188 - DNA, 3492 bp, Cannabis indica
atgattgaattttcaaactggattcttcttggtcatacaaaatcactaataactactattaaataatcagtacatataacaaaggggtggtttagctccaagtacctggtcagaagaaggtggtttggagtggttagaggaagagtctttggtagtagaactgggttcttcttcttgtttcactggagttagctgagtcttcttcttgtttccaagtgggactaatgccaaaacaggatcatagtcagtcaagccatctaggaaagcagcatcactcaaaaggtatctagtggagcctggaggagtaaccaaatcagctgccttatgagcactgctcttcctagctacatcagtaccgtgaatagaggaagaaggagaaggagatgtaaaagagctggttttgatgtaatcatcaagcttcgcgctactctttctcttctgatgatcattttgcttagaggaatgactgcttttcttggcttgttcatttgtagcactacttgatttagtctttgaggcattggaagagcttttcttggtcttttggagttgatgatatgacttgggatttataggtgggtgataagagcaagggacactagaaagaattctaccaccaccaccaccaccaccaccacctcttctggtgtcactaatgattggattgtggcggtcaatggctttgccgcctagttgaatggtggcggtagaggaagaagaagaagacgcttcatccatgcttaaacatatagcagttgaagcttgggatacacagaatatatctatgcctaaacctttcatctttatgttttgatataatgatggtatagcaaagaaagacagaaagaaaggaaaaaaaaaaaaaaaggttaggccaaagccaattaagtgtttagagaatctgaataaatgtgttcatgtaaagtggggtagaagtagtaaagagagaaaacaaagagcttcttcacaaagtttctattctcttttgaagcttcaatctcactcactcactcacccaactcttaaaaatgattaatatttgtaaacattaatgaagtattgtttttgttgtttctgtacggaacttataatatcaatatgcatctttatgggcttataataacccctttataatatcatgccaatcacagtttgcaatgtttaataacagcagccaccaatgaaaataaggaaataatttatgacctgcaactaacttttcaatggttttaatgggatgaaaatgatatgtatatatacttctttatttatatatttttaactttcaagtttgtatgtatgacccaataataatgtgaacatttgtgaagtaaataatgtagaaaaatttgaggttatcctttgaaagttttcatataggccagagcacagaatcattttgtttagattgtaaaaaaatgttatcatttaaggcttaggaggagagagatatatttcatgtctataactacagaatattttgaagcaatacgcacttcacatgctttgttgctgctattttgtgcatattatttcattcaaattaagaaggaaaaacaagggtaattagcatatataaacataaataaatataatttaatgtatatatgcagatttttgtttggatttgagttgagttcccgtgacatatccttatatatataatatatatatttgtatatggggtagtgttaattaatgcttggactgactgggcatggcatgtcctacaaaataataataacaccaattttcatatttgaaatgaaacatataggtcagatgagtcagtcaatgccaacggttaaatctccaaacatatcttgctctctcttttgtttaaacaccaaaataaaatatagtaaaaaaaatgacaatatcatagttatttctatcaacattatttcctagaaaatttgactaattaatgtgcctaatatgtatgcataaaaaggaaaggattgtttaatttttaacagtggtcaatttacaagctggcatgacaggaggtaaagctatgtatatttatatatgcaattgtaaaataatactggttactcatatctcaatgtgaaaataatatcatgcatgcaatggtaatagtaaagttattttctttcaacataaataccaattcagatggttgttgctcttgcagtttatcaatctaaaaggtggtccccaaacagaacacagtcgatttattaataaatattatttatttattttatttgattaattttctctagaaacatcaatagtagtacaaagtaatattgctatgaccatatgatgtttacaccacttgacctcatgagagatatgatgctgcattatttagattccaatggaacaaattttgtcactacaaagacagatagatatatagtaaaccatttggaatttgtgctccttatttctttctttctctattcataaaaactctccttcacatatttgatggatggaatcagatgctcatcattgtttatttccctcatcttttttctttccttttcttcctttcaatctccatatctgccgaccctattttcgaatctaacactttcaaaccaaaacgattctttatatacatacatataaaatagagtaattgattgaaacaatgatttaatatataaatataatttaaagtttgttttgctaaataattttatttttgatatttttttctacaaagttgacttatgagactctctcttgtaatatcaaatgttttaaacaatagttattttggaaaaaaatcgtttagagaatgttgaccttgaatttgggccaactgacaacggagtttatttattattgataatcattacgtgtaaattataataacaaataataaagtgacacagtaatttatagaggttcgaccttcttgtttggcaggtaatgacttattctcctttttgctgtattaattctggagataatgccatgcagattaaatgtttaaatcttataatttttagttatggctctcttgaatattgtaatggtaaaaacagattcagaacaattaagagaaatagactaagtggcccactagagaggaatggcatgtgagaatggatgagagagagagcttgagagacatagtattaaggttccttttctaagtgcctaaggccctttatatagtttaaggcttacaaaatatcactattcaaatagattaatatcctttcaaaatagaaaaaataactcttttatcttttattctaatatcttgaaaaataggtggataatttgatggaaaatccctatccttttgaattgttggtgatgcccctgattttgcccaatatacgtggactaaccacacagggacacgtggacacgaagatcttaacatttaaattaatggctaagtctttgtaaaagaaaggcgtcatccgcgatctgcctcccgaagaaggcatacggagtcctttatgctcccggagaactaagcggtatctaagcatctccggg

SEQ ID NO: 381189 - DNA, 3713 bp, Cannabis indica
agaaattagggttcgtattttttgtttttttgttcttatttttaattaaactctttttgttgtgtaggggtattaattaattttcaactaccattaaattattatgccaagagcacgggtgccagttaaaaaacttaatagaaagggtacaataatatactagttatatattagggaaattttttaacatcctttatattttagggagcacaaatccgtagtgatataaatttagagataaaatttgctaattattctaaattatgtatacattattgggtgcttctacaatacactccattaaaaggagtgtagtgatgcaacccctaactgtttcagtatctattataagaattttttagttctaaattttttactatagtcgtgttagtcgtgtacgttgtagttatttaagacatcctgcaaaattaaatttttagaaattataaataatttacaatatagaaattaatgtttaaaccgtttatttcataatcgtataaagtaaaaaaaatcacgcgtataacacgatttgaacactgttttcaatgtgttaaatttttcttgaattttttaaaattttgtcaagatatcttgaataagtataacgtatacattatgaaaaaatttacactaaattttttatatagataccgaaacaattaggggttgcatcactacatccattttaaggggtttggagtttttaaaattttttactaatattatttttgtagaaagaaacattatattgttgagcagtaggcaagttgagtttcagattttctttttcttgtaacaaacgagtgagtgagagtttaataatattatttttgtatggggattgaatgaacacccaactcttctcacgctaaaaccctttctcttccattctctgtcccagactctgctcctaaatcatccccaaccaacaaaaccctagaaccctagcgtcttccttcaatgtcctccaataactccattctcccttaatcttcctgtcgtttttcactatttcattcctgtattttgtctgtaatttttttgaggtcgttgtttggttttagagatggatattgagcaaaagcaagcggagctcatcgatcacttcgttaaccaagcgtcgactctcaaaggctcagcccttgggtctctggtagccgaggccacgtctcacccttcgcttttcgcgttctctgagattcttgctgttccaactcttgttgaggtttggatcttaaatttccaatcaaatttcacatgtttagctcttaaagattaaaaaaataaatagcatgtatatttcttttgcttttgtcacactcagattatctatgcatcttttgttcctcaaattggattatctttagctaggaattaatgatcgtggattgatcatctagtgaattataggcttgagtttgttttgttttaaagaattatatcttattatagtggatgctctgcaaattcataattaaacattaagttatgttgatcttcattgcgggtaccgattcaattgttgcaaatatgcgttgcaatataaaaatttgtgtctaaagactttggagggataatgaaataactcttagttttttgttcagactaataagttagataataaatttgaggactaaagcaattcatctagagctctaactttatgattgttattataagtagtagagtacacgagtaacagtatttatgtctgagtggtggtgaaggggatggttttatacggctagccacaaaatttaattgatctaattcaccttatttcctttacagccatcgggattttttgttgtttgatatcattggcttctattttccattcatacattcattcatttaattttaatttttgtatcttctgacataaacttttttagcttgaagagactggaaattctgttcacctggatgtgcttcgcttgtttgcacatggtacatggagtgatttcaagagtacgtgtctagaaccttgtagatgtaaatctataatgttttagaatttaaacccgaatatgtttaattttgttaaaaataagtacttaaactttatccctacctttcaatgtctttattgttttgactgatttaaagtctcgtgaggaatcatcttattattgatgtatttgttgataggaaatgctgaacgtcttccacaactgtcccctgagcaaacgttaaagttaaagcaacttactgtacttactctggctgagacgaacaaggtatcattcctcaatgtttgaccattttttcattctagtagtttggaacctgttactcatcatcattatctattttttttttgttaattctagccaatccattgtgcattcagaaataattttcttgggattttttttctaatttctcctttctgttttgttatttacatgtttttgtgtatgttaatctttcaggtacttccttatgaccaactaatgcagttttttgtctatgttaatctttcaggtacttccttatgaccaactaatgcaggagctagatgttacaaacgtacgtgaacttgaggacttcctcattaatgagtgcatgtatgcggtatgctttcttccaagtcattgcttttgcttcagtattagtctttctatattttagcttgcctttacttactactggaaaagggacctgcgatttatttattttttgagaaatgctaatgctcatcataaaaatcattaagtacactagtcatgatacattggaagggaactatgattattaggaaatacttttggaaaatttaccccctatttgtggtactaggttgtgataagcagtattatttttgctttctttagaactgcaaatagtcaaaatattatcatctttcttaaaactttcaggttgtttcacactgttaagagcagttatggggtagggttttgggttattctcctctcattctgcaggttgcagcataagaggagtaacctaggaaggactgtcttgatgaagaacatagaaagttgttaattgcctaaattgatgtgtatgttatgtttattgctttttagggcatagttagaggaaagttggatcagctgcgaagatgctttgaggttcgggtttttgttctaaccttgctagtttttttcaattatctctcagagttctgctatctctatttccttaatttttattgaaatacaatacatttggtggcatgcaggttcaatttgctgcagggagagatctgagacctggacagcttggtactatgattcaaacactatcaagctggtaatgtctcttgttaaagtagagttattgtactcctcaaagtctattttatattctagtaatgctgtttttaagatttgtttattaagaatgcaaaacttaaatttttggtggaaaagtttattgatggattgatgtttaagattgcgccggtattgagcgcttcaatgtttgcctcagtttgaggcagaatttttcgctatgcgtctcccatggcagccgtgggagaggtgtacgcctcagccgcctgaggcgaaaaatttagtgaggcacacgcctcagtttcaaaactaaagttagggtttttttttatcccaattttattcagctaagtttaaaaataggcacactagaggctgtttggctttacagtttaaaaactgatttttaaaaattgagttttaaaaaactagaaaatagaaaacatcaaa

SEQ ID NO: 381190 - DNA, 1892 bp, Cannabis indica
tagttagggtgttacatttatgtatgtgatttaatcattagagttgtttgtgataagatgtatgtaataaaggtgatttgaatttatgtgtctataaaatgtttgatataattcttcaatgattttctaaagtattattcataattatagtttagaagctaataatttgaatgagcctcgtgctttcatgcttcattttgtttcaatttaggagctaataatttgaagaatgggggactcattttgctttggataaaataagtattaattagattaagtccatatccattttgatattttctatgtgtgactattctttatttcaataagattttgatgttttctacatttgaaattcgatttttgttgggaaagaaaaaagtaaagaaatgtaggaaaaaagtgtggaaaacaagatatatttttatttcggtagtccataatttaagaagtctaacgtttagtgtaattgaccttgagcaatcttaggatatgtgatattttcctaaaaaatgtgtgagtaagaataaaacacgttgaaaagactcattttaatttacagggtcagtcatcattctagttagttgctaaagtggtttacttgctatgtaggtatgggagtatgagaatacacaaatgaaacatgagcattacatatagataatgttggagcattctagtaataattttatacttataagtgtgaattatacaaaatatgtatcgaagaactatggtttttcaatatttcttgttttttttataattaaagtcgatatattaaaaaacactaacacaaagtagtaaccacaaagggggctacttcccttatacaaccaaaagcatggatcttctcaacacaagccccatgggcaaggagatccgtaaatgatttaatcgaacgattaatgtaaatgaaatcaacagacacaaaatccttaatcttaactaaacattccgaaaagataggataaccccacccaattgggaagctaccagaatttaaccctcgaatttcagcagaacaatctgattctatactaatcttgtcgaagcctttgttcttagcagcagtgagagctaaagatatagcagccaattctccttccaacatgctgcttacatgaatgaagttgagagcagcgaaagcctcactccaaaccccatcagattttagaattgcagcaatacccgcctcagaaccaagcaccgaagcatcaacctagaaattaaagataacatccgagacaaaggagacaaatgagaagatagaaccttaccatccaaggttaaatccaatttaggtttcatagaggagaattcctgaaatctagataggcaatctttaaataacatctgaaaatcccattctttatggttatgaataatattgtttctccaaaaccaaagaacatcaaaaacacacattgcgaacaagcacagatcagagtcctcattctcagtccaccaagtgccaaaatccataacattattccatcccatcatgtcaatgtgtatgccccatttactattgaactaaattccacgcgtgatgcagcatttcgcaataagatggaatgaatcttcaatcttctctttacagaaaacacaagttctgtcagtaaagttaataaagctgagtctgccatacgtgggaatacaatcaatcatcagtttccacatgagaagcgagaaatgagggtgaactttttgcttctagagctttttccacactgtttttgtaataccgtagaattatgagattggattagcaaaaccctaattagctaattatgtattactgtgaaattatattattatataatttaatatatgagaattgatatgaattatgacatgttaagaccccgttggtgagtcagaggcatttt

SEQ ID NO: 381191 - DNA, 1941 bp, Cannabis indica
cttggtgccagcagttcaacaagatgcagtctcacatgacctcaaaataatttagttgaagaatcttgcctaaagaatagaaaattgcaagaaattatcttcaattagagagtagctcaacaaagttgcattgacagttttgtactgacaaacatcatcttatatttgtacaccaggaagtagtttggtcattactgtgcggctaaatttataaagatagtataaaagagaaggtgaaatgggcacttaagtcaatcctcactaaaatcttccgtaagatcatggaaaaagatttgtaacttgaataaaatcaaagtaaacaatcaagaactacaatgtcttatgctcattactgaaagggtgtcataatcatgccttaactggtgttaatatttggcagcacccaatattagctgtaaatgttattatttagatatagtaagtacggatgtttttaaagctggacatgatgacattgctggttttatgggaaagctatattacaaattacaatgcaataaaaggttaattacaaataaatggtgagttaacgtatatattatactattatagagattttctatagactaagggtgagccttttctagagatttctctaaatcacttcactggtttgagaaatttaggataaggtggacatgttgaccgcttcaaagtatgtaggctgtgtcacttgtcatatttttgtgattattttgtaataagtgttaatgaaagataagcatgtagtcttagattgtcaactactatcatgtcatgtgacgtgcttatttaaaatattgttcatttacaaaaaatgtatcatgattgaatgtttttgaccacatgatgttttttgttgctttcaaaaggatgaacatcaatatggttaagttaatttaaacatggcatcatatgttgggctttattcatggagaataagtatgtcgtataacatgatggtggatacatatctatgttatatgcttttcaaacaaaaggttatttagtgtaggagctttatacctaaatatggagttatgaattaattctgattgtttcgtgtaattttaatctctaggctgtgctcttaaattgtacaactttggcctaatcttatgtcttatctcatgatgctgattttttcatccatcttgttcaatgtctagttaccatttccaatggactgcctttatgctgatcctgatcgcaaggtaactgatctcactaaatttagtttacatgtttgatatcattatttaatatattttaaacaatgaatgacactttcctgtaggcatacgatgttatgggcttatactttggactgggacgaacattcttcaatcgagccagtgtaaactttttaaatatgttgatttgaaatggcctgtttactgaaaaatttatgatttattgaaaagggcttatgcgcaataattaaatagacttagattcttatacatgttcaaaactcaaatatgacagattaaggtgttttctagaattgaagaactgaagaaagctgggaagaattataccattcaagccacccctgatgatagaagtagtgtattacaacaggtctgatatattctttcagcactcaaattttaattattttttgaatctttggttctttatttaaccattttatgttttatgactcagggtggaatgtttatcttcaaaggtaagcaattattgtatgcaaggaaagatgaaggaacaggtgatcatgctccattagatgatatcttcaacgtttgttgcaaagttccagtctcctaaactctgcatactgcaagtacgctaaaatattataatcccatttcacttttcatatgcaattctatcatataattacttcatcaataattagatgtacatgttacttatacatgtatatatatatatatttatattaatgtatacacacaa

SEQ ID NO: 381192 - DNA, 1789 bp, Cannabis indica
tacgagagaagggggtgggtcccatttggataaatctaataaaaatatttacaaattttctaacagagaattaggatataaaacaatctaataaagaccagaccacatatattaattaattgagagattcattcagttccaaaatggaaaaataataacaagggagaataattaatagaagataagctaattaattaaacaacatgatatcgatggttatatcactagagaccatatatataatttttcatttcttccaaatacaaattatactgaaatgggaaaataataatgcatctgatcaactagcacacatatatatatatatacatagatatatatatatatatttaatttacatcacagctagcatcaagggtagctgatctaataacatcaagtacttgaggagagtcataccaaacattagatggaaatatcccggataagctaatctggggcatgaaaacgtcgtcgtcaaacatctcataataagaagctgtattattattactagttggtgtagtagtactagtagtagtcgtacttgaactctccaccacaagatcaacgtcgtcatgatcttctgatcccatcttggccgttggatcttcggtaccatagtcttcttctttgtcggcggcctcaaacttggtggggtctgggaactcagcatcttgcccagtgagttcttgaaccaaagccctaaactcagaggcactggtcttcaccttcattggattcgagatataaactactttgaccggtggcttttgcttgttgatacttttctttgttttgttgggaaattttgttgattttttcccttgatgagctgtatcactactactgagtagcttatgaatattattttccataataataataataataataatatatttccaaaaggtaatattagaaaaataatgagagataaattcaactcaagagctatttaaggatgagttcttagagatttcatttgagaatatggtttttaaaggaaaagtgggtttctcggaaagaaagagagagaaagataaaggagaaaatgaaggaaaaacccaaagctaagaacaaattgaaaataaaaagaaatagtgtacgatgtgacagtaatgtccaattcgcatcactcgcgcgtgttatttctcctctttcttttataacaaaaatatacctaaataaatgtttcactttaatttataatttttttttccattatttatatttatactttttttttttgaaagatatatttatactttttgaaatacgtaaaaatgcaatgtattcctccaaaattattagaaaattatataatgtactcctaaaaattatataatgtaatatatagtaagtttttttatttatatgcatgtgaaataaattatttaaatattattttatagattataaattattttattttttaaaaaaatttatcgaatgcccttaaataattaaaacttatataaatagattaatttttttttcttctaaatgttgaaacaaacaggaagtacattagtatattctttttaggaatgtgcattgtagaggcattcaaaaatatttgatatactatcattaggggtgttcattcgatccaatccgcacttttttggtcaaacaacatccaatccgcactaagtgcggatttcatattttgaatccaatccgatccgcataagagtttaaatccaatccaatccaatccgcaatagtgcggattggatcggttattttaaatcggttacttttttaataataaattatttaatat

SEQ ID NO: 381193 - DNA, 1565 bp, Cannabis indica
aacatgtttgtttttgtttataaaatccaatttcatggccaatatttctatgaagccaaacagataatcaattcaataaaacccttcataaaccctatcattcataatataacaacaaaataattaactcaataaaaccctaatcatggctaccatggagactaaaacccccaaaagaaaaacctttttttcagtacaaaagagaatgaaatattcaaaggcaactctcataaataaatcattaaaattcgctcgtaaaacactaaattctggacccccaaaatgttaaggaagaagaactcatctaaagacgaatatcacaattcaaaaaagagaaaattacacaaaggaactttctcagatttttcccgatacgatcgaataggggtggtggagtttacttggaaggagagcccagtatactagcttgctgcatctctagatcggctaactgttgctcgcggtccatctcgatgatgagaggaacgaccaagatgaggaaggtggttccggcgatccacgccgccctacctgtgctctgcagaagcttcttcgacacgaaacccgcctctgaaacggtgcgtttcgtttgctgaacgatggtagattgagagactcttgttacaaggctcctttcgccgccgccgccgttgttcctctgagacgccattgttggaatgagagaagaatttgaggggctttggttcagagaggaaaagcttgaaatgtttggtttggttggaatttgaggctgtggctaatctctctattttctccttctttgtaagtgggcttttgagagttgggctcaaagcccaaagttatataagacccattatttttttttttgtttgaactcgaaatttcatttaattagactaacttggtctcaataatgactatttagaaggaaagttagactccaaaaacatacaatcagcatataaactagctataaaataatcctttaataaaaattaaagaaaagagaagttgtttacaatcctcaactacattactaaagataggttgtaatgcatttaactttcgaacaacttttcactaacactagacaatcagactcgatggtactggcactcagaaaattatgcttcaaccacgaaagcacttctttaaaggtcatgacttatgcaatttttggcagaactcgtccatgctgcaacctcaaaatcccagccacaacttaactttggtgatcccgaataacccgtcaaagccatgcttttcttactcgttaaaaagaacaacgtcaatattcaccttaaatttatcaaagttatatgagatccattattttagaaatatagttttctaaaattttggattaagtttttaccaatttaaaaaatgataaattaccgatcagattttttattttattaatgagaatttactgtattttgtcaaaataaaacatataaatacgctaaattagattttgttcaatatattaattaccctcattcatcgttgataatagttaaaaatattaggtcctatactattatttcaatctcttgaatgatctaaaaatttaaaaaaga

SEQ ID NO: 381194 - DNA, 1077 bp, Cannabis indica
agttacaaaattaatatcgcattttattttgggtagtattttattattattattattattattattattattattttggtgaggaatgatatattaattgtttaaattatatataaacacaaattatgaaattagatcagagagtaccgatttatgtagagtttaagaattttttatttataataagtttgaatatatcgtagtaatgtagaaagttcacatgtggctaagttagttgggtgttgtggttctggttgttctgttatttatgtttgtttgattaactaaaatttattttctgttatattatcaagatagcttggtattgaatagttagttatgtgtagtgagttgtccaagttattattgaatgagtttgtttgtaatctcggctactaaaagtattatacacttttgtaactaattcaattcattaaatacaattgattgttctctctttttcttatttttgctcttatgagctaatatggtatcagagccgccactgttgtgagctcccgctccttctccttctcctttctcttctcgttgttctggtctgtttgttgttcatggaacgtggtggaggagcccagacttgaggtggaggagtacagactcaaagaaatcgtgaatctaaaaatacttataatgattcgaacatgttctatgtttttggtgaaaattcacgatcgattaacgccaacgatctcttgaatccatattttctttccaatggtgataatccaggcgttgttcttgttccgaaaattctcaaaggtagtgagaatagtatacctgaagaagagcaatgttgattgatctggttgctcaaaacaaggttaaattcatcaatgggaagctccctcaatccaatgacgatcatgaagattatgataactggtgcagatgcaagaacattgttatctcttagattctacatgccatttttgatgaaattacaaatagcataatgtatcatgacaatgcaactaaaatttggacagagttacatgagcaattcaatgagaagaatgatcactactagaaactggacattttatcccactttttata

SEQ ID NO: 381195 - DNA, 2063 bp, Cannabis indica
tttttttttttttcaatcctttttcccctctctgtgaaatgaaggacttataattttctaattataatgcatcagcgctattcagcttctttttgtttcatctgcttaaaagaatatttatccaaagccctgttgagtttacattcataaatataacaaaaatataaaaaagtatgattttgcaactatacatagacccaagttaactctcaaaacattctcaacaatttggctgtattaaaaaagtaggcttgttgttgtccatgtttctctttccaaatcacgctggtcttaatttgtatcctattttcagcttcattctgattcttgtatcctttttctctttggtggtaccacatgagtgtaatctaataaagtgtcttggtatgctgtcattttttaaagatcccttatgaagatcgtatatattgggattgcagaccctttgtgttttttcttttttgtatttcttagatttttcattcatgatttcacaggtttgagtgagagaggcccaagcccccacgaggcctttcacttttactttcacttccacttctggtaatcatttcattctttatactaattacccatccatgcttgttgccttctaaagcaatgaatgattactaggctaacttctaaagccccccttggtttaggttgcaagctacctaagtcaactaacgtttacaatttcagtgttgctttctaagttaccattatactatatcatatctcctttattgattataatattcttagaagtaacaaacgagtattactattaaatatatgattgcatgtgtaattagttgtctcataatgtattaaaatttcttaatgaatacatcttgtagttgtgaaatagaattggatgtcataaatggccctctactagtaatcatggaagcctagctagagaaagagagagacatagaatacagagcaagagatttggaaaaatggcatatgctaggacgcacgtgcatggtagggcctgacagtttgtcagtcagtcgttggtggtggtggtggtccttgcctacgcatgctctctatataattctccaatttaaaataaatttcacgataaagggtagaaaattatatatattctttctctttttttttttacgaagaaaaaaaaaagaggaaaaagaaaatgagtagttggctgctcgtgcaagttttaatttggacgctctctatttatatatatttatttttggatcgttaaagtgctacggttgataaaaggtttaggaccactttaagcatgtaattccgtacattttgtacggaaatagccgtttgcttggaagtggtaacaaaatcgaaacagccttctttacaccatttacgttatctgaaatttagcaaattgacaaatcacctaaatttctgtaaaataaacgtgtcattccaataattaacataaatctaagttctatgaccgattactataaattttaagcatttaaggggaaaaaaaaaggttggtaggattgaagaagtgagagatattcaaaagaaaaaatgactttaaatttcatatttgttaaaaattaaaaggaacttttagtaaggaaagtaaaatataatggctttgaattggtactccttttaagagttgtggttgtttcacattgtattttgactaatactttcatcaaacaacctcctttcctcataaaatttattggaatttacaatatttaagaatgattaatgataatatcaattataattatttaaatgaaaatctaacaaatagcatgaatcctgtaccaagtaattggactaacgcaattatgagaaaaagggcaaaccaatgtagtaggggtttcaatagggctaagttttggaggtgacccctacaatagagtacaaattatgaaatatatagctaatggatcaatttccaccattatttatttcaaatactattccatggtatatatggtaggctatatggtctatggacggtgggtggtgtgacattaattaagtggagtcaattgtatatttatttaatatataatttttttcttttctttctt

SEQ ID NO: 381196 - DNA, 2270 bp, Cannabis indica
aataccagtgatgggatgaagcgcggcattaaataaactcttaggatcagcacagtaagaagtaacatcaattacatggggctccccttatatgcagatttcaacttcattctagacaatcttgtctcaaagctccatgggtggaagttgaagtctttaatctaaagctggtcgagctactctgatcaaatcagtggggcttcctttaccaatttatgttatgcaaactacaaagttgtctaaaaaacttgcagccaaaatagatggtatggttagagattttcggtggggatgcgatcaaggcaacaaaggtatttatctaaaggcataggatcagttgtgcctccctaagtctagaggtggccttggtttctggaagaatttataaatgaaccaggctttccttgcaaaatgggagtgggctctccttaccgaggatcaatctttattttgcaaggttataagagccaagtacctaaaaggtagaccattcttgaagtgttcagccaagaattcaaactcttggttctagaagaatgttttgaagtcaaaagaatccttatgaaaggttcttgtaaactcatatctaatgggaaggacacagacatttgtaatgatccgtgggtgattcatggtgggaacttttatccctatcctttaaacggtcgcccgaaaggccttgagaaagtggcaaatcttctgacagacgatgggaattgggatatccccaaactcaatttcctatttgatagggaaacaactaatagtggatgtggacgaaggaaccaaatgggcgtttctcttcaaaatctgcctacctagcacaagccttggcacgagctccctataccaacgtaatgcctgctttatggaataaactaactttagaatcttggagcgtcataaagttctttggtggaatatattctcaaatgccttacctattagggctactattgcgaagagaatgcatgttgaggatgtttcttgccctatttgtggtgagggagaggaaacaataaaatatctttttctctattgtaattttgagtttcacctatggaggtcctccccctggggtgtgatgtcggtgatgggctcttgggctcgggtgtgggattgggtaaaattcttatggagcctgaaggacaaaagagtagacgtacacaaattgtttctgtatgcttcaattgtggtggatacgatttgaaaattttgaaacgataaggttcataattattttatctgtaactttaaacactatattgactctatttatatatgttacacagattatggctcttgtttgcttccagtgccgatgatgactgcacctcctatttggtccccacctctggacgattggatcaagatcaactaggacgttaaatttggtagtgactcgatgtgcgtggtggctttggctagagatcataaggagtcagttttgtgggtggctagtaaaattctcaacttctctaaccccctcattggagaagctgagcttgtttgctagccctggaatcagcgatcaattggaagcattcgttcgtgattatcgagagtgactctgtgatggtgatcaacacgctcatggggactagttccgtttggggtattgaaaactatttgcttcaatgtaaacatctctcacactttttgcttagttgtaattttttttattgctagactttgtaatttcgcagttcataatgtgactaagtgagcgtttacctgtaatgtaactagtatggtcgatccatcctttatatgatcaggaaacttattatgtaacgaccacgaggtctgactttttctatctttaatatattcaggtttttattcaaaaaaaaagtgtagacaagtagcctctcgaatagctcgaaccaaatgtaacttctgtgatattcataaagcaactgccaagagtatcatctagtttgcaatagtgataccatgtatctacaagaattttttgcattataacaccacgccattaaaaagtctaaaacctgtttccacccgaaaggaagtttttttttagttgatgagatgagaattgagttgttaaaacgcttatcaatccgtcgaaaattccaatgattatgtggaattataatgtttggaaggttttggccaagtatcttcttataaacttccaccaccgcacctcccccattgcctatcctattattattattattattattattattattattattattagagtaaatagtggcataagtacctaaaattttatgtttgta

SEQ ID NO: 381197 - DNA, 1096 bp, Cannabis indica
ttttaaaaactaaaaaagttgaaaaaagcactaacaaaatttaatggtctacattatttattatttcttattgagatggagttggtgtgtgtgcttatctttgccaaaaagctataattcttctacttatatacataatataagtcaacataaatgcctcaaatctcaatcctctgaatacttggttttcattctggttaaacaagcagaataattaggcaacaacaccatcatcatgtaaggattaactaatatacttttacttgattacatattgcaaattatcattttgggaatccatttatttatttgttaccaatcttttgctgtttttacagtggacaattcacttttctggtctttttcaagttatggataacaaggattgtgatgataggatatcgaaattacctgatgcaatgatcattcacatcctgtcgtttctcccaactgaagatgttgttcgaacatgtattctttcaaagcgttggaaactcatatggtattcagtccctacactctttttccctttctccaatgttagttctccaaattgtgatctaagcctagacaagttctctaattatgtggacaattatttggaacatcgcaagaaaggtatgcatttttcgggcattgttagttttaagcttgacttgatgctcatctatcgcgaatataatgatagcttcgcagataaatggttagcttttgcagttaagaataaggttaaggaaatatatctgcacatacacatggatcaaaagtcctatgaaagggatttctactatgattactactatgatggcccaaattatataccacatgcaccctactattacttaccaaagatactagaaaatgtgagttatttgacaatcttggagttgaatggggttatgttgaatacttcttattcatatagctttccatgtttgaaaacattgtcattagaaaatattgaacctacatctagaggaagtgaaagggataatgttgatgtggtatttaggtttttgctgggttgcccttctcttgagacatttcggttgtgttcatattttttacttattgataatccatttggattagaaac

SEQ ID NO: 381198 - DNA, 3469 bp, Cannabis indica
tttttttttcttttaaatgagaaacgatcgacttttattaatagtaaatcttataaccaaaggaactgctaaggaatatatctaaagctagactcacacagccacaacttacaaaaatgactcatgttcataaaccgaagggtttcacctagtcctagatgtgctccgggctccggctgcggcccattctttctttatctaaaaatcatatttttcctctcctgccaaatgttggttgactcggactcttgcatagaaaacaccgtgaaaggaaaaccacttggaaagaactttagttctgaatattatccatcgtatatactttattcaatgctaccagccacctgaaactttgattgcataattgctaattccctacaaagataaaactctagctcatattcacatttctcctttcaggttccggcaagccagagacttgtgcactttgcttggaatgaagctgatggaagagaactgcggacatcaaagtctgtaattaggtcgagagagctgttgtcagacaggtctgcatctgatgagaaaagatttgttaaacatgttatcaatttcacagagatttggagaagtgaacaagaatcaaaaagtcgatgcacattgtctaaaaaacaggttctttaattacttccgatcaagtacatgataaggaaagaaagtatgtttggtgtctcacaggggacacttccatttttctatagtaataactgacatattaccttaattttaggtcccagaagatggtagaatgtgtagcatttggaggccaatttgtccagacgggtaattgcacaattagtacttttttattagtttattttcttcaataatgtggttctgctctttcttgcttctgttctgtgtttagcaaaagctttctcagttaagacaatttcactagttttatccctatctgattacttctagtactgaaacgttgtctgttttactttcagatatgtctcaattggggatattgctcgtattggcacccatcctccaaatgtggctgctgtgtattctaatgtcgacagattgttcgctcctccagtgggatacgacctggtaagaatatataaaatatatatattaaatgtgtgtataatcaaacatccgtaatagatttatgtattactcaagtgtatattatggtggtcaggtctctactaatccacaatgtatattttcacatacatgaatatatttgcacattggaacacatatttttctatttgaattgtgaatcaacacccctttaggattatgtttcagcacagctatttcccacaaaatatcacatccttgcttgttagatttattttgtccgcatcacattactatatagttttatagaagtcatctttaacttactgttgaagtttatctagtgcaggtataaaaattgcattaatttctcttttccattattctcattattcaccattttcattcatcagactataactctatcttagtgaatttgataaaatctagaacacctagaaggtggttgccatgaaaatttcatataaatcatagttcctagtttatcatagattggaaattaaacactatcaacgaacaggtatggcggaactgcttggaagattacgtggcaccactatcgatatggttgcctcgtgcaccagagggatatgtatctcctggatgcattgctgtcgcatgttttgaagagccggaacctaatgcagtgtactgcgtggctgaatcacttactgaggataccgaattcgaagagcagaaggtttggtcagctccagattcttatccatgggcatgccacatatatcaagtcaaaagtgatgctcttcactttgttgctctaaggcaaagcaaggaagaatgtgattggagacctacaagggttcttgatgaccatcactccattctacaatcttctagttctaactctcagtgaaaccaaaaattgctgttaaagtccttactttttttttttaaattttgtaagcaggcccttatttgttttgattgttttgttgtacagtgtatagtatctctttcttgactcttttatcttttttcatagacgtttacttatttttgaacctcaaggtggcttatgcgttgttatacaagccagattaaattgcactagtttattcagattttttttttctttctcattactacttatacacgaagaactgtatagagtacagacttgaaatgagtaaaattgaaattgttttggttgcaaaatgtgtagtttttttttctttatcaatttctgactttatgatttatttcagttacaataagtcaagtaaggggggttcttatattatttcataatgaagcaaacactagtacatagtacatatacagctcttaaaactcttttatgttcccaacataaatacaaaagccaatttatagtattttgcaagtctttcattggtgatagtcttgtttatttggttcaaactaaactaaatacatttagtcaccagtaagtgaacatgaaaaaagatctccattgtcttgaacagtactaaatcaaatacagaaactgaaccatgaattatcaaagagacattgcacattggactgaatcataaattgtctatatacataattaatgtactgaagttagtgctatggagataataaaagtaaccaatcaaatataaatattatattaaaaaggactaccttgaactttttttcaataaagaagaatcattctccagatgcatcatctcgtacatgatttagctatgattatattaaatgatttctgtttcaggttagatttgagtaatgtaacctgaaatatgggttaaacagaaatctgggttgtaaccttgccattcatagtgaaactttaagaaaggctcataagaacactgcatcataaaccaagtacttttttttaaacacaaattcatagtaaaactggtacagaccttttttcatacttttagggtgtaatcacttgccatcatcatatgaggatttaaccaaatgatgagccatgctccattgtgaacataaaatgataaatttattagttatgatttgaactgaaatagccagagaagctcatttctccaatatgtatatgtttctctcaacttaactgaaaaaacagctaaaatttactctaaatgtaatattccctgtgacattaaatttcaagcttcaaccaagttagcccaaaatctcaagttagaaactgaaaatctcttagagcttgatgattactgaaaaatgaaagagaattttatagcttgtttgttagttataaacatgccataccaaacttgaattctgtaaaaatgagcttttcagtctattcagaaccctctacaaaaccaaaaaacaaatcacatatttaatttaatgtttcccaaaggtaaaagattagactaaagttggaggggtgcgccaagcccatgcagtagtgcaa

SEQ ID NO: 381199 - DNA, 4237 bp, Cannabis indica
aaaaattaagggttgtaacccaatccaacctaacccaacctgatcaataatggattggtttgggttgggttataattaaaacttgatatgaatgggttagaatttaataggccgatctcattgggttggcccactaaaatagctttaacccggctaacccaacccatgcacatccctaattaaaatagtaattttttgatattgatttaacactaaatttaagtttttagggtctcgtactatctttcctctgcgctctttattcatcataaaccgaccaaccgcagattacatgattcccacgtgcacctcggttactgtgtgtccccacgcgccccacatgctcttactcactcttttctactttacaccaaaccatctcactcacaaggaggcgatatccccgagaccactgtcaaatagtcaaggttaacaaattccaccttatcaccttcccgctctccacggttctcttgtgtacccgcgccgcactcgatctttctctctccacttatcgcaaatcgcaatcaattcaagaatcaagttgacccgttgattattaagccaaaaaaaagttgacccgttgatccatttcctgttccgaccgccagtttttctttctttcttttttttttttcctttttttttttctctaatcttccactttgctgtctgaatatttttatttttttatcctttacttgttcatcactcgcttatctctgcatctctattatctctttttggaacgttgaaatctaaacgacattggtttattgcagaaggtattttcctatttccttccgctacatattttcgttttctgatagtgattcgataatgggggtgattgggtttctggtatttgttctggtgtttagttgttcagaaacataaatttagtaatttgatttcttagatgggttttgattttcttgctatcttgatattttcctgggttataatggtgagatttggcttagtgaattttgcggtcttgttttagttgaaaaaaagctgggaaaggttctttttagcaactttcttttattttgcttttcatttattcttctactaactgggtaactatgagtttattagatcagaattcgcttaactatgtttgtgttttttctttttcctttatttagaatcagaacccagaatagtgtctttggatttgtagcaatttaggcgcagttcttagtaaaaattcataattgatgaggaagaagagaaaaggaagtgatacagacccatgtcctaatgtaccagacattctatcgtcaacccaccattcacaatcgtcgatcattacctcgcattattcattagaggattatactaggctgaagaagaggtgcaaagaagattcttgtaataagcctgttctttcctataaaagcaggcttgcaggtgttgctactgcaccaccatgcggggcttcatctttaggcacacccgggaggggtgttaagaggaaaatcggttgcatcgatgtcgctacacaaactggtaggaagaataagatagaaaatgactatgtatcaggtgccacaattggtcatggaaagtttggttcagttcggtggtgtcggtctatggctagtggtgcagaatttgcatgtaagactctcatgaagggtgaggagacagttcataaagaggtggagataatgcagcatttatctggtcatcctggagttgtcacattacaagcggtgtatgaggattccgagtcttttcatcttgtcatggagttgtgctctgggggacgcttgattgatcagattttgggagagggtcgatattcagaacaccgtgctgctaatgtattcaaggaagttatgtcagttgtcaagtattgtcatgatatgggggttgttcatagagacataaagcctgagaatattcttcttactacatcgggaaagataaagcttgctgattttgggcttgccatgagaataactgatggtcagtaacatatacacgtatattcatatctgtgttatgcatttgataactattctttttacttgtacatatttttacttttacgttgaaaaatgcgcaatatatatgtctaatattggaaacaattatcaatttagaagagttaatcagttgtcttctaaggttcctctgtagattgacaaaaatgtgttttttttccctccatacacgatgcttatgtttgattgcatttggcgcttttctttctccaggtacttgtatgttggaacatttgtaataagtctgtccagtatgtgctgtttacaaacgattgccaatttaagcattcataagtcgtttcctgaatggatctttaaagcttgacaagttattttgttgtccctctatgccatgtaggatggtgcccgtgtgtctttatctaagttggccactatgagtacccaatgaagccccacttaagacctacgtctgttctaactcctatctgaaaggttttggttaagtttgtctatcacgaacttatttttatagtactttgatgggattaaaattttacgctagtgtgatggccaatatattactagtaacaacgccaaaggttcagctactaacatatttccttaacatgaatttagaatttcaagtagttggattttgtgttgaaatctaggctcagtgtatataagcatctctctctctcttcagaaatattaaaacctagaaatttttctgtggtcactacaggtcagcaattgactggtttagctggaagtcctgcttatgttgcaccagaagttttgtcaggaaaatattctgagaaggcagatatatggagtgctggtgttctgctacatgttcttctggtgggtgccttgccatttaaaggagactctgcaggagtttttgaggcaatcaagactgtgaagcttgatttccacactgggatttgggaatcagtatctaagcctgcacgagatcttattggaaggatgctgacaagggatgtttctgcaagaattacagctgatgaagttttgagtaagttgaagttctgcttaaatttattgactagtctatttcagtgtatccacatatttcatttgtgaaggttcatgctaaaatgttcttggagtacagcatagttgaatacatttataaaattgtgtatctacaggtttagaaggggttaattttgatgatctgactattcaaccaaaacaggatatatgaaagttatttttctatattttctccccttttcctttttatatgattttgattttggtactacgcatgattgtcctttgtgaccggtttatcttgttatgaacatttgttgaaatttggatattgttttgagtgtatttgttcatatgattgatgcaggacatccatggatactattctatactgcacgtaccttaaagacacttcctttaaagacaaaaatgaagaaccatcttggagcaccttcccatcagcttgctattagatccagattaaaatttgaccgaaacaggattgatgatggttctttcaatgataattcaagttcattttcatcttctgatagttgcaagtcagcagatgaggatgatgatagtgagctggtagatgcactggccactgcagtttcacgggtgagaatctctgagccaaaaaggagcagattgtgtgttccggcaggtccaattgagcagcaacgttcatctaacctaaatgctaacaatctctgtaaagcattttgatcttgctgacggcaaactaacaccagtatcacgatctccaatccttttaagctggggaacggaattttgcctgccccagtggaattttcagagggttaagggtaataacaatctgacgaattcactatgacttcttcttttaatctaataacggttttaacctaatgaaactgagagaatccatgtacagattgtgtaaatagaatggagtgttttcctctaatttgtataaatattagttaataataaaacttagtgattggatatttctatttctggtttactggaacaattcaaagctttaattaatttactagtagttaaacacctatttctattttggaccttgcaaatgtggtgatgttctttaatatctacgggaattggaccacttttattttttgagaaatttacaaaaatattagaatttgggttaacttttataaaaatattgttatacggaaaagtttttaaaaatactgtatttttataaaataccagtaaaacacaaa

SEQ ID NO: 381200 - DNA, 2206 bp, Cannabis indica
tcaaaaataaaaattaaaaatataattaaaatggatataatgttaacataatgtatatatattgttattcgtgcaatgccaacttctgcttctacttcagcaccttgaaaagtactgatcatcttatctactacatttcacaaacaacccttttattattattattattattattattattattattattattattattattattattattattattattataccttacatgttttttttaatgttacacaaaattctccatttagattagaccacttgtattatgtacatgggtttatattaataagtagggctaccaaacccaatgctgtaaaaacaaattaatgggttaggtaccctgctaagagatgtatcttctagtctagtcaagttaatattcatattctacaataatcttatcttataatagtggtttatcgtttgctaaaacttgttattttttgacaaagtttgttaaaacttgttaatacatctaaaaattggaataatcttcatgagaaagattagtgatgctgctgtgtcctcttttgtatccaatgcgcttgtgggactgctgtcttatctaaaatgaaagaaaactttcatgattttatacaaaaaccccaaaacaatgcttcaaaaaccccactactacaatagtatagagtagttaatagttatgtatcaattaaagatatatagagtatagcacttataatattacattataatgataataaaggccatttttgtatggcaattttttgggcttactcgtttcataagggggaaaaaagtacgtgacaaagacataataccaacacagttatgtatttctagtatgattggcagataaagaatattgtgtcaaaaaaagagaaaaagaaaattgaaaatagtaccatacaagttactctttgtgcaagcaaagctctctctcaaggggtttaatataaaaactactctgttttccttccaacctttcacctaccatgaagtactagagccaatttcataatggggtggcttcactcactcgtctccccattgaagaagctttgggatcgtctacactcacagcatagaaaacgtatgtaaatcttaattttttgctagatcatgatcatgttatatgttcatctatttctttctatcttttcttttatttcttaatagatttttctcaacttaatttcaggtagagggatatatatattatataaagatgtaaaatcatgtccttgtgaagatgtgcaagttctatggtcaatattggttgaatcagctggctcagcttctttgcatcagaatggaagagtctctcctgcattgtaaaaataataacagcctaaaatggcagaagagatgatgattcaatctcgatcttgtgtacatgattttcattacattatacatacacatatatgtgtataacgtaaataattatccttgttgattttcctgttttgtgtggaaaaattgtatattatttgggtttcttatagctgaatatttggaacttgtttattactcgaatacatatagcttcactttagattttttttttttttttgccagaattgctttagattggaatggtcagtttattttcttaagaaagaaatagaggttgagatttcatactatagaaatgtacaccttaccacaccgaaaccatacccccattatgactttgtctagcttgtttctttctgtgtgtggtcctctgcctttggctttaccaaaaacagggattttattaaagacttggccttttttttttttttgatgagcttaaagacttggctgttggcatacaatgcttcaaccatttattcaattctcttggttcggtggcactgaaaaaataaatgacattgtttccccaaaaaattaaatgacattatgacaagagtaatgatattagacaccagtagtggtactaaacattacttaaaggtaacgccttataattggttaatgatatttcataaaagttattacattcaattatgagaaatgctaaagggcaccagtggtgcctaacaccctcttacgtgtcaatatcgctattggtccaactaagtatcgggtcccatatactttaatataatagcttttagggagtatcgctagccaatcgcaacgcgacatgtcgagaaggtgctaggcaccactggtgcctaatagcaatgctcttcaatta

SEQ ID NO: 381201 - DNA, 1060 bp, Cannabis indica
aggatgagactcccatagcaagggctcgaggggctcgctatccatggatgagatggataggatggttcaagaattagtagaaccggttaccatagaggtgcgtgacagcaaattcatggtatctgcccaaggctatctcgctcatctgcgaatcgccccaaacacggaggtcaaagagatgggtgaggacttcaaactacctaaccgcgaggtggagcatgaggtagatggtgagggtagcgagaccgatttagtagacaatgctcaactagacgagcctttttcttgtgaggacctagtctcacgggtcaaaaagtctgatttgtctacattcgtgaagtcaaatttgattcacactgctacctctaagcctctgccaatgcagtgacctcaccttcccttcacaaaccctgcaatcatccaaacacaaaacattgtggtttcgattcctattctttgttgtggggtgagacttcctttttatcccttcctaaatgccattttatcacactacgacgtctccccctttcaacttaccccaaatagttatcgcataatcctcgagttctatgcgatgtatatggaatacacgtgaaatgaaccaacagttgagaattttggcttcttttacgacataaagagtgttggcaattataatggcctctactgctttaataagtgggaaaactttaaaataaatggggtagaaggcacggtttccaatataggagattagatttcaaaatatttatatgcgtttaagatgtcaaggttaagaattgacttcaattgccaacctcatacgtcgcatacttttacattagcctttatttttactaccttaaagacactaatatccttttccatattcgtaggtagacccgctcgatctatactagaccaaagttgtctggaaatcactgaagtcttaagtggccttccagttcaagatcgcgacttgtgcttgctatgtacctctacaaaattgcgagaacacaaattgatcccaaaagatgctaaacttcagcgagaaccagtgtacaaagagccttctgagaag

SEQ ID NO: 381202 - DNA, 1482 bp, Cannabis indica
tgtaggctccttataacatattcataaacatatacaagtatgttccaaatctttaactttttagttgtttattactgtagtttccagctttactaatcctttccgaaagatgtatagatctacatgcattaactacaatgtgttagtttgtcctaaatatgagatttccattcgtggtcagcctaggccttttattttattctataccacataccttcaaaatatattgacaaaataggttaagcaaattttcagtcttaccagccctattaaatctgttggctgaactgcattttctatatgtgtccatgtgttgttttattatgtataattatagtatttgcaagccttaatcgtttagttattacatagcaaagcgtttgtgctatattctgttgttttcttgtttaggtaaaggtgggagataagatggcattaaagataaaaattgtgtttatgtatttagttatgcatttttgattggtctatttaacatcatgttgtgtattattctctaaaacgatttgagtgtttcctaattagcctgttaaaaacggttctacaaactggagataggttgtgccggctcaaggttaattatataaattttgctaatgacaaagtagttttgggctctttatcttctacctgtttgtttttaagtttttccattagaaacttttagtcttctgccctgaaattttagtttaaaatatttgtataggtatatctatgtactgatgatgtgatatttattgcaggtaaatgtaggtagaacatgcgtgtgtagaggaatgttgtgagaattgagatgtgtgaccatagattttctcaattgtaaatcgggagctgatgtttgttatgaaatgtatgtatgtatatcttcttacaatttgattggcatagtgctgattgtctaagtcggcaatgctatgttatgtatcgcatttctgcatttactctttttcaatccaaatccacagaaattaataataagaataataaaaataatgattagaatagtcaaaaatgtctgtataagaattatgtagagacctattgtcctattctgtgtagtaaatatgatactttccaattattaaacaaatttttatttccgtactgtctgatctgtccttaacaaatgcattcgtgctcttgaaaaggtagatgtttatactttgttgatgaccctattcgattttatttcattttttgtaaaatacgtggaaattttcttatacacgctttttacttggtgcaagccagattttattgtagaaagtattgctaaatcagattttagattttacgtcctcttctatacggaggtttttattacaatttttttaaaggaaagatttaatcactttggttatcggaataattacataaggcactatcttttgtaaaatatttatatttttacgttcaaagaatgtattttttatatttttacgattttccaaaaaataacacgaa

SEQ ID NO: 381203 - DNA, 1733 bp, Cannabis indica
gagagagagagagaggttgaagagagataaagttatttgattaatgagttgagcttacttctaagattttctatacattcaacttataatctccaaaaatctatataaatccactaaaaatttattacatgaagcttaaatgcaaatggctaattttcccttacttggctacaaaataaataataactctagaataaaatggtcataacccactatcacaatactaaaagaagataagagggatataagagagtcttcccttataattgcttggagaggtccctattggatcttacatcaagaattataactctcacagagtatccattctaggtggttagattgggaatgatgaaggccaattgaaaggaagataaacacatcacccgaaaccataagggtatctaatagaggactaaaatttgtgccaatatttttgttgcaatgtggattttatcctaaatgaatcaaatgaaaaatctagttttcgctagatacagaattttttcaacgtaatacccagagtatcctgtctctaccaaacaatcagagtccagtcataagcctaagttccactcttcaaacaaaaaataaagcacattcaattcctaaatgtgatattaatttcaaatatttatcaacatttaagaaattagagagaagaaagtcacatgttgaagaattggatgatagtcttgaactcgaaggagagtactgccttgaagagtaaacactaacatcgaacgacgccaaactaaattctaacggagatggacggtcaagacggtcaagtctttctagtagagcacaagtctgattgatcaaggaatcgattttagagttgagatccagtgttaacagttgcctcagagacgtgcaagtaatcactgggggtggtccatctggatactcatgagccctgatttggagaagaaaatgaatgcaataatcaatgtcatactctaatgttgtttggtttgttgtagatccttttctgtaagtttgaatgtggtttgaaattagagtacaagtggtttttcaaaatatttatactttgaagaaacgatccgcgtgatattaaaatcaagggccaagatttatttccaagaaaagcactacagatctaacggtccataatgtcattagtcaagcattaaatgctatatctgtgattgagggaaaccgcataatgatattctcctcaagactcgcattatagtaaatatctgacagtttatttacttcattccaagcatctcttcggcaaacagctacaccatgaactagtgacacagtgccacatattgcattaaaaaaatcaaaatgaaagttgtcttccatccatgaaaaatatttgaaaactgtaaaagtttcacctgtagcctccacatgtccatccatgtagtctgaagcaagccttcacaacccacatcgttttaaaagcttgagggtaaatgttatttttatttttggcaagggacacgtggaatctaaataataaatttaactcacatattaaggctcaacatcaggcccaaataattgttgggattttatgccctaaataaaacttattttaatataatcagatttactaattaataaaagattagaaatcattttatgttgtatagttcacatgattactttcatgattatatgtttaatatataaattctattaaattttgaacatatagttatttatgattatagttgtaatatcccagaaaa

SEQ ID NO: 381204 - DNA, 1265 bp, Cannabis indica
gaaagttgagttttttgttttaaaaaaaaaaattaatagtttttctttttagcaaattataacaaacaacttctctaagatttaaatatttaaagaaccatagtataaacacaatacaattaaggcaagtttatttttatagcttgccttaattatttaaggtagtatgtgcgtaaaaccgtttcaatcttcaacaagatctaaggcgaagcttgatcgctgccttattaggtgaaaattaaattaaattttttgacaaataaattaattatataaagatttattgagttttttttttttaaaaaaaaaatatgttaatatattaaattcttattgttaagatttttattttttatattaatttcatattattcttgacatgttttattaataattattataattattttttttttcttgttaaataaacttaaatttatttataagaatctttcataaaaaaaatatagtcataaaaatgattacaagaaaataagtataattataaaaatatattataatattatagaggtgatatatatataaaatttctttaaaaatcattaattattaaatatttagattaattgaaatataatgatgacatttagtagttgatattaatgttcaaatgtattgaattgaaaatatattacccatgttatttaatattacccttaaaataatgtaggccttaaatttatcagagttttatgcttaagccaaccctgagtatggatgatacgtttccactagtcaaaaagtaacacatttggcttgatatttttaaatttttcattaatttttacttgatagaatcaagtgatagtctcataatttagtattttattaatataatactttatttgtagattgttattctaatacaattttttgtgtgtttgttttgtgatgtttcaagtagtttttcaatattacaaatcaaagttctagcccttatggtatatagtttgaggacgttatagttttattgtctaaatattcttagaggcagttttatcccatgttgctttctttcttctacagcttatagtttggcaaaatatgtttttcggttagacaatgagctatcctacttcaatagtgaatgttagcattgtatattcatttttaaagcttctttaaaaattattattcatgctatatattcggagcgtctccaatgtagatacaaatatgtgatacaaatgtaaagtatagttgagtttgtaaaaatttactccaatagtgtgtcaaattgtgat

SEQ ID NO: 381205 - DNA, 5304 bp, Cannabis indica
ttttgtaaactaacattccacttgcaagtaaccatccaagctcaaattttggtactaaaactctcaaaattattgaattgttagcaaatttaaggtgtcatctaattttcacagttaactgtcaatatgaacggcttatgtgtacactcttgtacacgtgacacatttatattagtatacctaatattattatttaaaaatcataaaaaaaattatttcaaaaattttataatattttttattttttaaatatttttataattttatctaattttaaaataataatattaggtatacaaatataaacgtgtcacgtgtacaagattgtacacataaacagtctatagtgactgttaaccagatgccaccttaaatttactaataaggttcagtagtttagaaagtttaccactaaaatttgagcttgaagggttaaggcatgcatatccaaccatgctctttaaacatattttttaactaaaataaattgatgcttaaaaaaataatctccaatcatacaaaaaataattctctatagtaaaaaatggatacgaaattctctaaatataagaatctctctacttttttgcttatattttttaatattattttaattaaataaactaaaataaaaaacttagaacaacaacaatgaaaataattttttattttaattttttaactattttaagtacaaataaaataaaacgataattaaaggagtttagcaagtaaaaactcattttcttaactgaaaactcaaaatctaaaatgtaacctaccaacaaaaaaacacaacaagttaagtcacaactcaactccactaactaaccaatagtttcaacttgtttttgttgtaactacaaaagtaaagaaagaacaattaaaaaaatagactagactagactactactagagtgaaaactgtgaaaaagtatcaaaaagtggattaaataaatatttattatttttcaattttttttaaataataataataataataatacaaaaaaaattagtactgaaaatgcagtgatgaggtcacagagatctttaatcccctttctgaccaaacactgtcacaccctcttaccactgccatcatcaacactccttcttctataccccaaaattaaactatttctctttctctctctatatatatatatctctttctctttctctctctatatttttttatatatatatttactattttgccatttctcaacacactaaacaaaaaacactctttctttctcttttctctgaattttttttgggtttgggaaacagagaaaaagatcaaaactttactctcaaaacaaacctaaaaacctaaagagtgtttttttgctttagttgggtcaagtgggcatttacttatctgaaccaatatacaacctagagagagaaactaaagaggagagagagagagagagaaatgggttaggctgtatttttttttttttggtgagtgaaaatggaagtgaaaatttgattggagaagaagaagaagaagaagattattcagctgagaattattgttattaataataattataataataaagctggaggaagaagaagaagaagaagaaaagcaaagaagaagaagaagaagattgagtctggattctcataataatcatcatcaatattttcaacatcttcactataataattacctaaatcaaacccaaaatccattttttcagctaaacccaatattaaatcatgtaagagaagaagaagaagaagaaaaggaagaatcttttggggttataaatacccaaactcaaaaaaagcatacatctttatcacacaacaactttcaaccttcttcttcttcttgtttaaactcaggtgaaaatcgaatcgaatatgcaagaaaaatggaggactaccctccttcttcttcacaaaaatcagtcattccaataacaccatcaagattaggaacacgtggtggcagtggtggtggtggtggtgttggtggtgagattgtggaagttcaaggaggacacattgtaagatcaacaggaagaaaagacaggcatagcaaggtgtgtacagctaaaggaccaagagatagaagagtgagactttcagctcatacagctattcaattctatgatgttcaagacagattgggttatgacagaccaagtaaagctgtcgattggcttataaaaaaggcaaaagccgccattgatgaactcgatgagcttcccgcgtggaatcccttaataacttgtcaagcggtaactacagagaatgcacagacgattgttacaactggtgatgttaggcgtttggattctaattcagtaacggcggctgctgatatggttgaagttggtggtggagggtttcttccaccgtctttggattctgattcaattgctgatactatcaaatctttctttccagatcaaccccatcaacaacaactctgttcatcggttaatcaattctataataatccaccggatttgctttccagaacaagtagtcagaatcaagatctgaggctttctcttcagtcttttcaagacccgatttttaatcatcatcaacaacaacaacagcaacaacaacaagggttttactcacctgggttttcgagttggttagagcatcataaccaaacccaacaacaaaacccgagtggttttcatatcaatggcgataacaacaacaacaacaccactgggtttgttttcaactcattccctgtggtgaatccacagccgtttttcggccgtgggaataatcaccagttttttacacaacaacagaggggaccccttcagtccagtaacacgccctcggttcgggcttggatagattcttcttcaccatccatggcggaccacaaccacaaccaacagcaacaacaacaatactcatcaatgggattcattggtgggggagttggaggtggattttcatcccccgggtttcatttcccggcgaggattcagggcgaagaagaggagcacgacggcatttcagaaaagccgtcctctgcttcctctgattcacaccattaaccaaagaaatttgaatcaaaatcaaataaaaatcaaagctttaagacaccccacacaacagtttttctaatgctgtttttacttaattggcagatttttcgggttcttgaagctttttggagaagactttgatgatgatgatgattctcattctctttggttcaatggggcattaaacaaaagaaaagaaaaaaaagaacaaaaaccaaatttgggaagaagaaaaaatttcaggtttttcaattccttttggttttgtttgttcttttaatttctcttatcagtttgttatgtattattattattattagttgtaatttagaaccttttgtttgtttgaattgttattaaaggtttgagctttttttatatatatgaaaaaagactcaaacttttatgctttgaatttataatttgcttctgtttttgatgttttgttatgaattttgaactatttgaagtttgattatttgggatatttttgaaaaccaacaacttatatatatttatatgtttgtgtgtgtttgaatttgatttgatttttttaacatctttttccttgctataaatttgggagcataaaaggaaaagtcattttctgatgaatagtgaaacttgtactagaagaagaagaagaagtggatttacttgtttattttttgggctgcaaaattaggcaacttctatgagtttagaagaagaggaatcctttcttttctttattattcttttgaaaaaatatttattttaactacccttttgttccttcctattatatattctctttttatgcatatatataatgagtagtagaatatggaatgtgacctaggatagaaagaaatatgctaaagagttttgataagaataatataaggaggggaaaaaagaaaagagagaaaaagagatatgaatcttattgaccaaactttacccaattagtgtaaaaatatttttcaagagaaacccattttggctaattgttaacttagctctattttacttaaactaccaatatctaaggttacccttttttaagggaaattacatgctttttttctttctttcttaagctactataatagaataagcttttttttctaacattataacatgagatgtcatgatctatgatcacttgttgtgagtatgataggtggtagatttagctggcatgacattacccaagtggggctcattggtagtagtggtagggttttcgattcgatgccatctagtggtacaattccagtttgttatgtaccaaaaattatattttatgttcttggtacgtaactggaacaatcctcttattgacaacgaatccagaaccctaatctaaggtaggaattcgagatagagctaacggtacggtttggttatgtaccaaaagttatgttttatgtgttgtcgatagtaataatgaatttacagaaaatgagacataaaatataatttttggtacataacgaaactaataacctagcgacacctaatccgacagaaaccaaattataagttgtagtactatatattttcatgaaaatgaagcatgaaatgaaagatgatgaggagaaatagattgattggtgttgtagcataacaagctccaataatggaagaaagaatacttacatatatatacatagggagatgagattgagaagatacctccaaaatgtgtttacttagccatctgtcttttatggtcccctactaatagtagtagtactactactaacactatatactactatactataacactacaaacacctctaaaatctcattcacttgatcaaaaagaaaaaatctcatatgggtctagctggaaatgaagcctctttcttagagaaaagaaaaatacttattaagcttcttagtgagaaagtgacatttgcatattattgttgtcggtacttggtttatggtagcatgatagtgtactactcaccaaaaaaaaagcacaataaccttttatgacactgcataagaatgattgataaaaagtattacttagtgtgtagtttcgatgttatacaattattggtataattaactattgtgttttatataatttaagaaaataagttttagaaaatatcattaactaatcgtggggcgctacttatagaaattgttaagtactgctgttgtctaatagcaatgttctataagaattttaggtgaaaagattttttattgatttgaggaaagaaaaagaaaaaagaaaataaagaatatatgt

SEQ ID NO: 381206 - DNA, 995 bp, Cannabis indica
acttattaaaaagataccttggagaaaattaaaacatgccgaatcacaacgaaagaaaagaaagaacttctactatatatgtctaattcaaaaaaaaatttatatgtaattgtataaatgatcatccataattctacagaattaaaaacttactattgttagaattaaataagcaatcatatatttacatatagactaatttataaaagtgaaaccattaaagaatatcataaatagcgagaaggttcactggtggtgagaatagaaaaaactcaaggagaaaaaaactgttaaaattggcattggaaagtatttatgtaattagcacagagcaaatatcccctgatataatatacatcaatctttaaattcctataacttcaaattcatatacgcttggaaaaatgatcatataacattattgatatttatcataaaagatagtttgatcataaaaataaatttgaaaaatgtactggattttaaaatataatttaaataatgtatagcaaagaagagaaagaacaaaccaaaagtaaattttattactgccgacatctttaaataaggacactatatatttaaatagatatatgacctttttactttgtcatccaagaagaaattgttgatgtgattgaactttgacttagatcagtgaataaaagtaaaccttgaattgccattgtcaaaatgtatctgaattgctcagctcctcctctcgccaccaactcattcaactccatcgatatcttgcacaactttcattattaaattaaaaggcataaaagaaaatcctaaaaaaaacaatccaagcattgctaaagtcaaaaatcctttcaaaactcctcgatggagaagagttgtcaatatacttagtagtgaatgaacatccagtaagtgcagtgctaataatggatgaaaattgaatttgttatacccaaaattcggctgtacttcagagagtgacacgtgtcaatctcatggaatatgaa

SEQ ID NO: 381207 - DNA, 1378 bp, Cannabis indica
agaaagggatgatcaggtccaaatcagtcaaagttataagtaattttcctagaattattaattaattgcaattggtaattaatatattgtttttgtcctatttctcatataatttttaaaatattactatatatttcataattaatattagagttcatacatattatcaatagggcatactaattggaattttatttatcagaataattaatgtatattattaacttatacaccattaatttttattttattttttctaattaaataggtgccgattgagagttcttatatatcatcaaataattaggctatagggtacgtataatttcttggctagtatatatgaaaaacaaaatactaagataaatccaccttcactaatatatggctaatttactattttaagtgagaataagagctatataggatattaaattagtgtcaaaatatatataatgaattaattcattggcattaattctttcaataatagactttatttttgattatttttcttaaattttgtttgtttggaattgaatatatataatttggcaagaataatgaactaattaaatttaagaagaacagtcaaactcaaagttaatttttgattgccgtgcaactgcagctagcatcaaaaaatatataacatatatatataattaaattaattaatataattattaagggtaaaacgtctatgtttttgcaacacttccatgcagatggcaggtcaaataagaacactgcaaacattttcttaatttcatcataattatatttaatatattaatataaattaaaaaaaaaaagggtttgattatactaatatatatatgtatatatataactatagttttcttaaatgattgagatttgataccccacgaaatcaaatacctctcttcccaaattggtgttattaaaatctagcacattaacatcacccctttaaccaatatttgcatatagttgttatgaaatcagtgtctaaatgtaattggtggatgtgtcaatccaacatgggtcaaatatatcctatataattagtttttaagtgtatatattgatttatttttatatattgttctaattattatttgttacaagttttaacaaactgcttcaagggaagggcaatatgggtggccccatttgatgaactgaacaaaaagttaagtattatgattttatataaaaataaatatataatatatttaattggacaccctaactaatcatgcttgattaattatgatgatcataggagagcagtctcgtgattaattttgacccatatgatctctctctctctctctctctctctctctctctctctctctctctctctctctctctctctctctctctctct

SEQ ID NO: 381208 - DNA, 3344 bp, Cannabis indica
tctctctctctctctcttgtactaatcctcctctatttttctcttttttatttaggcggctctaaaggcaaacgttggcttctaatcccaccaacagaataccactcgtcttacccttgaacttaacgaggctcttaagacatgtgaagctttatcgtctgaaagggattctacagttggggagaaagataaatttaaaactcaagtcaacgatcttcaaactgaaatccaagaaaaaaattcaaggattaaaactttggaacggagcttgaaggaagttactaagaaagtcaagaaagacctcgctgataaagcagaagatgccaagaggagagttaaggatatggcccaaaaatctctttttaaagtttggcaaagcaaaaaaaaagtgttagccttagattcttaaagccaaatgtagcaaagagtgtggccatttttaagaagatagaaaaggaagaaattgttaaggagaagattcgacaagctgtagaagagattggggagatcgagaatgaagctgaacaagtggtggctgaggctaataaggaagttgaagaagaagaagaagaagaagaagatatttactataagtctcatgtgaacgaggcttagtttatttttattgttttttttttaatttatggcctggccaagacaattattttttggtttattctaagtatttaattatatatttgacaatctttgcctgatttgggtggctaatcaggttatattttaatattatattccttcctttcttttctcgagaagatgtagttgagtttaggggtgtgcataaatcgatccaatccaatgacaaccgaccgatccaatcacaaccgaccgccaaacattggatatccaattgtgatcggatcggattggatgttatttttgaatatccaattggatcggatcggatgttggatggagtgtctaaaaatccaatacatccaacatccaattaaactaattagtattttcatttagtttggatgagtaattagattttataatgttatacgtaaaatatatatgtatacataaaaattaacattaaaattttactctttttttcttggattggatggatccagtctaatccaatacatattggacctaaaatattggatggatccgatccgatccaaaaatactagtctaaaatattgaataaattcaaattgaaccaataaatatatatgaaatacatccaatggatagaaccgatccaatccaacatccaatggatgttggatcgattggatgactgaaatcaattggatcggatcggatggtaaaatctaacatccaatatataattggatcggatctggatgggcctaaaaacattggatgtgatccaatgaacacccctagttgagtttagtcatttaacaaagctttcatatttatcattttaagtcacacaattagtttagtttttcatattcatatcaaatgattttttccaaggcatcaaattgacacccctaccttgaggggagatgataagctaaacatttaaagattagctaggaattagttttggtgaaaacacttcgtataatttttttttctattatgcttcttgattagttgtaattttcttgtaataaccttctccatataaataaagattcaaaactcaataagctaacttttggcaagcttttgagttgttatactgttaaacattctaaatagtcctttgcttcataagttcatttagagagaaccaaatgaaaatgtacatgctattttaagcttcttctcctaacagctgcaagaggaaaaaaaagctagatttcacattgatccctcaaaaactaattacagttgaagaattcaatcactaaaaaagttaatagaaataaagccatcagaaaattatataccaaacaatcagtgagtaatcaaattcttagacaataaaccttgccgaatcctcaagctatctccaagtgttttcaccaatttataaggaccagaaaattgtagcaatgaagcaaacacaggtacgtaactgactatttgagctactcttggtaaagataacacaaaggttcgagcctatgtctttttctaatttaaaccaattaaatagctctaccacttgaaacacattactctattaatcatctattagcattattcacataacacaagcaaagtaattttcaattgaagcaaatttttcattcaatttctattctcttgatttaaagctaatttttttaaaaaaaaaaactcttacgttcaacggtgtaaagcaccttttgtaacattaatttgtaaaattaatagaacagagaattctactaaaattgattaaaaagagagttttcttcaaagaccttttttttttaggtctaactcctaacactattttaagaaaattcaatggtacactccatccatgtgcactcctttaaaaagagtgaaccaattactttttatttattttgacattgagcagaattttctagtattttttttatagtggtgcatgttgtaattaaaaaaaatacactgtaaaatttttagaaattaattttaaaatttaacacgccgaaaattagcttcaaacattatatttaggggtgttcatttagtctaatccgcactattttattcacagtacatccgatccgcactaagtgcggatttcatattttggatctaattcaatccgcacaataactcaaattcaatccgcaaaagtacgaattggatcggttattttggattggttactttttaatattaaattatttaatatttataagaaatattttttcacataattagaaacaaaataaaataaattagggtaaatactattttggaccctgtattttacaaaagttacaaattgaactctttgttttgttaaatgaaaaaatggaccctgtattttttaaaatagtacaaataggaccttgaactaattttttgttgaaataaaacttaataataatctaatctagagatgttatgacaaaaatggttacactttctctatctgttcgtgttagaaatgttagatatttatatgtataaactgaaatatatatgtttatgtataaaatgcggaattaaatcaaacatatatacactatgaataaggatcgaaatacctccagccattgattctagagctttagtcccacataagctttgatctgcaaagaaaactggttgatgtgggtaatcgggcttcctcgctctctcaactctctttagatggattttgctgttatgaacagaatgagtgaggagctcggggaccgagaccctatatttataggggagatactccatcagtatctgtgcca

SEQ ID NO: 381209 - DNA, 3482 bp, Cannabis indica
catttcacatcatcaacagcattataaactagctctgaatttctacacagcttcaacaaaccatatagtccatctttaataccactataaaaccataaatcagaaaattcacatcaatctactcaccatttcctaaaaagcaagtctttttctatagctatgtcaaaacccaacaaaaatatctgatataccaatcctaatgagtaaaccaataatccaagttatcttcaaaaagcacaatctttctttccaactgacaagaataacaacattaagtttcaaacacttcaaccacaaaatcatacacacatacatatatatatatatatatagaatatcaaaaaaagtacctgtcaggagtgatttgggataaatctttgggtgaccaagacatgagcaaattaccaacagaaagcaagctaccttcatagtcaacaccattgacagtaaacccagtatccgtatacctataaagaagacaaatttcagctaaactgaatcaaattgagttagaatgggaacaattaagctaataacaatacctttgaaaacgaagctggtcttctggaacgttgtcgatgatattgatctgatcgtagagggaaaaagctcgccttagagaaggaagcatttgattgtgtggttggtgagttatgggcattgaaaccttaggcttcggtggctgatttctcaaactccttatcagtttcggcagagtcgccactgctctctctctccccgccattgattcttctctcttctctttctctctctttttttttttttggccccaaatctttttgtttttgttttaatttcaattttggccctttattatatatttatttcactttttgacctttataatataagaaattatcacatatgtcctttaacgtttttcagtatttctcttacatattgtcgttttactcggtttatattgtttttataaattagcgtcattttaatgatttgttgtcgttttccaaattttctcttattacttattgtcgtttattcatttttatgtcgtttttcttatccattcattgtcgttttccaatttcagtcgtttgatgtaatttttttatttgtcgttttcaccttctttctttcttttttatttttttttacatttactgtcgtttttcatactcatgtccgtttgtatcctttattgtcgttttagtatttttatgtcgttttcaaaattgagtagtttggtgttcttttttaaaaatgtcgttctttactcttttttttttttgaattgctgtcgtttttcacatttttaattgtttttcacccctaaaaaaaatacttattcatttattgtcgtttttatcatttattgtcgttctctcatatttttgtttgtcgtttatttttatttgtcattaatcatggttgtaacttgtaactattttctaatttgaatacacaattaaagatgaatttccacaaatactgacatctcaattttaaaaactggataaaaataacaaatataaaaagtgcttgatgaagactcattttgtttattttgtaatgtttaatttgtaagaaattaaattaacaacagttgatggttatatcttcaggccacccaaactcttccaacaaagccaataccactcaatttgaccaaccaaaaccagtctacaataaaaaacaaatatatcatcaattgtggtaattgcattacttaggatgatatttatttatatatatatatagatatatatatagctatatcatttgtatcccacatagctagaaagttaaattgtattaaaatattaaactatttaaaaatataattactctaaataatttttcaagaaaatataaatttatttattaaactctcttttttaaaaatactggaagactgagtgattattaaattttaaattttaataagaatatcactttatttatagtaataataattagaaaaaacaaaacttcgatttatactaaagataataatcatttttagcagttacactaaatgttggttcaggtttggtttgtgttgtaaaaggaagtgaaagttgaaatcaaaagtaaaattatgaatcaacactcacaacaatttttactctaggctgtcttgtatgtcagtaagtaaaataatcaaatggtgcttgtttgtttgcttcatatgtaattgtctctctctttctcatatttaagatcttttcttttttatcttgcatgaaagtgaaagtgtagaaattttgtcatatggggattctagaatggtgcatgaaaagggtaaagaggcatcttagaagttgatttttttttgaattgaaatgttcattgcatataaattagaccacatagtcatcacaaaataaatttgttggaataatcgctacaggcaaaatactaaattgttcgtaagtaaatgcccacttaactatattatgcactgcaaaattataagttctgaaaatataaaaaaaaaaatacaaccatcaaaagaagtagaaagcttaaagcaaaaagacgagtagttttcaatctgatcactatccttgagtcacttttcacaatgatgaacttgtaatatttggattttgccaacttgattgcaaagcaacacgttgccgcctctccacagagtacatccgaaaaaactaaatctgccgtgctaaccccgatcacctcacccaagtgatttctagcaacaacagctatacatgagctttcaaatcccactttaacatcgtcgttcagtttgatccaatcctgaggaagagaacgccagacctcctcacgaacaggagagggagcagggataagaattgctctcaagtctgcataagagtaacaaatagagttaagatattggttcaaattaaaaagtttatgattatgtaccttttcatttcgggctcgccaaatagtatcaacaacaatagaagcatagataaagacttcgtcaacattaatgcccctattattcagactctaaataaacttgaccccgtctcacatacgaaagctagaattacacattggaaagataccccacagagaagatctccacaaatggaatgcagatcgcatttgagaaacaggtgctccaaagattcttcctccactccacataaagggcaattaacatcctcaacattaagtctcttacaaagaatagccatggttggaggggcttttgacaagatgcaccaacaaagggtcttatacctctccaggattttactattataaagcttattccacatggatgggacaacctcacaaggaagaactctacgtaaggcttgagtaagataagtcgatttgtaagagaatttcctgttgaactcttttgtccagacctatttatctttctcttgattaggggctctaccccctttcagaatagctgaagtagtttcactctcaaacatacaattcaacttctgaatggcccactctaagggtgagcataaaattcagaaaat

SEQ ID NO: 381210 - DNA, 1191 bp, Cannabis indica
aaaaaaaataatgaaaaaaatccacaatttgatatttatttttgtcatcaagttttatgttttggtaattagccctccccgctaaaactattctgaaagacatttttcccaatgcacatcaaagagaatcaaattacaataaaaatgaaaggggccgctctaagcttatgattaatctgtgctttattgattagttattactaattagtatgttgtattacatgtacacatataaagtaagacatgtgagtaaatcagtagtaatgttccctccacatatgtttgggtcatgcccgaccgctgcatacaaatgcctcgttaatgggaaaagcaattccttaatttggggtctaaggtttgatttttagaagtgttggtttaatttcaagaatattaagaattatgcgtgaaaataggattgtacctttttttttttaatataacactccaatttagcagaatttttttatttatatttatgtatgttggaattatttaaaatattttacaaaattttaataaatttaaaataagttataatataaaaaattgtattgaaatagtttatttaacatacctataaaataaagaatgttaaatttgaaacctattttggtatgttaaaatttgaatcttatttctcaaaattttactaatattttaaataactacaataatgtgtatgattatgaaaaaaaaaaaaaactcactaaaaaattcttatgaatatcgaaactgacagtacactcattatagaatgatgcattgtagaattttctgcttgttttttcaaactgtgagttccaggcgctaatggcgtcaattatgaaataggctccaaagtcattaaaataagataaatatttggtgattgatgatgaatggagtgtggtaatggataaagggcttactttttagaccttttcttcactctcacttgattctcgttcgattttttgggattgcccttatctactttcttcccatacttgaggactaattaagcctttccaattctttatcaccaatgctatacactttttctcagctaactctttcctttcttttttatttatttattttttttaggaagtctgccaaatttcaaaagcaaggaagtgtgttatgattacccaaatccagttatattatttggataattacataagacaccatactttgtaaaaaaaa

SEQ ID NO: 381211 - DNA, 2642 bp, Cannabis indica
atataaatatatatatatatatatatatatcagagtttacttgtgatctattgtgagcttataaagtacagtcagtctaaaaaacgagccaaactaatttacgaatttcccgacgtgtacattcacaaatttttcgatatttggccttgtgagattcattcaaatgtcacattcgaccctgtggtctcttaaatgtcgttcgttatattcacacattttaggcccaaacgtgaagagagtgtattagagttagtttcacattgttaatgtgtagaaatatattgtcatgtataaaatgaatgggctactcctctaattatcaattaattttgagatagtttcacatcttaattccacacacatcctaaattctaacatgatatttgattcgttgtgagtccaaagtaccgtcggtccaaaaggacgaggaaaacaaaaaactttcagtctcccttttaacctccatttgagacatttcggccaatgtgtgccagttttcagtgttgtggtctttgacctgttttgaattccacaaatttcgcgatgtgtacacctataaatttctcgatttggtcttgtaggattctttcaaatatcacgttttggctctgtggtctcttaaaagtcgttcgttatacctacactttctagacccaaacgtgatgagaaggtgtaatagagttagtctcacattgtaatgtgtgaaaataaaaaatatcatatacaagatgaatgaactactctttctattgtcaattggttttaagatgaaaccttactaaatctatatcatataccatctaagaggggttggtatgttttggttgccatcctatctattttggtctctgtgagagtttaaacaactgtttttttttcttatacgcttgttaagtaactgtttgaatattattttcgatactgtaaactatttgaaattttctaaaaatttaaatgtgatcctaaataactacacgatacgcgatcacagaaaaaaattaattaaaaaacttttttggataccgaaacaaataaatttttactagatcttgtattaatattattattatactttataagatttatttaattctaagtctttgtgttttctaaaaaaaaaaatctgtaattcttttaatattaatttggattcatttggtggtaacctaacctagtggtaggtatgaagtttgaatcctcccgtctcaagatattaatagtttaataatggatgtttttgcaatgaaaatttgtatatgggtacaaaacaagagaagatgaatagtttagagacatatttgcaattcatcaaaaaataaaacaataatatatgtaaatttttttatctgctagtttgctgtaaataattcaagcatatatttatatttgaataaataggttggacagctgtgagggttagatgtttagcagacaaaaaaatggttcaaagaggtagtcatggggaggtgtgtattttgttcccaaaaattgattttcaaccccaaaaagcacgctgctttgctttccttgcacgagagaagagccattttattttcacacttagctattttaataataataccaaaagatgtatataagaatttaagtgtcaacacgcttaattacaaaagaaaagattaatgtaatgtggtcaatgaaaattcactttcaccttcattttcggatatgtttgcatggggtatgttttgctcatattcaatattcattagacaaatataatttaatttagaaatatactaaaagtgatgctaaacattagtgaaaagaagtacatggtctcatataatttaaagtaacaaacttataatacgtcaaaaaaaaataataataataataacataaagaatatcattaactacaaacgacacttaaaaaatactaaaaactactggtgtttaataattatattctttaattcaataactattatgaaatattaaatcacctcatagaattagtattgttagagcgcatagtaaaaatattctattaattaatatcattaggacttcaaaaatgaatgcacacaagaccaactaatttgagtcatcttttatagcttaagagcagtctattttttagggaaaatggggtaacaaccgcagaacacattcttacttgcacaccaacaaggagagacgagaatgattatacattgtatacccactttattttatttcttttttaatttttactttcattttttcatttttataaaaatatatctacttttatagatgatgattcttttacaccccttaggttaatgtaaattatatgttaaacctaaatagagagtgaggatatattgagcaacttactcataaaagagtatattttaataaaatataatatgagagtatttttaattaatagatatgaaaaagaaagattcctcaacttattcccaataaagtaggggtgttcataaaatagcagatcaaatccaatccatacgatccaattcaatctaatccgtaaagtgtagatatccgcacttgtgcggattagattggattgaaaaattcaaaatctgcacttgtacggattggatgttaattgacatgtaaaagtaactgttccaatccaattcacacatatttataaaaaaaatttaaaaa

SEQ ID NO: 381212 - DNA, 3145 bp, Cannabis indica
aaaaatctggggcttacatcatgggcgaccacaaccaattgtcttgttaattcttaagaaataaagatatttgtcatctcttttctaaaatttgcaccaatttagtgtgttttaaacaaatattctttgagttttgttggtttaatgcataggtttagtttagaaataagattacttaattgggtgtaatattatggaaaaaaatgcaagaaaacacaagtcgctttaattttaggcaaaggcaaatcacgcagtgcatggagaaaaatactttttggcaacatttaaatgttgtggaacttgcctggctctcttgatattaaacacctattatactcgcctcaatatcttataagatgagctcaatgatttcaaatggtgcctgtagtaatattcgaggtcagatcttgatacaagtggctcacgttttttcaactagaaaaagaatagtgtcaatgctccatcaatgtttgctcttctctgttgtcaaaatccatggcttttgcttcagcttcagtccccaaacaaagatgtgaccagcctcttcactctcgttgttgttttttgggtcacaatatggatagctgttataaattacccacctaggtattttatctcaaaaacaaggctcaaatgaatatccattagccccatttgaatgggagatcctagggctaatgcaatgacctccctttcaatccatttcgccatttcctggagctctacctggaccattgtcattgatgttgccctttgcattgtcgccgtctctgctctatctatgttgtcattgttgatgccacatttcatgttgccaccatatccttaccaggccatgctattaaatgatattggaattatggacgcgtaatgtacctactacattggaattatggaagcataatgtacctagtacgaaaaattggtcaccttttgaaggcaaacactggtaactcctacctggcaaactatccaactcacaacccaaccatggcagcaacccatttgtgactctcatgaccaaccacctctccctttttccagaaatgtcacccaaacccgtttatttgtactttaagagatacaagtaaatctcaactacaatataagaattccatttttttcttaaatgtaataatatgagaattgtaatcaacccatttaatgtaatattgtaaacccgtctataatcaatgtgcttagttagctcaagaaacacaaaattcaatgcaatttgaaaatcaccttgattatcacaccgcaattttgtttgtataaaaatttcaagtcctacatcagtcaagagttgatatattcacattatcttctaatgctctaatgcttcccaataatgaattgttagagatgacattaactgggtgactatattgactaaatatgcaaaatttggatgagtcacactaaaataattttactttttaaccatccatcgatacttcttagaaggttcaaatagttccccaccttcggtaatgtacatgtttgaattcattggagcactaaaagactttgctcccaatttctcaattaataagtcaatgacatattttcactaaaacagaaagatacctattttgctccttgtgacttcaacaccaaataaatacttaagcatgcctaagtctttcatgtgaaattcagtgagaaggaaagacttgagagatggagttcttgtaggatcacttctagtaataacaataccatccacatacacaactaatagaaaattacactctcggctggggctcaggtgacgcaccccatagtaggtaggggtgatctacctcaaagggtcttggccaacattcgtggatgggttgagatctcatggttgcgcccagagagagaagccacgcatggtagccccctcaacccttttgacaattaaaacaaaataaagcttttgtttgcttgtgcaacacaaaatgatcaaacatactttctatcataccaaaatttttcagtacatacaaatttttgaagacgacaatctcctcttgagcaacaaacccaaaagattgctctatatacacctcaacctgaagattaccatgaagaaaagtgttcttcatatcaagttgatgcaaaggatgatgaatagttgacattaaaataaaccaaatagaggtcaatttagcaacaagagacactgtgtcaaaatagtccacgccataaatttgagcatagcccttagcaacaagacatcttttcaatcgagtaactgagccatctagattgataataattgcaaacacacatttgcatcctatagcccatttccccaaaagtaaatcgaccaagtcccgagtaccatgtcacccaaagcattcatctcttctatcattttaaatatgcctactaggaagggatacacgataggtatcatctccttgtggagttttacgaaatatgtttttgagtcattttcgtatactgatatttgagctgtaaaatggtctcttgtctcaaaactttcacaagatgaaggtgagctccttgttgatcctacaaggtatagacaactaaccggaaaacttatatatctaaccatcactcgacttgtcattagctatttaatgataggcgattgggaagaaccccatctcaaggcagctaatcatagtattttaatacataaaaaaagttcatggtgaaggtatctttttcattctttcaaatacatgtgaaggttttccaaattcaaattggaaacacgctcaacactcaaaggcccatcaccgattttgtctttttcttagatcatctccaacaccatggaggcccaagaaaggacatattgtgtcacattcttcagcaaaagaagaaatcatgctataacaaataccacttctgagattacttggcttttttccttgatgaaaaatcattgtgtccctaatccttgaccaactctttccttttccagcattcaagctactctccacattgatgttacttgataactctaagatttagagttatttttatatctttaagcttgaatttaatgtgaattgtggagcaattaatgtctatattgtgtaattgtgtttagtttgttgtgtctttgtaataaatggaagtgtgtgtgttagtaagtgttagatggacttatgttgttgtt

SEQ ID NO: 381213 - DNA, 2873 bp, Cannabis indica
ttaacgctacggtaccttcactacctagttagtttccacttacttattactgttactactgcttttctcattctctatctttaagcctagaaacttcaatcccatctcttatctgctccagattttcataacgctccgtcttctgtttctctcttagctctctatctagttctgatagagaagttttattttttgagcggtttgattttgatctccgtcttcagccgaaactccgacaagtttctttgtcgaatttcggtttgtcatttctgtaagtgtcacttcttatcttctaatcttttaaggtatctctagaaaagtttctaatttagggttttttaaattagttacagttgatccgtttccattctcactctctgtttttctttttcttttttcgtctgggatcagtaggaattatctaatatttgatcatggaaatttgtaaataaaagaagtgttttttcccccttttattgcctttttgtactgacggattttagtttactgttcttttttcttcttttaattatatttctaattttggagattctgtagatttttagatagaaaaaaagtgtaagaagaaaagagtgtcatttatttcttatattttgatttaggctttaccttttgatcgaaggtatttagtttgcttattgattaacttacaactacttttctaaagtactgacccttgattaattgatataatgttttggtctggcagctgaagatatttttgttaccgttaactcagaaagatatagttctagtcttctctcctaagaggggtgttgcacattggttttttcttgtctctgtgaaaatattcaaccataaagatgacagtcaggactcctggaacaccctcttccaaaattgatagggcccctggaacaccctcttccaaaattgataggaccccagtttcaaccccaggtgggccaagggccaaggaagagaagattgtggttactgtaaggttgaggcccttaagtaagagagagcaattagccaaagaccaagtagcatgggaatgtattgatgataacaccattgtttataagccaacatttcaggaccgttcagctcaaccagccacatttacatttggtacaaagtccaatctgtatttgtaactttttcaatagaatgggttgtgttttgttttctattaatgagattctaccttataatttattctttcttgttaatgcagataaagtttttggtccctctagtttaacagaaactgtatatgatggagtcaaaaatgttgcattgtctgcattaatgggcatcaatggtagtacagagccttgaagccattcatttatctttgtatttcttttaaagtatggctggctctaaattttgatttgtatcaaatattgcagctactatatttgcttatggacaaactagcagtggtaagacatacacaatgagaggagtaactgagaaagctgttaatgacatctacaaccatatactaaatgtaaaaaagaacacttctgcttccatgtagatattaatttcccagtttcttgtgaacgcattataaattcttgatcttaccttttaccagccttttgtaatatttttaacagaaatcatgatataaaagctaatcttgatttctgtcttcatttgcagactccagaaagagatttcaacattaaaatatctggacttgaaatatataatgaaaatgtcagagatctgctaaatacagattctggtcgaaatctgaagcttctggatgatccagaggtaattttttattctttagtaaattattgtgtgaagtaagccatttaatgtaattcttattattgttttctacttggtgcagaaaggtactgtggtggagaaattggtagaggaaactgcaaaagatgatcagcatttgagacatttgatcaatatttgtgagggtaagaagagtacaattaagaattgtcattttgaattaattctttatttctggaagctttacttaacaatgtacattttgcatcttttgtagctcaaagacaagttggagaaactgctttaaatgataccagctcacgctcccaccagataattagattggtaattagacatgaaacgatttcttttgatgcaatgctgctgattttttctctgagaaactaacaagttgcttatttttacttgtttatttttctttacacagaccatagaaagcacagtccgcgaaaattcaggttgtgtaaggtcttttgttgcaagtctggtaagctttaaatcgagagtagacttttttaatatatatacatatatgttagtagttatttatatttatgtggatgattgcagaactttgtagatttagctggaagtgaaagggcttcacagacacatgcagatggtgcgaggctcagggaaggttgccatattaatctcagcctgatgaccctcacaactgtaatcagaaagctgaggttagaatctaataatgagaactgatataagagtgataataagaaccgagagaattacaccatatctatgcgcaataacctgatttactgatctgaaacattgactaactatactgtcatagattggtgcatatatgtgtaaaagtcatccaaaccaccctagctaactcttttattaataataattagctttcaataataatacatatcataagttcccaaaaccgaaagaataataatcataatatacaaagacggatgttttttttttttgtctgatggaacaacagttcaagtcagaaattgtttaaagaatggaatttcctaaatatggtttttggttggaggtaatgaaattgaatggaatgaaaaagaaataatttttatttcattcatttgttt

SEQ ID NO: 381214 - DNA, 5378 bp, Cannabis indica
gataattatttattgattaagttttagttgatttgattttacacatttatcgttaatttttccacaattaaaaaaatattaattatttatttaaaaattaaaacaaatgaaaaaattaaaaaaaaaaaatgaaaacattgtgtatatgaaaaggaaaccattaaagataaagatccatttttataagtcttctttttagagtgttactttagaaaataagtattaaaagactttaaagacccctagtttactcgagttggaccatttactagaaattttgtatctttaatcttcatttaaaagtgtccttagaagtaaacaaaatacaatgcatgtctcaaaaatgttgtgttgcttttttttaaatcaataaagaaaattgtggacttggtccttttattaattaattatttaatttcaaacgcgtttaatttttatttatttattttcatatggaaagtgtaaatattacttcaaatcaagagacatagaagtgtgtccacaattaaaaaattatcatagtttagagacacaaacatcaaacacaagaatagtgaaagtaacataaaaacactattaatggttttaaagtacagtgaaatttgaatttcaatacactaatttttttctttttctttttttactatgaatatgttggaaaattctacaagaatctgtcagatcaaaataaaactggtcttttttaagttagattttttggggaataataatataactatttcttttgtcaactggaaatacttttcttgttccaagataagcaaggtgtttccccataagtcctgcaaattcatgaggcaataaacacaataaggtagtttagtttggagtcccataaaataaaatataaaatataaggttattcactattaaattacactaataataatatgatatattctacggtgtaaaacattcaagaattgggtatttggcactggtcaccaaaatggtcgctggtgtattcaagttattacattttggtacttgaattttttatctcgacaaacaagcccttatatttttttgtttgagaaatgctaaaggacaccagtggtgcttagcaccttcttatgtgtcagtatcgctattggtctaattaagtatctgatcccacatagtttaatataatagtttttagggagtattgctagccaatcgcaacgtgacatgtcgagaaggtgctaggcaccactgatgcctaatagcaatgctctttttgtttccatgcaacttttaaactccccatgtgaaaaatccagcatttaaaatggtcttttaggaagagaaatgctgaaagacactaatagtgtttagcatcctctaagatgtaatagcgttattagtgtaattaagtatcaggtctcatataatttaataaaataatttttaaaaatatcactaaccaattgcaaggcgcgctacctttagatggtgttaggtggtacctaatagcaatgctctttaaaaaaagtaaacttgatcaagaggattggagggattcaaacttggaaactcctcctaattgtgaggacgttatgcctatgactatgaggctatggtgacctatttcaagggttcttaaaatgcatatttggttgagttcatatgggcaaaatagtggttaatgcaaaagctaaactaccttttgtctacaaatttcaaggaaacaagatagttaaggacttaattgcaaaaattggaaacttaaggaccaaattctagatactttatctccagggactatttgtgtctaatacaaagaaaagctcaatttgaacaaaggataaagaaagaacataaatcatttgattcattcatttctagcattggaaggtgataatggagaggcaatcaaatttaagagttgtttgctaaaagacaccagtggtacctagcaccctcctatgtgtcaacattattattggtccaattaaatatcgctagccaatcgcaaagcgatatgtctagaagtactagatatcactagtatctaatagcaatgctcttacactttaacatctagagaatgagtgtatttgaagacatgtcataggtcaataacagctggacaggacccatatgaccaactaataaatctttcaacttagattatttgcttaatttgtaaacgactgccctactttcatgtgtgaaatgacaaataccaagatcatgcatgagcattgtagtgagataagatttagtaatgtaccttgaagttgaaattttcatgtgtagcaacagaaagacaagagcgacgaatatgcagcatgaaccaaggataatgtaccatgttccgaggaaatcattttttcctcctaaccagtttgatgtcgaaaagacaagcttctttttacccccgaagctgtatatgttgtaattattcattagtttcactaccacaacatcaccagcttccaaatcctcttcaattttaccatacaattttctgaagctgggaagcgcagcagtacgcatccatactataagatcttcttgcttacttagctgatagataataattatatcggaatacacccgaaatagaaattgttagatatcagttttaccataaggaaaccaatgaaaagtacagtaaaatagaggcctaaacaatgtagcaatgctcaatactcctatcctttgtatgatcatactcataccgatctatcagacccaacaaagtcatcctacttccatgaaagaacaaatcaaagctaatgtgcttctttctaaggaagaatttaacacattatacttatacttacaggtacatttgcatctaaagttccaccaccaatcaaggttccgttctgaaaattgtaggggtatacatgcttcccgaatttgtgttcttgatcactcttccatgcaatgttcttcctgttgacctttacttttgatcccccacgaagaaatgtatatgtgtcgttaaacaaactccaagctattagaccacaaggtacaaccggaaggccattacttaactcttcaggctgacaggaactagtgccattgtagcctagtccatgtaagagttggcgatcgcttctacttttgacatacctacatacaaataaagataaactgcaactgttaaagccatctcaaaactgaaatgtaagaagtaaaaagtaaccccatttgattcaagagattttgtcatgacatttaggttaaaacagttgcggatgaaggatgacaataggttcaacaaaaagacagcagtgagttatgacgggattgtatcgaagttagagaaggaataagaagagaaatcggagatgccataccttcggtgattttgatagtagttatcaagttggtagtaaatatagattggagctttcatacgcttgtcaatctgaaaaacaaaaagataaattaagatatcaataagaatgattatataaaggcataatttctgattttgagaaatctttcatacataaaaggagaaattgaatgagattctgatacggggaaaataaaacacgacctttataaaccgagtacagttcttcggtattgagttatcttttatatatgccaccttgttaattttaaattcctcaggcacacaatcagcatcataccggtccacaatttcaacaatctatggttccatagagaaataatagttcatataagtatgaatgattttaaaggtcaaaaaacaaacaggctccattttaagatattggaaatgagacttacactacgagaggctcgaagagtaatgaatccggtaggaataaaaatgacactgatcataaaaaatgtaccaataacctacagataatcaaatatcgtaagaaactgtaaagtaatgtattagagaatataacaacataaaaatgtagtatcaaattactcacccatgctggagtgaggacaggtttacaagctggaagactctgctgttgaaattgagaaatagctgcaaagtcatcatataagtaccgaaaaaagaaaagattcaatgccggcaacaatcaaaactctcaaaaaaagaaccttaccaacaatctgtgtcttgtgaaagctaaagaaagtaaaatatgattctcaagttacaacaattcaagacttagaataagaaattctaatgtcatcttcaaaaacagttactagcaaaattcataaaacaatttagaaattttatcatctggctcaattattcctcaaacaattttatcatttagaaactaaaaggtgttccaaataatgtgagagttcaattagcctacattgttataatcaaatgcaaagaaagttaccttcacgtcgtgttgatcgccgtggagttgattgagactctattgagaaagaggttgaggtattctgttcatccacatccatctattctatctagacttcaacaattcaactccacaaatgcattaatgttcttaattagcctaaagtccaaatgatacaccctgcaacagaaatatcatttcttcaattttgtgtttaaattcagttcaagattcaatcaagtaacaggattgcaaatgagacacagactcacattgctcacaaattaacagtcacaagattattatctaagtccacacattttgcttccctaagaagtagatattcttatatacataaagtttattggacgtaaaaacaagattattatctttaatcccattaactttttgatcaaataaacccctaaaaacgaacttaaaatgaatttcacgcaaaacccagatagttcattttcaagatttttagataattcagaaattcaaagactcatacataaagaaacagcaaaatagtttttttttttgccagctaaaacaagaacatggataaagaaagtaaaatgaaattgatagaaaaactgggaaattgatgaagtcgaaaatggggtgtgaaattagttacctctgaatcttgaagagtcaagaaaatgaaagatcttggagatttgcgttgttgttggtttagctctgttgataatggtgggcaaagatagattcttggttgaactaaaactgaaataagtttaatattcttagctttctgaaagaggaactgtatatgtatatgtatatgtatagatatatgatctttacagaagatattattataaatataatatagagagagagggaaagagagatagaccaaccactgatataacgagaagaatacgatagagttttgcccctaattatttcttaaaaaaaaaaattcaatcataaataataggctaattagtaatttttttcactgaactttgacatatactaaatcgtgctctctgaatttttttggccgctaaaaattctcccaaactattgagattgttaaatttaaggacttttgtctaa

SEQ ID NO: 381215 - DNA, 2782 bp, Cannabis indica
tttcatcaaaacaaaaaccaaaaataaaatggagaagaaaaaaatatacaaaattataccactgatttcactcataagacaactcatttcattggtaggaaagaaaataacaatggtaacacaagtgaatttatggaaagataaaaatttagtaacatcgcaatactactagaaaaaatgttttttttttttcaatttttttggtagtttctttcgatttttggcaatttcaaaatcgaagactaacaaagcaaagagaaagggtttataacaacaaaaggtccgcttttttttttttttgtattaaaactgaatataaaagccttgaaggtctactttgaaagttttctctttgttgtttttatgcattttacttatttttatttatataactgaagagaaagtttaaatttctaacagtatggttatactataaaatatatgatttagtaaacaaaatttgtagaaagattaattagaagaaaattaccaacccatgaaataattagattgaaaaaaggtgagatggtcaaatgaagtgatgatatatgtggcacaattaaattaatcctatctaactatacatgttctaaaccaaattgctcattgccctaaaaaactaaaaaaaaatcgtaattaaattttaaactaactttatttagttatgttatgtctaagaacatgtaaaagaaaattttggtaagttggtaggttagctttattgaatactaatgttaaataatttaaattttatatgggaggctctgctacgattttttttaaccctctaaagtcgctttttcttttttttttctaccgaatagggctcgacggccattattggccttaggtgtgcctgtggtcgggaatttttatgagtggtctggttttcttagagtatttttctcattttcctctggtggcatttttggtttttggggtccttttctctagttgaggggttgtggattcaatgcaaggttggccagcattggtttgatttgtgtggtggtcgtttgtggtgcttagtccgactttgtgggtgtggatcttgtgggctctggtagtgggtgggggtctaggcttcatctttttggtctggatcgagcgtttcgagggtcaagctatttctttcggggtttgggactatttcggtcgctttggggatctaagtatatggcaaaatggcaatctgtgtggttaatggtcggggttctgttatggtcagggtagaagttgatggttggggtgggggtttggatctagaaattcaaaaacaggaacgatcatatggggaactttagaatgtcgagtggctttgctgatattttgatgcttttaatttactactgctatcttaatcctataaatagcagtgaaaatattgtaagcatgaaacaatttcaggcttagagaaactctgtaaaattgtaattaatctcaactcaaagaaactcaaaaataatttacattcatggagtatgtaaattttaattacaaaatcacgaaaaaaaattctcctctctcattatcatatataatcaaatatatattatctattatataattaattatgggcattaattatcatgccacatttatgttaacgaaattctaagttaacaatgttgatacaccaccttgctattgttatggtaataagactttgtttattcatgacatgaaatttttgtcttatttctttttgggacgttgggaaaatctcaattggtccaaaacacattagtgtaaccaacatgtttatacttgcccatattcagatctgggagattctcagattcttattgccctatggtttatagtgtgatgatttgttacgattgttatcgctatgttggtcgtttggttatttcgttttattcttgattgaataatagtgttgttgttacccaaattttattggaagatctttggttgatactcattaaataggtgtatgacaagaatcatggggtttcatcttaaaaccaattggtaatgagtgaagtagctcatattcttatctataactaagtatttttacatttgatccatgtggaacaatagctgtccaatataccccatcaagatggtgactattttttctcactaatcttgaatcaccttatcacaaacagtgtcatttgctcgcttattcttgttcgcgattgagagtgtcattttctcgcttacaggaggttaactatctggatatgtgtggatcaaaaatcctaatatgactttgataccatgacaagaatcatggtatttcatttcaaatcaattgataatgagtggagtagctcatattcttatatatgactcaatatttttacatttgatccatgtgggacaatattgtctaataatgtgatttgtcacatgttcatttggattcgagatctagaattctttgcattttttaatgattcaacgttggcaacttattagtgttttaattgaaagtgttattagggttttcattcatgttttctgtaaagtgcattgtttgcctatattgttaattctactctttaaactatatatcatcatagactattaagggaattcagttaaatctgttattttctgctaagttgtttctcaactgctttagttttcggttgttaggattagcttttcagttgtaacagattcttgtttgatgatcactcatctttgattagtatatattgtactgaatattcccagtaatgaatcaatctttcattcccctttctcagtctttctcttcatcttttctctctattctttctttatt

SEQ ID NO: 381216 - DNA, 1866 bp, Cannabis indica
taaacaaaagtaaagttgaagaaattgaactttgtttaacataatctaaaacacaactaggcattaattaagagttacttcgctctttgaccaataaccactatttacataaagttttagtggcaaaagtaaaatccctaaattatgccaaattaattcattcctggttagtgattttacataagatcataattcatacagaacggggctaaccaaaatgtctacacttctaccattggcagtagaacttgcccaactgtgaacggtcataatcaacggtctacccaatgtcgtctcatgttgttacgaaagaagagagacaagagaaacgaattcgagagtgacacggcccttcgatcttgtgttgatgacgaagtgttccgggtatttcctgagcaacattagaaggccataccatggttttccctttgattcaggaccgggccaatcctcagatgtaagatatctccttactcgactatgatgccaaacattacgaaactgctccatcaactgaagaagagtaacattggagttaggaatcttaaaaaggttcacatgtaatgatgtaagataaagaaaaagaaacacaatgaggccataatactctcgtaaacacacaaccgaagacttagacctaacacaggatcccaagccaacaacccacagtagactccactaaaattatctcattgtggaatcttaaagcctagattttccctttcttctaggagaaatatctcaaggtagatcagaaataactacctcggctgtgaattatcactaccgataactaaactaaaggacatggaaaaagaaaatcagtaactgtgtaggtcaaaggagaaaagaaaaggtaagatggcctacagcctaatctgatttgacattaaagagagacataactaattcagcatcaacttcaagagaaaattactcccatacaaagaatttacaactctcatcaggtaggtgtaaggttagatcctttcaatttcattctattctcacaacacattcaataggaaaggatgaaagactaacctcagcatgaagtttctccataggcatccactctccaggaccacataaatcagaaagcactgtagcaacagatgacacaacatccttttcctccaactgcagaagctgttggttatcgctatctcgatcaattcttgaccttccatctcccttcttctctgcaaggaccggagatgaacgctaatgaaattgagtaaatatattgaattgattacaacactgaatattacacttaatacaccaaagagagagctgctgcaacttgtgggaaaactaaacacgaaaatgaaagcgggcaacaagtcatatgatatcctgaaaaagatccttagacatctcataagttgtttaaccataagatggacacaaaatgaacctttaaaacagtttctaaagttgatttggaacctaaatatttgtccatgtttacatccactctcgtctgttcctaatttagaaacaaagataataattctaagccacaaatgtaggttcaaaatagcaaaccttacttggttttagcaaccctctaaagcccagaatgtatatacaaactcatgatttacaaaatcatagctttcaaagtcttcttcaataagtactcgcattgattcatagtataacaaattacaaacttccaaacaacaatcacaccattacccaaaatttcaaacagataaaacatttaatcctacaacataattcaaagtgaagtgttaattatataaccatataagtaatatcccaaaaaacacatccttaatatctctagttttagtacaaaaaaaaaaaaaaaactttaccaattgctaactttctatt

SEQ ID NO: 381217 - DNA, 1772 bp, Cannabis indica
gtggaaaatatgtcataattggccttttggcataaaatttctggtgctgtataatgatatttttacttggagagatcaaaattatgcataaaaaaatacagttttattgattactgtcatttggaattttacttgccaaaacagagaaattccctatggtatcaaaattgcagcatcaaaggtttatttaagtaagaattaattacttgtgttatattaacatgatcacatagttttttagtagttttttctcatcactttcaggaatcaaattgctcttttcccttaattatgaccctgaatcaattttttagacttataactttgtaatttttttatttctatttttacattttgcccccccgaaattttctttcctgagtgtaaaaagtaaaaaggttgttggtattggtaatggttccaacctcaacctcaacatgaactctcaacttttatataattgggtgaacaacacattaatttttaataatcacttgatttgtataacaacttttactaaatagctttcataaacacacttgtcaaaaaagtataaaaaagtattctattttactaaatataaaatatataaattctctctttatacatgtctttatgtgagtaatcgtcacctgaaaaaaaaccatttttaccgaaatagaatgcatttttgtagagattaatataaatatataaatatataaattacaggtactatatcataataccggccatgataaatatgcatgttcagttataagataccatgtttcatgattaattattcccaatcaacactttttactcatcactaattagcacacaaatataattaattaaataattaactagagatttttcgaaaaatatccatatctaaatatcacatgcaactataatattttattatttcatcaaaccgtcctaattctgttccatgaattaggaactaaaattcactataccccaaatctagtaagtactataaaatcagaaagaaaaaaaatatttagtagtactatttcctaattaaagtctcatcattaaacccaaaatttcttattttggtgtatatttaatttatgttatattttttttatataaattataatgaatatatgcacaccttctaatgatcaatgcagatggatcaaggttgtgtccccatttttgtcatcatattgatatgattacatccatatatatatatattaattaattcatattcatatatacatttttgataataattagatcattaagttcatttcatgatcataattaattaaaccttttttgagagaacaattagtagcaatcattagtacgtagtttccactttactattcatataattaattaattaatttatttgattatgactgaataattattaatttgtttgcgcatgcaattaataattcagctttcacatatctatatattatacattaattattcctcaaaagaaaaaagcatgcatgtgcataaatatataaaatttttacattttaattattattaatttatattactccaagtacatgcacttaattagcattatatacttgtaaaaaaattaatttattaatacttaaattattttttcatgtgtacttaataattatatagttactatgttattacacaaaacgctaattaattattagtaatatataaatatattattacatttaattatcatctatacatttaactaatttcaaaaaaaaaaaaaaaacaaaaacaaaaaaataataataataataaga

SEQ ID NO: 381218 - DNA, 1764 bp, Cannabis indica
cggtacgttggtgggggtggggatttgaatgaaattcttcatcagtatgagaagagtggtgggccagtttgggctcaaaggtgtattgacaatttctagtgaactctttctaaaattggtcttgttgacttgggatttgagggtacccgctttacatggtgtaataagcattcaaatggctctttgctacaagaacgcctggaccggatggtgttagttctaattatgtttccatactctattattgttactcacttgaagctttggggttctgatcatcgtcctttattaactcgtattttccaagctaatgacggtcatcaattacctaaggctaagtcgcatttttattttgagtggcatgggcagatgagtttgattatcgcgaactagtgcctggtacttggaactctggaagtggtcacaggataaatggtgttcaagataatattcgccaagccatttctattcttaagggttggaatagggatgtgtataagcgaacgcttggtgctataaaaagaaaaaatatgaattggcgcatttagatactgggtggcattttaatcaacagaaagataaagagattgatgtgcttatgtataaagatgagaagtattgggcatcactggctaagaattcttggatgatgctgggtgataaaaattcagctttctttcaccagagtgcttctcatcggaaaaagatgaacttgattcgtggtattttttatcacaactcggtatgggttgaggaaccttctcgtatagccatagtttttgagcaatattttgggtctctctttacttcccatcaaccttcattggatactataaatcatgtgttgaattctgttcaatctcgagttactaacaatttgaataatattttgatgaggccctttattgaagccgatgttagaaaggccttatttcagatgcatcctagtaaaattccaagcaaagatggcatgggtgctggtttttatcaaaaattttaggatattgtgggttccgatgtgtgtcgtgcttgccttggtttcattgatgggtctagttcggcggtatctattaatgagactatcatcacactaattgccaaggttaaatcaccaactttgactagtaatttcaggcctattagcctaatgtgctatacaagattgttgctaagatgattactaatagtctacatgaagttttgaatgatattatctctgaagaacaaagtgcctttattcttggtaggcttatttctgacaatgcgcctatgattgggtttgagtgtcttaatactatcaaaagacataagaagggtcagaaaggattctagtttaatatctaagaaaaatattctaaattaagttggtctgaaattagtgaaattaattaaaattaatttttaacttaagtatattttttatttaattaaatattagaaaaaatacaaattagttttctagaaatagcttatctataatttatatctttaaactaagtgtgtttttgcaaattaattttaaaataatataataaaaaattaattttcatttattttaaaattaattatgttgctaataaattttaattaggttaaactaatataattagcctaagacaatcatttaaataaagcaaatgggtcttcacagttggagtagttcatgtgagagaggattgagttcggtttgtcgtacccactactataaccttaaataaataattgttatgaattgaataaactcaatactaattgggcttaaat

SEQ ID NO: 381219 - DNA, 4480 bp, Cannabis indica
ggagtgtaatttgtcaaactaattacatgaaagtgtaaaatttagatgggtagagctaaaattatggtgttattttcatggattttaatggttatggaggatttaggtcttgctaagtaataaattgttttccttgtagataggtgagattccaaagttgacatctggatgtacggagttcgttgaatctgcagagcagattttggaaaagaggaagatgaaccaaattttgctagcaaatcacagtactttgcttgacttacttgaaattcctcaacttatggacacgtatgtatcttactatattgttaggattttatgttgaagttaaatagtttactttttttatggggatcctaatgaaatataatgacatttctatttgttcaaagcttcaatgtactcctttttctagttattatgtcaactatgtggattttatttttcatagatagacaatctactactgaatctgattagtgaatataatcttagttggtatttcttagaaagtcggtttgtaaaaccaattagataaagcctgatcggagaactaggtagtgaattttaaggaatatatggtcaataatttttctttttttacttcttttacaatcaaatgagtagtttagttttttcgtatgcttttttcagaagccagtttcctgtgcagctttccatttcgtgtttagctgtatatgctcattgattattggtagattatgatgaatcaataaattacttgaattcactccttattattctatttctttctttaggtttcctctattaatttacttccatctttattaattcttttctaattgctgtctgagcttcctaagttcttattctcgctcaatcttactatgaattctttgtattttctctcttgatttacaataatttttatccaaccttggcattttctttctgcctttcaccgaaaaaaaaaaaattctcaacccttattttttcttactaatgccactaagcatgggaaatttttctcaatttcgtaagaaggcatttttgaattttctagtgagtttagcatctcgtttaatagaagcattattgttatctcccccctttttcagatgtgtaaggaatgggaactttgatgaagctcttgacttggaagcatttgttgcaaaactttcaactatgcaccccaagtgagttgttcttgttcatgttattcttgtacgagttgtcaacttgaccataacatgaggcttactcctctctctctatcctccttttgtccctcatagcttaccagttattcaggcactggctgcagaagtaagacatatcactcagtctcttctttctcagcttcttcagaaacttcgttctaacattcaggtatgatcaaattataagagcatacaagcaaattgttccattcatctaagcatgcagtttaggagtttatgcatcgttctggatgtataactttatttcttgcagttaccagagtgtttacggattattggatacttgcgtcgagttggagtcttcagtgagtatgaaatgcgtttgcaggtatgactataattgatatatgttttttgaaggcacaatttcagtacatatttggtggtgataagtgtgtgacatgcatgtttattgtttttgggtattaagattggtcacatcacatgctcttctagccacgttttttttaaaagattttatctggcaaatatttcttcagttcctgaggtgccgggaggcatggcttactggaatactggaggatctggatcaaagaaatgcttatgagtatttaaagggaatgataaactgccatcggatgcatctctttgatgttgttaatcagtaccgagcaatatttgctgatgacacatcaggaagtgaagaaaactatgatggggggcttctctttagttgggccatgcatcagatcacctcacacctcaagactcttaagttcatgctcccaaagataactgaaggaggatctctgtcaaatatattggatcaatgcatggtgagcatcttctttcgagtcattttctacatgcgcggattttttgatggaaagtacatattactacaagaaaatatgtcaatgtagttatgttaatagtttttatcttttaaacttactgtaggtgcacgtatgtatgtaatatatttataataacattatttgatcattctgctacaaaatagtatttatgttgacattgttagttttttttattaccatcagtattgtgcgatgggccttggttgggttggactagattttcgaggcttgcttccatctctttttgaagagtaggtttcttacctttttctcacttccttttggttcattttcttaagatgggggtgtatctttcacccctatattgtcttaaaagtacatttcctattctaaacatcaagtttggttgcattgcagggcagtgctcaacttattttcgaaaaatatgagtacagcagttgagaactttcaggtaactagacagtggtaaaatttcaaatttgttttagtataaatatcaagtatacagatcagtattgaatcacaaagatgacttcatattgttttatatgaactgatctaaatattaattgttctgttactccagttagtcttggattcccatcgttgggtccctttaccaacagttggctttccggtaagtagttcgggtgaagatactcaggatgaggtttctccaccatcttatcttatggagcatccaccacttgctgtttttgtcaatggtaaattcaatatttcttctcagctgtgtctatgtattgtcaatatggatctcttttgtcaatggtatttgtttcttatgttgctgtattattttggtaactcgtaacaaaagtaggaatcgatggctgatgattgagtataaaaatgaagttaatctttttccactgcttatgcaaaagaaaacaattgattcctaagccataggagataaacaagatattatagtattaacctgaaatggaaaaatggtttctctgtttattaattttgtcgcaactccatggatgaagaggattgattgaatttactattctctctgtgttttgcaacaggtgtatctgcagcaatgaacgaattacgcccttgtgccccaataagtttgaagcatgtgcttgcccaggaattaatcaagggattgcaaactgtttccgactctttgttgaggtacaatacaactcggatgcttagagaaaacgaatccggacttttcctctcactttgccgggcctttattgaggtactcctgcctaaatgactaatttttatttacacttcgtgtatctatttcttatttctttgtttgattgcaatttaaaatatcggaatgaccttccaatagaatgcttttcttttttttactaaaatgacatttccttgcataatgagataaaattatttatttatttatttatattaaactttattctgtattcttattctaaataaaccattacttcatacttcattaggttgtttacccacattgtgcgacatgcttcagccgttgttaccctggtggagctgctctcatcatggatgcaaagagtttatacgaaggagttggccggcttcttacagtttcttcgtcaagagaactcccgaaacccgttatcagtaatggagaagaggagaaaagcacaacagagaatggcaaattgccttcagccgaaaatggaactacttctgctgaaaaaactggggatgataatgatgatgataccgatcgaaaagagcagaaaagcccgacttcacaaacagatgtgtgaagaagcagagtccctcagaagaagttgttgattcaatgttgctgttataactcactaagaaaaagaagaaaaaatgaagtcgattgttttagtagttggctgtgattcataacaagttacatatcaaagtaacaaaaagcaatttttgctggaaaagaaagaaagaaagaaaaaaccaataaaaagagggaaatttgattgtagttaataacacaattttgtttatttgtaatataatagagatttttgttcaccaaaataattatggtgtcttgtaatgggtaagtcagagagagagagagctatatatgcctataacgattggggaagagaacacttgaattatatttgcttgaccaaatagaaatttgattcattttgcaaaacaggttctgaattgtgaatttttcacgaaaaagaaaatggtggtttttaaacaaaagtaatatttaagacattttgtaaaaaatgatataactttgatgaatggtctttgattgtaacaaaataacttagtcacttcaaaaataaataataaagttaggttagttggcgacaactctaatgaattttttgtactttacttaagaaatggtagtgaaaatattttagttgtttttttatttatttttttttaaattaaaataagcgtattcgttccatt

SEQ ID NO: 381220 - DNA, 1561 bp, Cannabis indica
tatttatgaaataataatcccaatgtaataagaacgcattttttttaatgtttttgaaatgatggacaatttttcaaaccaataggtttaattattttatttttaagctaattataatggatagatggtgtgtatgttagtttccctagaattggcggcatggaatatctttttttaaaaaacaatgacttgaattaatgttggttgaggaggaaaatattcagtcaattcaaacttgaaaagaaatgagtactacatgtttaagttgagaacataaaaaaaaaatcacaaaaagccaataacataatgcttgttaatttgcggcgcatttagatttcttaaaatatatatcatgtgatattttattttttgataataatatgatgtattattttataaatttaaattatctctatttatcaatcttttccaaagaatgttcaagtaattacaattgtatagaatatttggaattttccaaaatttattagagagttataaactacattgtaccatcatataatatgttatttttttatatatatgccgacaagctattgcgatacatattttttaatattgtaataatgttatacatataagggtttaatagtgaataaattattcaaattttcttgaaaactagtaagctccctacgtactatataataactataataatatacattgttatatttttatgtaaaaatatattttttacatattaaaattcagaaaaagttaattctcactaataagtgtaaatactctaatttataaataattatgaattaatggatttagattattcggctcctcacataggctaccaacaagagtactgttggcacaaggtagttaattaatttcatattaggtagaaaacaatattatgttaaaaattaagctaagttaagttaatttcgtacgtatttgtttgtattatattatattatattaaactaaattatatattatataatattaggttaaatttaatttatattaaagtattttatatttatatattatttaaaaatattatataaaatataatttaatataatatctacagtgtatcaaatcaaccgttaatgttataaatttgtattagaagtctaataatatatagtactttaattgtttctaactcaaatatacaaagtgattattatattaatatgaatcaaacacacatatatagacgcgccaagtactatatatcaattctgtttcaaaaaaaaaaaaaggtatatatatcaattaataagagaatattattgttggttttagacagtacctacatgttaattaaagacataacctttataattaactattcaaatcagtacataagatcctatacaccttaattgttcatccctaaatggtgtacaaaagaatgaataaaaaaaaaaactaaagacaaattaatattaagaaatggtaaggcattacaaatgataacgtcatgtttgattattatatatctcaatcttaatctagacagcctagcagatagtgttcatattaatttaatatgatacatatgcatacactt

SEQ ID NO: 381221 - DNA, 3819 bp, Cannabis indica
taaattatatatattacaatttcaaatttaggaaatattactccattatacttaattttttaacttttttttttttttataaatttatggttttgggttctcatgaggttggtttttccggtaatttctatatgggttgttatacgaatttcggttgcaatttgaattgccctgttagttgcaatagggatttttacatagaattccataaaaatgaaaagaaaaaaaacggttttaaaatgtaaaaataaaaaacccctttaaattttgtcttaatatgtaaaatacgtttatattttatgcatgtaatttttagaatgtgagaagaaagaaaaaaaaaatgaatatattattagaagaacaaaccaggtgcaaataagtgttgaatcctatatattttagtattaaatcatgttggtgatgagtttttagtccttaccattgtatatatttacttaaaccattaaattataaaataataataaataaaaaataaaaatgctagaaggttttagtgcctaataagaatgattaaactaaaatatattatgatgaaattataagatcacactgaccattgtttgtcaaaccataagcactagtggagagagtggtagtgaccaactttgcacccgtgcatttcccattagcatcatccaatgattcctgattgtcctctgttattataatatatatacataattattattatacacatatcataataacctatatatatatatatatagccatttcaacaatataattaattaatgaattaattaacctgtggttctgataagcgcaagtgctagagaagaggtggggcggaatgggatgaagtcgtataaaccatcgccagaagtattggaagaaactctgtcatccactcgatacactgccttttcctgacttgggtaccatattatatcaccaaactcgtgttttctcccaaaactaatcacttcgtctcctaaatcagagtcgttcttttttatatacgtaattgatcttttaaatagaggctcaagtttaaatgtcacctgtagtcaaatcgataccccaagtaatttgtttaattgataactataagataagatcacaacttaagaggagatacaaaatcacataagttttttgaaactgtgtcctacgaaaatgtcaactgtctaaaatatcacgcgtaaatatggatttttaccccctttacgaatgttttcatggtctaataattcaattcagtcaacagggtatataagcattatttgagcccgcaaaagtttctggagtttgtccatttgtattttatttcaacttaataattatatagttttgtccttacaaaaaagatatttagttttgttttctagattttattcacatgttcaccttgcgttatattaggatccaagtctctcaaatattctggcttaattcgatttagagccaacaatttttcaatgatgcgtacaagttcaggcaagtatttaaggtcagatcacaacaaattaatacagtgatcttttattataagggaagtttaattgctaactgaaaattgactgggaataaaatcaaataaagtagcttagaataattagttaatgaacaagactaatctgtaactttttctgataatcattttttttttttggttcaacaattttcatttaatagaaaccgtgtgtataattttagaaacttacccaaaacgaaaatgaacataaataacttaaataaaaaacaatccaattaccagaaaaaacccaattattgcttacacagcttgctttgacaataaaatacccatatataacttgcattcaattcaatcatttatatataacagtatatatctatttgtatatatatctctgtttgtacgtgactatctaatttagtcccaaactgcaccaaccctgccccccaaaaataaaataaataataaaaataagagcatttgccatataccccatgtcggtaccgtgatttctaatacttattttgatttgtataatttagaagtgattttaagcccctaactcaatacaccctatagttaaattaatattgtgtttcacatatttaaatttaaagaaatatatattaaaaaaacaattaaaatatatacgaatatgcttatcctatatgtcttaagacatacctgagagataaccccaagaacaccaagtgaaaccttggctgcgttcaattcttcatcaccctccttgagcctcctgactttgacaaatccatcgacagaactgcctggactgacgatggtaagccccgtgacatagtcatgcaccgagcttcctttgccccacaatgtgcttccatgtgcgcccgtgcccatcatgcctccaatggttaggccccaccaatagggcgcgtaaggcaaagcaagtttggcctttgcagcctcacttatgaggtctctaagcgtcacaccactctcaaccgtcatagtcatcgctcccgggtcgatgttgagcaccttattaagattcttagtgcttataagaagcccctcttctcggccgcccccgggacaaaccagcttgggaatgctgtgtgagaaccgggtggcggccttcattttcaatccatctttcgtagcgtttgctacgatcgagacgagctcttcctccgtggtagggtaggccgtggcgcttgctcggcatacactgcggtcagggaaggctccgtaggagttggtgatggtgcagtttgagttgcctgtggaacacttgatggggtcttcgggaggagtacaacaaaccaccatgagtagtaacattagacagtttaatcggagtacttgttgtcctgacatggatctttggagctgataaccaattcgcattaatctttgattggtcctatccttagtgtagaaataattaacgaaagaagttatatataaatatggaaaaaaaaaaaaggtctctctgcaaaagaataatgataattgtcaatatatgtctcagtgtgatctgcacaactttttttctatttcttctgaaaggagagatatgaggatttcatattttacttgtttgatatatatcgtgtatagtataagcaatataatatataaaatatatataattgtcaataaattaaaataatggagcgctataatgtagcactcgtttttgccatttaaattggtaaataacaggtgaaaataatgataacctgttacacacatcacaaagcgtacaatagtcattatgaaaggaaaaacaaaacatataataattcatcatatttcatatatatatgttaaataaataattagagggatgtgagacagtgagagaactgaggactagaagagaagagtgtgaaggtacattaacgttatttttatctttatatcattatattaaagttttcctaaaaaatcaactattttagtgaaattttttttagttataatataatttttttttttaactaaatatgatttttagtcacaacaaaaaattacttatgactaaaatatagtatttaactacaagttgtcactaatttatttttaatcacaacaagtatctaaaaatacatttagtcaaaacaaattataatttttatgactaatacttttagagacggaatttttaatcacaacataagaatgattaattataattaattgcaattttttttacttttagtcataaattttgttgtggataaaagtaagattttattgtagtgtttggctatttattattgttacctaaatggtttaatttttgttattttttttttttaaattaacagttagttaaataaataaattaataaatt

SEQ ID NO: 381222 - DNA, 1632 bp, Cannabis indica
gcatcacttcttattaacattaggtaccactagtacctaataagtaaaattttaataaaattattagtaacttcacacatagaaaagaaaaaactcttacaagagtgttcgatttattaaaaaaaaaaagtatatgggaaaattagattatttataaaagaattattgttgaaatttttagaaactgattataagaagtattaagctaaagaagaagtaaaatataaataaacacaattttttttcttacgtggttggaatcttaatccatgtgttaatattagtatattgttaatggtgtcttttacacaatttttgacagagttttctctctgtaaatacaagatttttgatcccctttaataatgaaggtgatgctatatttgtaggcaaccatgcatagtgagttgggttaatcaaggccaatagggtttttctagaatttgagcccactgatggggtattaacattttgtgtgagattgggtctaaggtttaaggcctaatgccaaaagtggtaggtgtgggacactattgaatgtattgttgagagtttatgtgttagtatatgtgtggtctttggtgcatggagaaacgacaatgtcaaagtagtggtcgtttcattcctaggttgatcgtaccttttagtcagacctctcctttagataagacaaatgagacattccacagatttagtgggatcttatcatagggatgccacgtaagatatttgcccgaaaggcaatgcaagatatcctgagacccatgaggtcccgccaagttgttatgtgtacccaagtagttgtttcgtgattagatacttagctgtagcgaattagaaagatgtcagctatatgtccttctttttgaggaaattacattctatattcactttactttatttgttttaatttttaccttcatttacatatttttttaaatatacccacttttatagatgatgtccctattagacctcttatgttatgtaaattatatgctatacttaagtagagagtgggggtatattaggcaatccactcaaaaaagtgggtatattttaataaaaaaaaataatatgagggtatttttgattaatggatacaaaaaagaggtatttttcaacttatctccttctttttagggctagagcccaggagtagaagtcgtgtttgacttcctcggccctccctgcagctcgagagagagagagagagagagaggtcgagtgagttattatgttgggaatgagggtaagtccaaacttggtaaatttctaatttccttgacctaggactatatatatagcgatcattagtttgggaccttccgtttcttaggatgtagagaatgggcttgggcccatcttcttctcttaagcccatgatggaaaatgttgaataggggtgagtaacgatcgtttggtcggtttttttttttaaaaaaaagtagaatttcttatttcaattttcatgattataatttgaaaactagccgaatattatataaacgtaaaaaaactgaccattttaattcacggtgtggtcggtttaaattgaccaaactgagcttcatcttttttttttaaaaaaaaaataagtttaaatttgctataattatttggaaactaaaa

SEQ ID NO: 381223 - DNA, 2526 bp, Cannabis indica
ttttttttttttttggaaaaagaaaacaaatttgtaaagtcaacaaattttttttgtagaaatgatcaaaaactataattatgtaattttttatgtatcactttaattggccttaaatttatatttattattacaatgcaagtgaaattactataaattacaatatgtattcattacatacatatctttttaaataatttagataataaattttatgtaagggaataaacacataccaagaaacatgcccatattgattttgttcgataaaggtttgtactttatacaaaaatctttaaaaaagaaaaatgagtaagtttgtttcggtacttaagaaaattttttaattaatttttttttaatgatcatatatattatagttatttaaaaatacagtaaatttttagaaaatttcgaatagtttacaatggcgaaaataaaatttacatattttattatagcgcgattattttttcttaaacatatagtaagtaactgtttaaattttatttttaatattataaattatttagaatttttttgaaaatttatacgtgattttaaataaaaaatctattagaaaaactcgagattcactaaagaaatttttaaatttgtataaaaaattgctaaaaggctatctaacactctttttagtgtcatattgatattagtatattaagtattaaatatgatataacttaaaaaaaaataaatttttaaaagatataaacctaataatcatgctcatctataagatatttacatagcattatataatttatttcttaaaaaaagaataaaatgagaaacatttctttataattttaaacttagtaacgggtctctcgagacactaaagaagaaaaaggagacaactttgattgaatataaaagaaaaagacagtttcttttttcaaaatttcaaaactttcttttcttcgaaatacatacatatatatacattaaaaatttagtcttgtgatatattgtataaaagggttgatttatatttatacacagaaaaaagttcagtgattatctcaacccaactctgtctttttccttttctttctctctcttctttgtttggctcctagtaatagtattacactcatctttcttcatcaagtcctggattttggtcaggaatctgttacccttttcttatcccaactttcattttgaagggtttcctttgttttctcctgatacgctcaactgaaatgaaagttttgatttttacttttgtttaatgagtttttagagatatgggttatttgaagtatgagatgatgttcttcttcttcattggtttggtgttgattttcaaggctccattttgtaatggactgactgacccaggagatggtaaagtactgttattgttttttttgtttgtttcttgggaaagtttacatttttataagtgaaaattgtttgttttgtagttgtggctatgaataacttgtacatttctttaggctatcctcctcttagaggatggcttcttgttggtggagacccatgtggtgaaaattgggaaggagttgaatgtgttttctcaaatataacatcaatgtaagatttttgagttttgattatatgttttataagatggttttggtttttcattggttggtattgtttgattttactttcttgtgttgtgtttacagaaatcttagcaatgctaatttgggaggtgaattgggtgatagcttgcaattccttggctcagttatacatttgtaaggaaccattaatgttttgtgatataattttcttctttaatgtttttaattagtgtctaatcttagttgatatgtgtccaagcatggattttgtttagaataaataatattttttttcctcggtgctattaattaagtttaatttcatgtacatataaattaagagtgtatgtggaatagtttggtcggtttatgttacatattattcaatctaatgtaaaaattgagttacaaaaatataagtacaacccgctcaatcaagaaaaaagtaattaataacctgtctaatgaaattggtcggtttgatcgggttaatccacccaaaccgacaattaatgttctattttttttacattcaattattatattttaattaattgtaataataatacaaatatatataaactgattttaaaatatgtatgtatgtaaatagtatgatatataactatatataataaaatatatatataaaatcctcgtaatcgggttggttaatttagttcgggttaattgagctggttggtattattttcaaccgctcaaaattaaaaattgagcggattacatttttgtcgagttattcaatttgcattattcattggagttatctttatttagtttaagcgggttattaggttatattacttaagttatatttttggaacttcagtagatatttaacttttaagtgtcaagccagtgaccacatgacaatcaagtcattaaatttttattttttatttaaaaattcatttaaatataccaataa

SEQ ID NO: 381224 - DNA, 1838 bp, Cannabis indica
tattgcaatactcgacaatcaacgggtctgaatttcctttctctttaattttttgttccgtaggtcctagtaacaagttcaaccccgtcactaatgcaaactcgacctgactgaatctgcatctcttctttccaaaaaaaaaaggtgcacctcgtttggcttcttagatttgatcttgtgcatgaataactaatggatcaatgctctagaaaaatttatcggattcctctcgaagaattgttaaaaaggagtttcattcactttgtcccataattggaattcgtcaaattttaccttgatcttcggatagtaataatttccaccacgccaagtgacacagcctgtgtaatgctctgagactggaattataagacgtggctgtcttgtattctagaaaaatgacacaagaaaatacaagttagaaatcctgctgcaaactatcggaccaatatcagacatctatcgaacctatatcggaccaaaatcgtaaatcaaatttattaaaaaaagctattgcagattgggcaagcatcggaccccatcggacacactgtcggacatgtacatctcataaaatgcaaaaaagcatcggaccccatcgaacacactgtcagactgaagtgaacctcgtaacacacaaactcggacacttatcgggctccatcggacctaacacaaagagttagtatcggaccatcggaccttacccatcggacttatatcggattctatcggacctatatcggacctttatcttcaaccttgatttatctatcaaactcacccccatcgaacctatatcagccctctaggacaccatcgggcctaactctatcttgcagtttgaacagacgaaccaaaaaaatcccaaatctaatcaaactcacacatatcacagataaaatatatcctaaaccaatgaataattaaatgcaaaaataaactaatgcatgaatttttaaaagagggatttgaaaagttaccttagaaatctgtgcggttatggccgatatttgtgggtactgacgtgggtctcctccttgtggttgtgggttctcatggtgggtgtggttggcgtttgggaggatttgggttgcgactagaagttcgggcgaaggcagagagaatagagggaaggagagagaacgggtgtgggattttgagagggttagttttgcgatttaggtaaaatgtgcctattctaacaattacctatagttttagttttgctaatcaattaacccttaaaacatgcataaaaaaaatcaaaatttcctttaaaaattcatcccagatatagtttataataatatattttattaatatatattttatagtctatattttaataatatatatattctatagtgtatacataaagtttcatattttatcctaatgaaataattatataatttcttactaactttatttttgaaaaaatcttacagagtttgtaagtgtgtgaattttctaaataaaaataaaataattctctagttcgtcattgctcccacaattagtattgtttttgttaataaatgtgatatttggtaatgtttttattttttaattttttaatcacaaaatgaaagtaaaatttttatttttgaaaaacaaaaatgcattatgtaaccactgtgttctatgaaatttattttataattattttttaattttatttaagtctggtctaggtccagggttgaatttgggtttgggtcagaagtcgagttcagcactaggttcttgggggatttaggtctgggtctggttggagtttaaaatattgattaagaaaaaaaattatttaaaaaatattaagagtgatttttttt

SEQ ID NO: 381225 - DNA, 3317 bp, Cannabis indica
atgctaattgtactatttaatttgaattggctacctgcaatttgatcatgtttccttctttcaaaatccacgacactcgagtactgaactaattatgagcaagcctaatttctcaaattcatttcttgcgtaactcattcatctgagcattcaaaaattccaatagtcgtcgcgattgttttagttctctcctcgagaccttaagctcaacaatgagatgatttgctttcaatagatgcaaaattgaatatgttacacagaaaagcacaaggaagtttcaaaaagagaaatactaataccattcaccaccatcaatcaaaataggtggttacaaacaaatattactgaaaaacttgggtaagttatgctgtaatctatagattaaacatttgatctctttctccatttggtctctattcaagtgtggaatcttccttttgcttttttgatgcttgctccctctcctcagcatttttcgatttcgcttctcggcgttctctcttaactccctttgctttgtaaggtaaagcagtctccccaacctaaatccccaaatttggaaatatattatagagttaaaaatctaacatgcccatggatggaattaataacaaaaaggaaaataactatataattagagattagaaccaccccttcttaccttttgatctggaatgtatacttttccaatctttccttcaataatatcttcgctaacattcttaacctgccggtataaaaataacaatcaattacaatgctgtttcgtgtgcaggaaaacaaagagactgaaagtgagatgaggaattgagcaatcaaaccttcttcttagcctggtctttgagtgttctcatagcttctttcttaaggccttcattaggtagacgatgtcgacgaactacaaaatccatggatgggccaatttctataagttccattcttggtaccactgtcccagatttttttagccgtagagcacagtgagtaagaaacactttatttgaagatgtagctgtacacacatatgcacggtctattccagcaatatttatgttttcaataacctgagcataattgaagtcaatatataactttctcaaaactgaaatgaaaatgaaaatgaaaaacttgagtgcattggacttgaaaaaagtacctctcctcgtaataaatcaagcaatacttcctttaaatgtctcaactcctcaacgctatcaaatccttctccgataaaagcaataaatggttttgaccctgcctttggagctagtttggcatcatacttgaatgattccacaggcttgaaattttcaactccaacctccataagatcatatatgtggtgatcgtagaatctaccaagtacaagattgtcaggtcgcttctttgagtgagaaccaaactgcaaatacaagcaatgaaggaaattcatataataaaatttataaaagtgaaaggaacccagaacattactccaaaataaaatagtcaaataaatcttctgtatagatcataatattgccgtgaggggtttaatgtctcgttggaaaattcaaaagaaacacaataaaaatcatgccttctaacacattcactcaaatgtatacttttaaactaaaagctcttagatagccaggtattcagcaaaaaaaatatccaagtgccattaagatgctaaaagagcaaacttcaacatgagtttttggttttaaagattatgtaataagttcaactgtcaaatttgcatgaaggcaaaaccaaacaattggtatcaaaacaattacttgaaacacaactctgcttgctacaggcatcatacaaaaatgctcccaagaaacattcactccgcccccatgaagctgttaagatttgcagctaagctcccagttaattaaggcatgattgcatgagaaactcaaaagaaaaaccttttaagctcgaaaagatatattaatctgtcaactgatgcacaagtataccaatgccttctaagacaacttttcaaccaaatgagtcctcacaatgtgtattgtgtactagacagaaataaatgaacttaggagttcagttggtctatggaaggacatgcctaggctcccccacatctaacctctacatgcctaaccattttgaactacctctaattggttaatgggtgtatgggcttacactaatagctcttaggtagctaaagagatcaaggagtttttcctctacaacatagtattgaactatactgatccgcagtaatagacaatggcaaacaaataagagagaaaaaaatcactaagataattcctgctaactttttctacttaccacaaacatgccacagtcagttttctgagagaaaaactcgagtgcagtttcaccaccgctttcaaagggcctaacttctccattcttgcggctaaacctcactgaactttccttcttcaaatgataaatttgagtcaacacagaattcaatactccactagtctttgaaccatgaagtatcaaagtcttctttcctgtctcaacctgtaagatcacaatcaaaaaattaaacaaataaataaactcaatgaaaacacagtttagaaaaatattatagagcattgcccaatgcccacgtgatttggtctccgggtgattaattttccgggaaaacaaactgaggcccaatggaaatgtagggaaacagagattaaatggaacatacgagtttaggagcacgtttctcaagctctctcctagcttttcctttcttgggggtcttcaatttcatcatgattaactataaaaaccagttgatcggtaagatgtataaatatataaattttatgtaagaatgcacaaaatgaagtaataaaggcaaaggagagattgagattgagaataccagctgcggagtgagatattggagcaaagacagagggttttggtagctagggtttttctgctccaagaaggtgattgatgacaaaagaacctgaaacaagggtttagtggcccttttatttattggacttgggctttactatttgggtctatgcttcggcccttttactttctggacttgggcttttcttggatcatgacaaatttcagtattccgaaaatttggggtaaattgaaacatacctcttttatttattaattaactaaatttaccgctaaatatatttacttaaaacatacctcttttttatatgtattgtacccaaaataccctaagataaaggagtcacatggagagtatcatgaaatgacaagggtaaaattggtacaatattaaaaaaaaaaatgatagactttaaaaaagagggtaaaaa

SEQ ID NO: 381226 - DNA, 1986 bp, Cannabis indica
tttgagatagatttattttttatctgctattgggttatgctattttttttaactttgaggaaaatttgtcttttatcttttataaattatgaaagcataataaatatttgtgacaatatttttttttttaaaagaaaggatagttttattaaagcaaatcatctataatgatagcttgcaaatctgtagggacaagtcccttactataactacgatctgggtataaacaagtatgcctagccaatgttatgcctgctggtactgtcactgatctgcggtgagaacttgcaagtactaatacaattaaagtcaacgtgaatgcatcaatttttgctttagacaagaagattattagattcaggtggttggctagtagagaccatgagagtagagtgctctttgcttctgcaatgatgcagcagtcttcaattgatccttctatggttgaagcaattggcctcaaagaagttttgagctagctagttgaaaactactaatttcccttaagttgtgttggaatcaaattatcaagtgcttgtgttcttcataacaaagtaactaatttccttttatggttgaagtaattggcctcaaagaagctttgagctagctagttgaaaactactaatttccctttatgtcttccccttttggtttacttgttgcggattgtaatgttcttctcaataagttaaggaatatttctctttattttgtgagaatattggtttaatttaaatttattttttttttaattattttaaatttttattttgccttaatagatatttgatgggtttcccataatcaatgtgtatttttttacctgcatgctggttattaaacgtggatggaatggagatgagagcataaataagtagcaagaatggggtaagaatcgcattccatgtacattaattgcctaacttccatctctactaataatttggctgattaattataccatgtgatcggatttattactttgtatttttgtaattgttatggtgactgagataagaatggacgattaatccattgtctgatccaatcagggaatgagatttggaaatatgagcaaacatatttattatatagggggagcttttttggtgaaagttagtgtaggaatattttctatttttggcagagaaattatattctaattattttatatgatgatgtacatcatatagtagacattctgtacattgaataatttagggtataaaaaataaagatgaaaatagttagttgtatacttataaaacaaaacagacacgcatacaactaactatttgaattatacttattatttttattatcttaattaaattatattatattataaatgacacgcatataattggtggaaatatttctcgaccctaaggctatgttttgtgggagggagggggcagtgccggccctgaaacaaagtgggccacaggaaaaaaaaaattatttttgggccctcattttagaaaaatgtggtatttttgaaaatcactaaaaaaatatataattttaaaagggaaaataaatttttgggcccccgggctaggtaggccctaggcacaggcctaggcccgcctatgcccaaggccaggcctgggagggagagtaggatgaatggagaggttagagaggatgggtagtaagagggatggagaggatggagaaaaaattgattagtaaaattaggtgtgaagtgggaaggatggagaaaaaattgattagtaaaattataaaattatccttttaaaaataattttttgtttttttaagggtagctattgtattttacaaaatatattgtttttttatacaatccttccaaatttggaaggattaaattttgaaggtttggagggagaatgtctccctctcactactacaaaaacaccctttagaggcggtttttaagccctttaggcgtcggttttcgcgaaattcgctaccgacgcctatcagggcgacggtaaa

SEQ ID NO: 381227 - DNA, 1982 bp, Cannabis indica
caagaacgtcaaagaacaatcggaaaccgaaatatcacccctcttacagctgctgctgtaactaaacccaatgatacaccaaatgacagcactcctgcagcaaactttacttccaagaacaaaaagatgcgccccacttgttctaattgccaaaaacctggacatctaagggataaatgctattttctaattggattccccctggctatggcaaccgaagaacaaccgattccaatattaaaggaaaaagcaaagatactgcagttgctacatctcggccaaatcctcacacaatgcaagcctccacttcactctctgattcacatccacctcaattgactactgaacaatgccagcagatcatatccatgctcactcaacagctgcaaccatccacctcaactcttgaaaccaatgctgctgtcacaaatttttctggtaatgtcagcccctttccctataatttttggatcattgatagtggtgcaacgcaccatgtctgttgtgacattagatgtttttccttttttgttaacaaaccacatgctgctgctgtaactttacctaatggacactctgtgaaaattgaaaaagtcggtactgtcatcatcaattctaaactaatattaaccaatgtcttgtttgtaccgcaatttcatttcaatcttttctctattagttcctttcttaatgcaaacaatcacattatacaattcacatctaacaaatgcattgtccaggaactctctcagacattgaagattgggattgctagccgatttggtaatctgtattacattcagcaagaaatcactcccaatccacaatgcaatgctgccacttccactacacagatgaacaacaataaatggcactcacgtctaggccatccatctgtcatcatcacaaataaactcaataaactgctcaattgtaattctactttacctcatcatttccattgtaaaatttgtcactttgcaaaacataaaaagctgccatttacttctcataccagctttgcaaatgacatatttgatcttgtacacatggatatttggggtccttaccctcttgattcaattgaaggatataggtattttttaacaattgttgatgaccattctcgttttacatgggtttatttacttaaaacaaaatctgatgcttctaatcacatcagaaatttctttacttttgtcaatgtccattataataaaaagattaaagccataaggactgacaatgctaaggagcttacattaacctccttttatgcaagtaaaggagcattacataacacttcatgtgtcaatagacctcaacaaaatgctattgttgagagaaaacaccagcacattttaaatgttgctcgtgcccttgcatttcaatcacatttaccactcctttattggagttttatgataagaactgctgtctaattactaaatcgaacaccatctgtactcctaaaggacaaaacttcatatgaactattaaatggcaaaactccatcttattctcatctaaggaactatggttatttagcttatacttccccccataacaatggccataaactctctccaagagcaaaagcttatttattcattggatatccagaaaatatgaaagcatataccttattagatatccaaagcaatcacatttttcactctcgggatgttattttttatgagaacatttttccccttcttaccaaaaccccacctacaaacattgatgtttttttccctggttttacaataccagcagataccaacctgcaacatgactccacaacagcagccccccccctgcaatatgaaccaatcaccccagcagacattcctatgcaacaccaaccttctctctcatctgatcctccctcaacatcttctacttcacctatggccactaataaaaccaccacagttcctctcccaaccaccaaatcaggcagatgttggaaattattttac

SEQ ID NO: 381228 - DNA, 2853 bp, Cannabis indica
agattaactctaattaagacagtggcattgtctatgccgatttactcaatgagtaccaacaaaattccaatctcaacttgcagagagctggatgcgatgatgagaagctactggtggcaagggagtgtgggtaaaggaagatatttagctttaaaatcttgggacacaatatgccagccacaagattcaggaggtcttgggattagaagatttgaagattctaatagagctttaattgcaaagcttgtgtggaacatagttcaaggtctaaggaaaccgtggatagactgtcttttaagtaaatactgcaagcatgaatcgttttggacagtaaagaaaaagagcactgattcttacttatggaagtgtatcctggaggctcggaacataattctcaaaggctctttggccttaccggcgggaggagaaatgattgacatttggaaccagccttggatcccttgtctggcattcagtgacttcaaaagcttaatggacagcttcaggccaagaagatatactgttagaaccattgcagatctatcaatagggcatccatggaataaagaagaggtcttacagttttaaggatttgggggataggattcttgaaattcctagacttccacatcctaacaaggatatgattatatggaaagagaaaaaaaaatgggcagttttcagttaagagtgcctatatagttgatcagaagcacaggtttaaggaggctcaggaaatatggaaatggctttggcattcggacttacatccaagaatcttgattttgttgtggcgtgttcttaataatgcaatccctgtaaaggagagaccgccttttctagtggacaaggagtgccccctctgcaactataacttggaaaattgcttacacctttttagggactgcaactttgtaaaagtcttatggttatcaggcgtttttcctatgcgtatagatgaaatcccagggggaagcattctgtcgttcgtggagaatctaatcagaagcctttctggagctgggataggaagaaaggaaatttttacctatcttggatgcattattgatcaagtctagatgtataggaactgtttgtgcaaggaaggaaaaatgggtcaagtcaatgaggttcagagcagaattcggaattcatacgaaacctacttgaatttcagtaatgacaattcagatgcagaagcagatcagagacaatctataccaacagagaggcaagaaagttgtttcaatactcaggaatcaccatggatcatatgcacagatgcttcttggtacaaaggcgaagcaggattggcagcagtactgataaataaatacacagtttactgggcaaccaagacagagtacagtaaagcaatttcagcactagatgcagagataagtgcaatttctatggcattatcttgggcagctcaagaagggaagcatgaggttcatctactttcggattgcaaagtggcagtgcaagccttagcctgcaaaaaatgtcctccagattggagaattctcaacaagtctttgggtgttttagactattgcagtaagtttaaagtgtgtaagttttattatataagtcatagtttgaatcaatttgcggatgaattagcaaaaagtgctaggatatctagacaatcggaagttttgtatcaaggggaaggtgatccccctgtgatacctatctatttacttaataaatgaacatcaattcttaccaaaaaaaaaaaaaaaaaactaactaatggatgctgaccctttatgtggaaacatctaataatttgttatttttttttattttaaaaaaaggtcacccaataatttctcataaagcaagaattatgttatatagccacattttatttagaatagatacatacccaaatacccgattataatatagttgagtgttattactatttcaatccaacctaaaaaaaattaaaacaaaactattaaagtttttatttttaccttattattgaaatccgacaactaataccgaccaaaatctgcccaccacgcacaactacaagaacacaatcttaacaatctaggaaaatcctaaaacaatttacaaaataaaatataaaacaatttacattaataaaattattagagattatatttatacattaatggacattgagatttaataatttctccaccaaaagcggcggccgaagctacaatcaccacctctaagctcagtttatcttaaaaaaatcaaacaaaagatgatcaaactccggggatatatttttgggtatgaaaaatgcaaattttttgaaaaatggataaaaacatatgaaaattgaagaaatgggggatggaaggcagtggttgggtgagggttttatgaaggagttgctggttattttctttggggagaagacgaagtgaagaaaggaagggctgatcagggttatataaaccctatggcatcatttattttgtaatgaccgatgacataggggacacgcatcagccaatgtgtgtccaagtgtcatcaattattacaaaataaccaatgccatcagtgtttttcattaaaattcatccctctatggtgccggttattacaaaataaccaatgccatatgtctttttcattccagactcactctatggtgtaagttagcttcctttttgtattcattagttgaaaaaactgcctccaaaggcttcttttatagtagtacaaatagatttatgggtaaataccattttggatcctgtgttttgcaaaaattaccaattggatcttttattttgttaaatgacaaaatagaccctctattttgttaaatggaggaccctgagctcaatttttaacaat

SEQ ID NO: 381229 - DNA, 2404 bp, Cannabis indica
ttttttttttttgtaattttctttatgaatggaaaaaaaaaaaaagctatgtttattgatgtttatataaatatgagtgttatttcaataagtggtttttttggtgaagtggaataagtgtcatatgatgttatattcaaactctaaatttgcataggttggattccactttcaacagtgttcatcaccaatttttaataatattatttatttaaagaaattatttttattgggtttttcttgtttaagaccccaacacttactataaatgtttatgtgggaagcattaattttctagtttttaattaatgtaatgtgtaaagctttttttttttaagtatttcaaaaaccatgttcaattatttcattaattactaattgattgaactagaaattatatatatataaataaaaattctttcttttaagtcaagagggaggcataatcatatgaaagtgaaaaaagggttcacttatatctaattcttgattgtgatatttactactttgctgaaaaagttcacttttttctttggtgttcttataaatatatatttgataatctcaataatgttctttttttttatgttgtaattcattaaagctctagtctttttaaatttgtttagttccactcttttattaattctctaccattattattatattttttttggggggggttctaaagtggacttgaggaatgagtttaagtacatagaaaaaggaaaataaatagagaaaaatatgtgaactcatgctgtttggtaggcaagaaaaagcactctccactttccatggaaatcaaaatcttatacaaactcataagattctcttcaaaaatatatatatagaaaaacagcaaatttgggctgtttggtttagaggaaaatatatgtaaccaattgtaaatattcttatctaaaaactaattccaattgagtggtctacttcaacattttcaatggataaaaagattaaatattccaacaaactttattttctatttttcttcacatatatatattctctttccattttcatgataggaaattatgcattttatttacatatatttatttatgtttactatttgaagtttttaataggtttccaattacataattaattcaaagtttaaaacaatgtactagctattctagctatatatatagccaactataataataaataatataattgatttattgtgattatatatagtttctcagataccttcatagcaagctatgtaatgtgctatttataataattgtaaacatttatttatacttttaacaactttgaatctatacatattttatattttcaccttttttgctattaaatgttgtaaagcattattaaattttttcttcttaattggaacatttatatatatgccttgcttagtctttagtatgaatactagattacttaggtagctagatttaattatcttgatctttcatttacaataattaaaaatttaaaattttgggttcaattgagtgaaaagatgtcacataatcacattgtcactataatataaaatcaaataggagtcacctataaaattcttatgtgatgagagtgtcacttttgttctagaggaatttcttattttatatttgatgtacaatatacattataattatatatatttgatatttagtaagtttttgaaaaattttgagtattttaaaagtcacgaaaatatgatttaaatagatagtcacacatatacatgttttattcaataagcgtgcaactcataaattatcgatggttatagctgattatattatcatagagtttttagctacatatttattgttatctattttgttgagcgattttttcatttgatgaagatgaatttattttaaaagaaaatatgtctgcaattgaatatattttgaaacatattttttttattataaattatttataatttctcaaaaatttacataataatttttcttttttttacatgaaaaaatttacataataattattataattatagtatacactatcaatttaaaaaattagaatatagtttatttaagtactaaaataaaaaatatcttcaacgtaaaatcaaaagtgatgcccccacgtaaaaaatctcaatataaggctaattaagatttttatcccttaaactttaatatgtattaaatcatatccgctgaacttttaaggtggttaaaaatcttccctaaatcattgagattgttgaatttaagaacttttttttataattttagtaaagaaagtctaacatggatacaattttaggggatttgattaagtacatgtaaattttgtggggcataatttggtagatattatgttagactttttatttgggcttacattaacttttattggttttatt

SEQ ID NO: 381230 - DNA, 3236 bp, Cannabis indica
gtcacggcaccaaagtccactagaattggctggcccgatatggcgttataagttgtggggcagtcaactaccacgaaggttgagtgtttgaatgcactagcctcgttgtctcccttgagggtgatctgcagttggatttttcccatgggaattaaggcgacaccattaaagccttgtaactggacaaggcatggagttaaatcagcttaagtgagtcaaatcgcttggaatgtgaacttgaaaaaaatgttgacaaaacttctgttatcaactaggatattggaaactctcttgttggcaatctgtgcattgattactgaaggatcattatggggaagcgtacgtttttagcatctccttctatgaaggttattgggagattcatcatccttggacgttgcgcgggagattgtaccagggcacacacttccccttcttccacttccttttggtatctctttttgtgcgttacaggtacttccgacaagatggtgtccacccgatattgttgcaacatgtccgtccacaggtggtgaagctattctgggaggatatggggttcctagtcgtggagcccccggtcgaagctggtagagaaggaagtgcaggtaaagacattctaggagcttgagggtgcgcaaccccctgtgggggatttacagcaccctgctattcgggaagcatcatgtgtccatgaactaccccctgtccgggataaatgattagagtatggaccccattgccccaaatgcccggctcggacccatctcaatctcgtctttcaagtactcacactcatttgtagtgtggcccttttccccgtggtgtttgcattgcttgctttgatcccgcttgttcctcccgccatttgacatgcacggggcttcccgtaatggaccatggtgcatgtcgctttatagacgttctccccagtgtctatcaaacttgtatatttggtgtactttgggtcgtaatctttccttaccttcttcactgaatctttttcattgtggctctttcctcctctctttccccacgaatgccccacgtacactagagtttgggacctcagatttagactgtttgggaaccacactgcacccaatatgtgccgccccgtacccagagaaatgagtttgcgtagggattagactagacacagtaggtccgtaaatagttggagaaaactaaggtccgagaagggaaaagatggagcaggagtctgaaagataaaactcagagagattgttgtaggtgtgggtggcggagggactccgaacgcctgaatgtagacatcctcaaggttcattatgccatgtgcgttggacataactcacttagtgtttcagctctttttctttgcatctttccccacaacaaggaacccacaaccaattatgattggagagccatcagcttcagatcattgttgaccttggtcttggcgactgcctccgtcatcctttgaataaaagctttcaaactctcattgcattgctctttagcgttggtcaaggacccaacctccaggtctttttcgtgggcggcgatgaattgcttgcagaagacaggctgtaaatccttccagctgtcaattaatctcggggtcagttgcttccatcagtcttatgcaaactttgttaaagttagggagaaacataaaaacttaagcattgtcactaactcgacgacttgcatcatcttgttgtatttagctaagtgtgtttgcgaattagttcttcgttcatacaactcgatatgtggcatctagaagtttttaggaagaggggtctccgcgatccttttgacacagggttctgggtcctcatcttcaaaatccgataatgctccactttgctttcttaccacgcagatgatttcttaggtcacccccatgtggcctcactttctcactcttgtacctctcgtactttgcacctaactctcgtcgcagatttgtcgtggactaactatccctagaatgactgacagtagtccttccgtcctgattgacaaaatcgctaggggaatctactcgtctcttgggcctggggacctccgtctttggtcctttcagtgcagccctattttgagggtcagaagggcgtctacgcttgaaggcaccagtggccttctgcgtcctcgagggttgtccgatttgtggcacatctttctgatgaggttttggaacgattttttgtgagggtttacctactttgcttttacccttgtccgtactaggattttgggttcctacgttagtttgcgtctaagctcgcccttcttccacctcttctacagacagttcccggtccgttccaatcaaaccattgaacttgttttgtagttgctctatggtatctttcatcttggtagtaagcctttgttcctttactagggcctcctgtgctgctgccaactcttcaatcacccgcactagattagagtcatgttcataatacagaccatccttatagtatccatctttatagtagtcactatcatcatcttcatcataagtctcagtatatcagccatcctcacgaccttctccaacattttcgccattcatttctggattctcggtagtagtattcttctttgggttctcgattgtagctacgccttctctaccattttccacctgtgcgtctactgcatgagaggtaccttcctccatgaccgtatctaatggagttcttttgccaaagttttgtcgcgtcttcaccatgattggagtgtgatgaacactaccacgcttccttcgactcccaatgaaagcagcaaaatgtttaccgagtttattttgagagaataaaggaaataacaagtaataaataataaaaccagcaaatttttacgtggttcaggcgttaatgatccttagtccacgagtctatattattagcctctttgagcagaagttttgtgattacaatgtggtaatcttctgtggaataagatattgctagggttttcggcagggtaacggtagatgaaaagttgttctgccctgccttcaaaagaatgaggctatttataagcacacatggggtaaagggcataacccttacctacctagggtttcatcctcctcacgctacaaaagcatgtattacaaaagaacgatctaaccatccactgggtggaaccttcttcatcgtgcggtgtggaggagttgttgaggacttttgtatgaccttggacacgtgttgtccatgttgggttttatgccc

SEQ ID NO: 381231 - DNA, 1529 bp, Cannabis indica
tgcgacggttgcagaaaagtgaaaaaattgggtttacgtaatctcttgccacgaccaaaagtattgtggtcgcgaccaaaattgggctcgtcgcgaccacacatttttctactttgacctcttttagtaaaatataaataattttcacatacgaactccaaatgagttgattcaagatgcgttaaaagttaaaaaagagatctaaaacttttatgttttgatttattttaatatcagattaaaacatagtcgaatttaagcttaaagtttcagttttattttcttacaaaattttctctattttatagattactgtttttcaaaatttggccaatttatacatttcaagcatcgaaacctgaaaccaaagaaatcaagcataatttcattccaaaaaatgacaataaagaagaaaattaactctaaaaataaactgaacaataaactaaaatggtctttttcatttttacacttcaaaataattttttttatagaaacccttattgcaattagcgctgcaacttaaattacaacaaaattttttatagaaacctctatttcaactagcgctataaccactttaaaaatccaaacggtaaattgaaaaaaaaaattaaaaaaataataaataaggtaatccctcaaactaaaaatagtctaacaactcatttgtatttctgaaaaaaaaaaaaaaaaaaaaacaaataacataaaaaaaaaacaaacatacataaaattttcacttatgaaaatatctatttttgaaaagtggatggtatcatggtactactttgaaaccaaatagcgtagtgtaggatgaaggccggacttacgtggatagcgaggatgtgcagcgcaggaaataacgccctccttcgctgtattcattccattgtaagccttcacacggtctcacacctcacccgagcgaatatcctcttcataaaccctaaaaccgttgactttgacaattgtttatttatcgcctcttgtgtgacaggcggacccacctatttccaccacttacattttagattttaacacatacgttactccaacttgtaccttgtcaaagtccactccatttacctgctgtacatggttgtacctctcttcccatatggcctaattatttatatttatactcctgccttataaaattcgcaaaatcaaaaccagtttctctcgcggtccactacggaaattctcgaaaacagttattattcaatctaactgaaccgaacggaaaatcagctttatccaaattaaataaaatttcgatggaggtcggtggaggcggtggcggctctgataagggctctgtgagttgcgggtcttggatccgaagacccgaaaatgtcaacctggttgttttggggaggtccaggaagcgaggagatgcttcgccttctatgctcgagattttctcctttgatcccaagaccacttctctctcttcttctcctctggtatatatctctctctagtctctacatcataataatacactctcttttagtgtgtgatat

SEQ ID NO: 381232 - DNA, 2261 bp, Cannabis indica
attatattatagttgttatgagattgtttttctaactattttttattattttataatttattgatattttgatttatagttgtcatgagatcagtttctcgttatttttttagttgtttaactttttgatgagactaaacgtatttttgtaatttttaaatatttttgagttttttttttttttcacttttctttcttcacatttttctcctctatctagggtagttttctgaattacgattacaacttttgtgttcctattttctttatgtttgatatattttcttatttgggattttacaacaaagtcaacttggattataaattcaattggacaaaacatattttattcttttatcttatttgattgaagaaagtgattaatagttacacaaaataacataatcacagtttttaacttaaaactttttcatttatttaaatgctcttaaattttttaatagtatataattaaattgtttattcaaattacaattttatatattatttttgtgtaaaattactaaaatatgttgattaatttctctttcctcagtattaactagatttaacaatatttttgtttcagttgagtctgtatcctataagatcaacttatattactaattggacttattaattattctctctagtaatggcaaacaaccaagaccaaacttttagctataagaaaaataaaacaaaaaatgaaatatatatatgtacaggacagggattgataaaggtaatatatacttgttggccaaatatatgaattgttgacttatatagtgtttttttcttttcttttcttttaaaaaagcacaatacactaaaaattgcctatctatgtataatttcacactcaaacatcattttcaatttcatcactcaagtaactttttcttaagctaatatgaaaatgaacatggacagagtcacagacagagggttctgaaatatgatagtggtatttatgttccttacacaaatttgaaaactactatttaatgctactttccataaacttgggtttttgatgggaattttctcattgaaatatcacatcaaacttctctattatatactcttattactgaaaatctgtctatctatccatgaatatgtgtgtactttgtcaaaataatttaggcttttgaaaaagaatcttcttttcccatttcccattttctctaatctaaccaacttttctttaagatcacaaccaatatttatttagtacaagtgtgtataccatacatcacttctctttggctacgcaattttgcccataattatttattttcactttacttgaaccaatttactacccaactctaattccttttctcttttcttttgcttccttacattttaactttggcaatctaacaacaaaaagctggtacagtgagtatataattatttatcatcatttataaattttttaagaattttgaatagtttattataccaaaagtaagatttaaatattttattgtacgcatggtaaataattatttaaattttatttttaatattgtaaactatttagaattttctaaaaaatttataaataatcttaaacagcaacaatatacacaattataaaaaaaaaaaaattagagattaagaaacttttttagattcccaaatagataaataagtctaccgaaatgaccattttaaaaggatatacaacatacattttctcaaccttaaaaaagtacactaaaatatattttaaaaaagtgaatgatactccattaatatataaggatatgccaaaaaagtaaaaatttgtttcacaaatgattactttatcttcaaattagaattgtaagttttaacaaataatgatcggaggctatatatcatgtagtcttcgattattaatctttagaaatataatactatatatataatgaagcttgggtcgagacggattgtttagtggttgtacaagcttcgcggaactcggctattctgtcttctcattttggatgtgtgattcaagattgcaaagccatgttggctagtttaaataatgtctatttttgttttgttaagcggtcagctaatagagttgctcatgagtttgctagagcgtctttattttatcctgattgtactttcagtatggaaaatattccaactgagttgtcgcctactttggtaactgatttcgaaggttaacaaaaattgattttacctttaaaaaaaaaaattaatctttagaaatataatactatatatataat

SEQ ID NO: 381233 - DNA, 2613 bp, Cannabis indica
acaaggctaccaaatccaatataaattggtttttcaccagctttaagccattttacaagttcctctggaggttcataatttgatgcaagatccaggaaacagaaacccactacatctacttttggaccccaatctgcaaattatttaacgaatatatttctaaaatggttaagctaaataatattatgcttattcattgcaagtaatgaaaatggaaataaagaacaggatagcatatgaacaacaaagaatcgcaggcaacactattaggtactcactaatactcagtcaaataacaaaaattaacataagaatattgaaatgtaaagcagctacctttaggtttaggaaccaggtggggactccatatatatccatgaggaatgtctgaatctgatgacccttgtgagccacttaaatatgtgacaggacggagtttcagcttctttttgcgaagatcattaatcatgtcccgtattcccagccaaatcaaagagtccacaatttgatatgacagctaaatattgtgagcataaaaataacattagaatatacaccaaatcttggaagaataaatgtaatggaggatggcagtgatcatagatgtgtgtattaaagtcaaagactcactctatatccagcttgttgcttgacacgggacagaggatgtggaaattcactagttggcctgatgggaattagaacatgtacatcgcatattataatctctattcactatatagagtcaccagattgagctaaaaatggactattaaaaaaattttatctgcaaaagctagataatacaaacttaataagatcccattaatgaaataagacttacgtccagggcattgtgaaaaatatatgaatcggtatttttagtgcttcagccacatgtgtatgccctaaagaaacatttattaaacatgagtatcttgagaaacataaacaaagaactctaaaaatggctctttatagaacaacttaatactatatagaaaataaataacagaataaacatataaatcagtaaataaaaagtttaatttgaccatttcacaagttgcagtcacaaagggaaaaaaaaattaacaataccaaatggatacaaatatagtatccgaatatggtttcttttgttctaatcacttctgtagtatctcattaaacttgcagaatcgtgatttgaccaaaatatttgattaacctcctcccatctagcatattgaaattttttgaacagaattggcaataaagataaacacctaatagaacagtccgataaaattatttttttttaaaaaaaaaaaagttattaattggagagagacttacaaaaaccatttcctgttagttcctgtttgaaaggttaaaacaacatagttttctctcttttttgttttcttaaacaaagtttttattatttgactgttgcggatctgttattttttcacaacaataggatgtaccacaatagcatagtaagcaatagaaagtccctcgctagctttaccaagtacaagtcctttccaggtagctagatgttttgatttataatgcctatcctatttctttcgcacaacattcattttaacatagacgtgcttccaggttcccctctctttcccagaaagctgcttaacttggaaattacaattgatagataaatccttatgcaaaggttgaaaaacatttcaacggtagagacatatacatacatatgaataagaagagcttaccataggctggaggatttgcaatgattgcatctgctttgaaaggaattccagaatccatatcgggttctttacaagctggaagtagagagtatataatttccttcatttgatttcgttgtacaggtatctcagatggccctgatggcaagaaacctttatttttaaccatatctgcagaaagataaaattttaaaaaatcaaactgagttgaagaatgaacatagattaatgttcttactatttggaatgtcacttggctctttaatttattttttctctctgttttttttttttcactttaatagcaggacaaagtaagtaaacaaatattgcgtactggtacatacaaccagcaagacttttgggtcaccgcctaagggtaaaactccaatccagcagttaagcaaactccttgaaaatttgagtgagttgctaatctaacacgatggccatagtcctgacacacaaataataaataaataaaaaaaaaaagatagatctccctcattaatatcaatagtcaagagattaagattagttcttcattctcatcttatgaatcgaatagcaggcaaatggaaataaaacaaaataaaatatgaagtcaaattattcaagatatgccttgagagaataatattgctgcaatgtatcacatcagtgatataaaatgtgtgtatagatatatatactaggcacacacatactgttatatatacatataaaagaaaacaaatagatcctgactaagataatacaaatagactctgtttatcacctgtaaacgtttgcctattgcaataaatggctgaacatctccacgtgtgccaacaataagcattacaatttgcagcggtggtatatattgaag

SEQ ID NO: 381234 - DNA, 5167 bp, Cannabis indica
ttgcttaataatgatgaaattccaaagtacattcaagagcttacaaacttgaagacattgtaagcacttaaattcgtctaaatattaccttacccaaaaaaaaaaaaaatcgtctaaataacaaatgaaatggcctggcttgtgttgttgaagattcatttttcacataacgataaattagcgaactgaatttgattttgcagctacatataagttaaactggaaatactgtttgcacttatatccctacattgttgtttgacaaagtgattattattttatgccagctattaactatcatttcgtatccttgtctgctctttcaaagaactccagttttggtataggtttccattaaatatcagtgaacaagatagactgattccatctatgtactctctaattatttcaatgatatgttcattgttcacaaaaaaaaaaaaaatggattgattgatttcatgcatagttaatttgattgtactcttaccatgttgtctttgctgaggaactaactactaagctatgtgcttgtatttgaatcttttagggacctgagtttcaacaagttgactggtgaaattccaaaagagatggagactctaaccaaactagattttctgtaagctatttaatatgcattggtttcattgtcaagattcttgaggtctattgttacattagctttcgttatatctttctttgactagtggtttatgaatgtaggtttttgaccaataactcactgactggaaaagtgccaagttggataatcagcagcaaacacgatatgttcgtatataaagctttattctttttggcttttaagtcatttaattgaaagcgccaatatacaaatccttttactaatttataagaaattgtcaatttctagtctcttgattatatttcactcgcatagcaaactaaataattaagtaccaattcctcgctatttaatttgcagtgatgtatcgtacaacaatttcacggattcaacacaacagcttagttgttcaagtttgcctgtgtaagtttgtaccatctaaatatgtgtgtatgtatttctctatctattttcgctgtgtactctgctaagttttaaactttatcgtgaacaggaatttaatttctagttacaaagactccgaggtccaatcgtaagtctctttctcattctgatattgacttgtgttttatttatctttacttacactaaattgaacaagcagatggtgcttgaagaaggatctcccctgcgcaacaaaaccaaaacgtaaggataaatccaaatagcgccatgtatcataacttacacacggaacttgaattagtctagatgaggtgctaaatgtaattcacattataactgcagatcattctttgtttatcgattgtggagggccaggcatggatgttgatgggaataaatatgaactggacctaaaccaagggggtcctgccagctttttcacatcaccatcagagaaatgggcttatagtagcactggggttttcgtgggtaacgaaaatttaccttacattaccagtacaaactcatcgttaaatggtacttcaaaattttatgaaacggcacgccttgctcctcaatctcttaagtactatggactttgcttgcgggaaggcagttacaaagtgcagcttcactttgctgagataatgttttttaatgaccagtcatttagtagccttggcaggcgcatattcgatatctcaattcaagtgagtaaatgtagattgacaatactaccgtatatagctagtcttatttgttttacttgattctttataacatttaacttagctttgcacggtcaattttttgtcgaagttagctaatgatgtttttttgctgacttatgaataggggagtttacttaggaaggattttaacataatggaaaaagctggaggtgctcagaaaggcatcaccgagacatttgataatgttcttgttaaaggcagcactctagagatccacctatactgggctgggaaaggaaccaatgctattcctgaacggggtgtctatggacctcttatatcggctattactgtgaccccaagtaggcttcatcgataaactttaatttatatctttgattaaaacttgagagagtgtcaaaataacctttaattttctcttcagatttcagcgttaattctgggttgtctgttggagcaataattggcattgtagctgcttcgtgtgtggttgttgcttgtattttactagggcttagaatgaagggttatttaggggggaaggaccttgacgatccaggtaacgataaatgactccagaaattaatgtatacaacaaaaatcatttgtatatttaccaaatattcattcttttcttgcaaatacaaactaactttggaaaggattgacgtatgtgcattgtgtaactgttggagtgcatgttcatgatgttgattaactgctctgtcgttaatgttcttgtgatatgaaataagtatttgcattagaatgttggtagtgtcttaatttgccagtaaagagtactctttgtagattttggttttttcttttagtacgttatacacattggtggttggtttgcatgcttttcttgtttttcaagtgctaagagataaagtattctcgtattaattgattaattttctatcttgttgaagaagtatacattgctttcctttgtcttttacatttaggagattatattttttgtcaactacaattttgtatgtacttcagctgactcattgactgccacgaatgatatagccttaggattttctcaaacatgaaaaagtactgttagaattttcttaatttcggattaggaagtataagaagatttattttgatttagtcaaattttgatgcaatacgtgtgaagactacggactacttttgcttgccagaacttcgcttaaggcctatatgtagtttgaaatatttccttttcatttttccttctcaactttttcattggagggagcgtcttatatctttctttgttacagagctacgtggattagagttacaaacaggatatttctcgttaagacacataaaatctgcaactagtaattttgaccctgcaaacaagataggtgaaggaggttttggaccagtttacaaagtaaggataattttttggatcacttgaccattacatataatgagaaaatttgtgctttctatattccagacatttgatgtggatatacataacaattttgtagggtacactatcagatggtcgtgtggttgcagttaaacagttgtcatcaaaatcaaagcaaggcaaccgtgaatttgttaacgagataggcatgatatctgcattacaacacccaaatcttgtgaggctttatggttgctgcattgaagggaatcaactgttgcttgtatatgaatacttggaaaacaacagtcttgctcgtgcactctttggtaattatttgaatgttcaatcgttgtttctctgtcacatagtttagaacaatactcatctcgtttttcttacgtccaacattgataggtagcaaggaacagcaactatcattggactggcaaacaagacagaagatctgtatagggatagcaaggggtctagcttatcttcacgaggagtcaaggttgaagattgttcacagagatataaaggcaaccaatgtgcttcttgataaggatttaaatgccaagatatctgattttggtttagcaaagcttgatgaagaagagaacactcatatcagcacaaggatagctggaacaatgtatagttctaactttttcttcttcaaagaattttggttgtatttcacaatactgcggcctatacttgcaaacaaaatgcttgagaataaatcttttattttctgtgacactgtactcactgttgtgaacttatttttttctcttcagaggttatatggctccggagtatgcaatgagaggttatttgaccgataaggccgatgtttatagcttcggagtggttgctttggagattgttagtgggaagagcaacacaaattacaggccaaaggaggagtttgtttatcttctcgattgggtaagtcacagttatctcacaatctggttcctttttagagtttaactttctatttgcattgtactaaacgtgtgtattttgtttgttttctccacatgtaaatgtaattgaaggcttatgtccaacaagaacaagggaatctattagatcttgtggatcctagtcttggttcaaaatactcgacagatgaggctctaagaatgcttcacttggccctattgtgcaccaacccatctcccactcttaggccaccgatgtcgtccgtggttagtatgctggaaggaaaaatcccggtccaagctccactggtgaagcaaagcacgatggatcaggacgcaaggttcagagcctttgaaaagctaacacatgacagcataacagacatgtctgggtactcgcaagagagccaccatgtaggcacttctatggatggaccatggattgattcttctgtttctggtcagagtaaagatgagtcgaccgtcctgcaacataattcaagtaccaagcttctttaggattctgtaatctctcatatgatctcaatatggtttgatggaaaagcaagccaactcttataggaccaatgttttcgaatttttctatctacttatttgtttgttcaatattaggttttccaattttgttcccaatattattttgtaaaggtgttgaatgaatatttatattttaatacgagagaaacaaagctgaacacatgtaaggaataaaaaagttacatggaaaatattgtgtcacttctttaagtcaatggaaaattacatgtgcaaactcatccaaaactaattatttgaacccaatcatggtgatcaacggttgattttcaattaaactttttagagaactgtcaaagagacttaagcatgtttggtattgttttttgttttttgttttcaaaatattgtttttagaaatgaaaacaaaaaatagtttttgaagtttttaaaaacaagtcatgtttggttagtgttttttagaaacaatattgaccaaaagtgaattggtttttaaaaacaaaaagcaacattttgttgttttcaaaattcttgtttt

SEQ ID NO: 381235 - DNA, 4519 bp, Cannabis indica
ctacaaaaaatctggtctgaacttcaggaaggatatcaccaaaagaatgcaccaagggtgttcgaggaaaaatgatctatgcaagctcttgttcagggatcaaattatgtcactacatatttcacttgtttgaaatttctttgggactttattcaagaatttagaccacaacatttttgtacttgtggtactatgaaaaccattcaagaatatcaagatgaggatcaagcttttgaattcttgattggtctgaatgaatcttatggcagtgctcaatcccaaatcttgatgcaagatctctttcctaacatcaacaaagcttttgcttcagttttacaagaagaaagatagagaggaattacttttaatcacactgagaatgataaggctgctcctccaatatcatctaacttaggtcaattttttgggagtgtttagcctcataagccaaaacctatttgtcacaactgtagtattcaaggacatatcattaataaatactatagacttcatgattaccggtgggacacaagttttatgggaaatttcccaatagaaatgcaccaggccctgacaaagcacctcatgccaatttttttttatatgaaattgcaacttcattaatatagcattctgaatacaaaatagtctgaagatcagaagaaatgaaagatcccaaaatgctacgactagataaaattcgtgcgtgcctagcaacaaagtgggtagcacgatttgctgatcgtctaagaaaatgtaaatgaacatcgtaaagagagaatagtaaatttctacaatcattaacaactaagccaaacacagaagacattaactgagtagaatgaattgccttgaccgcgagcatactgtcactctcaattataacactttcccaattggttgttttgacccaactaagtgcttctttgattcccattgcttcaattgtttcaggtggaaaatggcctccatgatacacaaaataatgggaaaacaaatggagatggcaagaatattgagcaagatgtcatggttacttttgctcaatgacaaaggctgatgaacatgctgtctcaaaaaagtggtgaacaattgagcactgtgcaacccaatcaaccttcagtgtcacaattttctattaaaactttttccaaaaattctttttcttggattcttgacactggtgctactcaccatgtgtgtcataacttgtctttgtttcaaaatacttatgttgatacaagtatttttggtgttaatttgcctaatgggaatactgttgaagtcttttatcttggaacatgggttctttcctcaaatctcattcttaaagatgtgttacatgttctagattttcatcttaatcttctttctgttacatctttacttgaatcaagagcctgtgtcttcacttttcattctgatcattgtgttattgaggacaatttgaagacacacgtggtagattgggatagctaaaagacacgaaaaattattttacttagagttacatgttgaaaaatctagtccttatattctttctttgttttttgattcaaaaataaacaatgatattatttggcattacagattggggcacccctcttgtatcaaacttcattcattgaagaaagaattacaattccaaaattaatcttgtcccaactttcattgttctatttttcatcatgctaaacaaaaaaaaaaaaaaaattgtcttttgtttcaaactataatttgctaaggaatgttttaatctcattcacatagataaatgagggtcattcaatacacttactataggaggacataagtattttgttactattgttgatgatcattgtaggtatacttgggtgcattttatcgaaaacaaagccaaatcacaaactgttattcctaactttattcagcttatcaaaacataataccaaaagactattaaatccattagatctgacaatgctaaaaaattacattttttggaattattcaataagcttggaataatccattatcattcttgcatccatatacctcaacaaaactcagatgttgagaggaagcatcaacatttgttaaattttgctcgagccctcttaattcagtcatatattcctttagtgtacttgaataaatatttgtgtgtctactattgcttacttgataaatagaacaccaacactaaacttgcaaaatgtctcccccttctaagttttaagtccaagccaccaaattacaacaacttgagagcctttagttgtcttgcatatgcttccactttgtttgtcaatagatccaaattttctccaagagttgcaccttgtcttttcataggttatcctactggtatgaaggcctacaaattattggatcttaattctatcagaattttttcgttctagagatgtttattttattaaactatcttcccttttcattataatgatcccctttctgatgaatatcataatttcttttctaaatcagttattgatttctctactgttgagactcagcatactaaaaattatgttcctgcatcttcctcatagaataatgaagtctctagacctgtttattcctctcacaccagaccagttaaagcttctcacaagccttcatacttgcaggattatcattgttttcttgctcaagataactctaatgatgtgtttgaggattcctccaatgttactccttatcctatttcttaggttattaactacagcaaattgtctcctacttttcgagcaactgtattggccatatttagtcactatgaaccagaatttttcaaccaagctcaaggcatacttgagtgggataatgccatggataatgagattgatgcccttgaaaagaaccacacttggatagtagttactttgcccactgaaacatcatgccatttgatgtagatgggtctataaaattaaatacaatgttgatggttctatcgaaaggttcaaagcaagacttgtggctaaaagttataatcaacaagtaggtgttgactacatagatacctttgctcctgtcactaaacttgtcacagtcaagcttgttcttgcacttgcagcaaccaatggatgacatcttcatcaacttgatgtaaatatgcctttttgcatggagatgtttatgaagatgtgtatatgactctatctacaaggtatagtcctaaggggagattccgccaaatacagtatgcaagctcaagaaatccttatatggattgaagcaagcatcaaggcaatagttttcccaaattttctagtgctttaattaaggaaggcttccatcaatcagttacagatcacatattgtttatgagacacaatggagctagtttcatcatccttcttatctatgtggatgatgttattttggcaagtaacaacttggctgagatggaggcacttaaagttagattgaaagcaagtttcaacttaaagatctagggagacttaaatatttcttaggtttggaagttgctaaatctgcctagggaatcttcatatcacagagacattatgctctgcaattgtaagaagatcttggccatttgggatacaaaccagttactacccctatggaagcaaatttgaagttaagccaatatgaaaaagatagattggttgatcacctaaactgtacagaaggatagttggaaagttgtagtatttaactattacaaggccatatttatccttttttatcaataagttgagcccgtttttggttactccaaaggctagacacatgaaagtttctgaaagggttcttcaatatgtgaagcactatttaggataggggttatttttccctgcagcatcaaaattctaactcagagcctacactaacgcaaattggggtgcttgccctgataccagaagatcaaccactgatttttttttcatttttcttgaaggctctttgatatcctggaagagtaaaaagcaacatgttgtctctacatcatctactgaagctgagtatagggtcatggcatatacaacatgtgagtttgtttggttattatctgttcttaaggagttgaatgttgaacacaagggcccgactttgctttattgtgacaataaggcaacacaatacatagctgcaaatcctgtgttttatgagaggaccaaacgtagaaattgattgccatttggtaaggaaaaaggtgcaagaaggagtgatcaaaaccagtcatgtttctttcaagaatcaactagctaatgtctttacaaaagccctctttcctactctgtttaatagctttacagacaagatgggattaatgagcattagctctccatcttgtgggagagttttaagagtagggaattagttagttagttagtatatcaattgttcgttagttttagtgttagttttgttagttagggaggttgtgagctatcctaactttgtaactaactcagctagtgtacttgttttgagcttgagctatataaggctcactcattgctttattaatgtaatttcattt

SEQ ID NO: 381236 - DNA, 2157 bp, Cannabis indica
aaaattagaaaaccctaaatcttatattattgaaagatcattacccataatcactacaaagatcatctctatcaatggattaatgtacgttttggctatttgagttcttctcttttaattaaaaaagtatttttttttaaatatattcttataataatatgtaatatgtttatctatgaaattaattttgatattgcatattgtatgtgtgactaagaattctatcacttaaaatttttaacaacctgaaaagttcaaaaaacatgatttgatatatgtgaaagttcatgtattattatttgcttaaaattttaattattattatttttataacttttaatttttctaaatatatagttaattgaaaaagtactaatatagtaattaagctatagcctatatatatcatcttatgagtaactaatttctaaactattaagtagtatatctatctaatctcgttggaaaaacaagtttcttccttcttcatagaattaagagtaagactctccctagtcccaacaaccgttattatacaacaagaaaaactaaagtagataaaataataacaatacatattttagaaaataaaaggtagctaattattgcacaaaatattcaaatctacaattggttatggcttcgtttttatctatatatataatatgcatatattatgtactttcacccttaattgttgcaatttacaagggagaaacgatcatatctaacaatttgaacgaagcatccaatctttttaaaaatttacgtgatcttcatattcaaccactataactatacattattatattcattagattattgtgtgcatttttaataatgtcaatataatattttagttttatgctatgctacctactcaaatttcttaccgcataaatgccataactttatatatttataaattctttacctaattgaccaacaaccagtcacgttactagaagtttagcttgacaatatgtatatggggacagatagcaacatttgccaataatataataagaacatctttatatatttatatgataaactttaatatagcaaaaataaaaaaaaaataaacaaattaaaaatctccaaaagggttatcaaatttgtggccatatatttgcctaccaactacgcttgtcatgttcttcaacaacaaattttgatttttctttcttttaagagaaatgtttccttctaaaatagagaggacaaaccaaatacaatctttcaaataagaagatgaacatagaaccaaaaccgttattacaatgttctaaagttcaatcaaaaaatctcaattgattcttctactaaggtctaataaaaaacctcacaataatgggaagagaccaaatttctctgagtaagaactagacagtttaactattaaaatggcataaatacattcttttcaaaaaataaaaagtgaccaaagcacacatccagctcgagacgaagtactaactgtataaccctaaatactacaaccagacacaaatcgtccttgtgagagtaatgagagtgaaattgaaccctcaagacaacaaaatctaagcatcaacactcaaaaatcatctcagtcctgaactagaaattagtactaattctcgaagttacacaatgttaaacaaaaaagcacataaaaaaaaggaaggacctccttgcaccacaatagtcacctaactcaggtgatgataactccaaaaacgcgaccaataggagttctgaccggagtactatttagatttaagactcccaccacaaatggaagtcgaaaccagtggagaagtcgacggtaaactgttggagacactctcgaatcgccaccataacaatttaatagcatctcaataccaatgtaatattattttttttataaattttattgaatttttacgtttaacccctttcaaaaactaacaaaaagaagttacgctaattatttttatatatatcagaaatccataacagagaaacagaggagtaaacagaatctgttattcatttgctcaagaaaaaatacagatacaatcttgctacttatagtagctgatattggttacaactatcataaccaactctctatcctacaactaactaataactaaccaaaaacagattctaactgttggaaattatttt

SEQ ID NO: 381237 - DNA, 1038 bp, Cannabis indica
aaaaatctttgaattattttttttttctaaaacctccaaaatcccaaaacactttcttagtgccttgaaaatttccttcaaaattgcttgaaccttctcaacccaattagaccttacttgggttgtaagcaacttgtattgttgagttgtcatggctaggatgaagagaagtagaaagttgtttgatgagtatgaccttcatttgtctaagttcattagagctaagctaactgtgcataagtctaagaacttagacaaggcacgtgatgggaaggtgatggcaactgagcttcttaaagctgccattgagagcgatgatttgagagatcgagctttcaggctaagaccacttgtgtttagcactcctgctgaacatcaggcttaattgatatgagatgattactgtcttctcgagtctgtcatccagaactcacgatacgatgatcccaatgactcttagaatacttgttgtagtgcttggtggagattccacatgaatgtgggtacttacttcccttgcatccatggttcatactcatagttaatttcttcggtggctgcccttacttttcggaacatcttgaatcgtccaatttaaagttgcattgaatgagttatggccaaaataccaatccgaacatgcgacagaaattttttagtagcaggctctcgccgcagcgagcctaaagcttcgctgcaatgagcaagttatggctacagcaagagatatctctgccacagtcgacattgaagaaactaaactctctttaaagtatgaccttgtaaacactttaatggagaaaccttcattgctaactttgcacaagctctctattgagaattttgttcaagcctagataaatacaaatatataatgttgctctttcaccaattatcttgtcgctaatgcccataggtttagggcccgtttggccgagtttttgcaaaagttaaaagttgattttttaaaaagttgtgataaaaaggtgtttggtaaacagttaaaacacagcttattgaagaatttatagagaagct

SEQ ID NO: 381238 - DNA, 3205 bp, Cannabis indica
agagtctaaaatggtatttactatattttatgattttatataatttatttatatttttttaaataaaattttggtgtgaccaataaatttttgacatgtgttaatttttagaacaagaaatggaattgttgccattttttgagattggttcatctaactcaatttttgagagacttatggcgtaattttgttttctcttttttttgtttttttcttttacacttagtagtttgtagaattgtctcgctcaaacacatttgtaagcacagcttgtttaatagttatttttatttatttatttgtaaggttttaaattgtaagttggttttaaattgaaaatttgaatatactgttacgacgaattctaagttttatttttattttttcacataaaaataggaattcataacaaatccacattctttaagaacaaactagcagccaatttacactctcactacacttctacgttcaatttcattcatatccaaatatgtcaggaggttgtagttgctttcctgtaactcttgatcgttctcgtaaaagtagtttcaaatcatccaagtcgtctaagagtggtaatcatattaaatttactttgtacagtattaatataatgaaatgattacataagctataatactaaaagtgttttggcattcaggttcgcctaaagtgaattcatatgaggcaagaatagagatcaaaaccaaaaccaaaaccattgaaagttcattggttgtttgttttggtgagatgttgattgattttgtgccaacggtttctggagtttctcttgcagaagccgaagctttcaagaacgctcctggtggagctcctgctaatgttgctgttgggatttccagactaggagcctcatcagctttcattggcaaggtcttttgaaaatattttacttcttttttcttttgtccaatccattatggcaatattacattactaacaatccattttctaattgttaggttggtgatgatgaatttggacacatgcttgctaatattttggaagagaacaaagtggacaattcaggcgtagtgtttgactcaaatgccaggactgcattggcatttgttaccctgactcatgagggtgaaagagaattcttgtttttcaggaatccaagtgctgatatgcttctgaccgaagcagaactcaatgtaaatttaataaaaaaggtactcgtgtaatgatgttctgtttaattgggatgtgtttctttttattttcgtgtctcgtatcaaaaaaatttcatttgaatctctgcaggcaggtatatttcactatgggtcaataagtttgattgacgagccctgtagatcagctcattatgctgctatgaaaatggctaaagcttcaggttgtctcctctcttatgacccgaatttgagattacctctatggccatcttcagagtctgctagagaaggcattaagagcatttgggaccaagctgacattattaaggtaaattctatgggggatttccccctgaaattatcacttaattatatctacaactgacatatatttgatggaaactgcagattaataaggaagaaattgaattcttgactgaaggtgatgatccttgtgatgatactatggtgagggagaaactatttcaccctaatcttaagcttttgattgtaactgaaggcacacaagggtgcagatattacacgaaggttagtatttaatgagtgccttaatttgtctgcttggtagttaatggctctatatgttaatcaatttctttcatttataaccagtccagaatagcctaatttttctgcaccaatatttgcaggagtttaatgggcatgttcctggagttaaagttactccagttgataccactggtgctggtgatggttttgtagctggagtactgagcattttggcttctgacttgaatctgtacaaggtacatcacttctcttttttcatttaaagtactataacatagcttatatatgtgtgtttttcttctattatagcaacatgttatctttagattcagcattaaacattacaaaaaattcatttcatatcatcaatggtaagtcagaaagcattacttaaattccagaaaaataagattctagttattaagtccatatatagacctatctgtatacatcagacattaattgtcctgcacaaattatccttaaatcactaagaaaacagaaaataaattaatgtctaatttggattggaaaacaatggctgatcattatgtgtagtatcatcatttattagtttaattaatcttcatttccagttcaagctaaagtttatagtgcattgtttttttcatgtgcaggatgaaaagaagttaagggaagctctcctatttgggaatgcctgtggtgcgctgactgtgacagacagaggagccatacctgcactgcccacaagagaggctgtccttcaaattcttgaaaaaaattaagcatgtgaacgagttacatgattgagtaacttggagagctttgttctttttctctttcttttttgtttaggaacaaactaggatttttgagagaatcattgctaatctctcactaaataaatctgtctcatgtgcaacagatattatatttagcttctgaacaaattagtgtttactttttttatgtttattgagattactttccaaagttcaatcttgccagtcttatagatatgttttgtgcaaagtttgtgaaattttgaataagtactaaatattagtatttttttttatttaagcgtttatatattacaacatgttttatttgggactcgaacccaggacctccaacactctacacccacttatggccacttgagctagccccaagtggttaagtactaaatattagtaacacaataataactattcacaacattatatggcaattcatttaacatacacatgcttacttgctttgactgaataaacacgaaaacatgttcaataaacaactagttgggatactccgatcgatttacaagaaatctctcttcacaaaatcagaatgagttactaaagtagtactgcttatcattgtctcgtttcatcaacaatatcagactaattattaaaaataaataattaaaagttaaaatatttataaagctaaatagttttttttttcttttttttttgttgttgatgaaacaaattgtgtttttt

SEQ ID NO: 381239 - DNA, 4457 bp, Cannabis indica
ccttcatctaatttttccaaaaatgaagggcatttgtcaaaaacatgaccaattataccacattcataacaaaagtccggcagtcgttcatagcggtaatccaaccacatctcatcagccatccaagggaaggaaactagttgaccacggagcaaaggcttagacacatcaatacccactctcattctaagaaaaggtccccaaccttcgttaagcgagtcttcatgtacttctaagaaagtaccaaccatgttacccaggatttttgccaaagcttcagatttactaagaaaaggcagacgatatacttgtatccaaaaaggagttatagtgtaggagtccattgaggcattttgcagaacacttggttggcataagatcatgtgttgattgtggaagtgccaaggttccttagagaggacccttcttaaatcaccttcacagccgaaggaaacagtatatgaatcagtgttggaatcataatcagagatagacacttcaaatcgacccaaccattgagatatgatgaaattcttaaactgtttaggattataccctctcttagaaaaaattcgacagagaagtcgatgaacaacaggtctcggtggtggagtattaagaccagagagattaataacttctttctctctcacagataaagcactagacatagttggaataaaattatccatggtgaataatcaatcaaaagcaatcagacaaaactggtgatggggaagaagaacatgaaagaattcaaaaaacagatgaaggcgggagtagttatgatatagttaagaaagaagataatgggaagaacagttaaaaagaaaaaaacagaataaactgccacagagcgacataaagggcagacaacgctccttattatcaaaatgattgcttttatctttatatcatcatatattttttttttaaaatttttatatcatataatttaagttgtttacaaagcatagttgtaaatatcataataataataaaatagttatttttaagttatattatggtgtcttattatttaaaatatatttggctagtcttaaagtttattttcgaagctaatgagttatcatgcaatataataagttactatttttatataccaattattttttatatacttttattactttaaaatgtatgtatttatttttagattaaattatattgttttgttgttttaaatacttatacgttccttttttattttccttttgtaacaatttttatggtacaacaaattacaataaactaaaaaaaacctcacacaactaataaattaataagtcccaataagtaacatttaattaataaattaataagttacaataaagtaaaaaaacaaaagtcacataatttattagtaaaatttgtaaatatttaaattactaataattattttaaggattttttcagttttaattaaaaaaaagtaataatattacaaaaatacttctagctggctaaataaacaaatatacaaccaataaaaaaaaaatattacacaaataccacttacgcacacctttaacctaggatccatgcttcttgggcaactatcgcgcaaccacgcagcaacccaacgcaaccaaaatgaaaattcaaccaaaaataaaactaccattaatttcgacgacttcacctgagaagacaaccagaatcaatcaaaactgaggctgttttgaattcatgaaaaaaaaagtgtagaaaaactactacgaaactaaacttcaaccgaaaatccagtttaatttgcataaaactaatgttccaactttaattttcagattcatgaaatgcagatctcaaacataaatctctttttgaaattcttaattctagagtccccaactatgaccacttaaagacctttggatgcctagcctatgcttccacacttggagctgctagatccaaattctcacctagagctattccatgtgtttttctaggttatcctatgggaatgaaagcatacaaattgcttgatcttaacactaataggatattctgttctagggatgttatattccatgaacagatttttccttttgttttgaatggtcaggtttcatttggttttcttgatttttttcctgctgatgcttcccaaaccagtcctgctagacaatatgtttcatatccattgtcaactcctcctacacttgacaatgatgatcttaattcaacccaacagactgtccatagcagacctattcctcatgtgtacctcataatgatatccttgatttgcctcagtaggttgttaataacaaacctactcgaaatgttcacaggccatcctatttagaggattatcattactatttgtccaccaattctgtccacacacaagaactaaaagcttctactaaatactaatcattctacttctgagattgttgattacaacaggttgttaccacagtttagagctattgtgttaacaatttcaagccattatgaaccagaatactttcatcaagctcatggcatacctgtttgggatcatgctatggacaatgaaattgaacctcttgaagctaatgacacttgaaatgttgttactctacctgctggacagcatgctataggctaaaatgggtgtataaaatcaagtatgatgttgatggttcagttgaaaggttcaaggctcgacttgttgccagatgatatacaatcaacaagagggagttgattataatgagacattttcccctgttaccaagctggtttctgtcaaactcatacttgcattggcaaccattcaaggttgggttcttcaccaacttgatgtcaataatacattccttcatggtgacttacatgagaatgtgtttatgactctaccacctaggtatagtcctaagggagagtttccacctgatgctgtttgtaaactcaagaaatccctctatggacttaatcaaccctctaggcaatagttcgaaaagttttccacaactttgattgaagaaggcttctaacactcaacatctgatcactccttgttcatccaacataaaggctcaaccattatactactcttggtgtatgtggatgatgtgatccttgctagcaatgacacaacaacattagaaaagttaaagctcaacttgaataacagattcaagttgaaggatcttggtgagctaaaataatttatttagtccgatcttgaataatttggtcggattgattagcgttcaaaaatgcaaattacaaattggatgtacgattgaatgggtttagggtatacaaaagagaaatgctaaccttagagcatctccaatagagagctataaatgttttaaaatattttgctaaaagttaattccaatagtgatgtaaaatacgtgtcaaatttggcccaagctaaaaattgtgtcaaatttgacacaaaagataagattgccaaattttagcccacaataaatactactttttttattatatatttgccactcattaatactattcattaataaaaaaatgtttttacatttataagttattaaaataatataaataaagttaattgtttatatatttttaatgtagtattaatggtattattaacttttataactaatttatacctctacattagaacacaaatataaaaattgaagtaaatataattttaaagtatattttaaataaaatttaactcaaaatatagaccatctattaaaaatagtcttaagtaccatacaagcatcacaaaatggacataccacaatggagaagagtaacatgtctaatatcaatgcctctttccaaaaatatgtcaattagtgtaatgtgagcagtagacaaattaatggtgttgacatgtagtcactcacgtgctgtaatgccatccgcgtaataatcttctcaactaataaaaccaaaaacatatttaatccacgcgcactgtaatgagcgtgagtgagtgtccaagtactcaaaatctggccaatgaacaccttcttcacatatagacaagtatattacaattaaattacatttatgaacaatattaattcacatcttattaatttgatttatttattaaaaaataataaaagatatgaatagtatttaatattttttgtacgtgtggatatcactattaataaaaccaattataaaataatttgtttaaaaagtactaaatattactaatatctaataataatattcttatttattcgtcacttaaactaattaatctcatttaaactcaattttatatattttttttgagataaaatagtgacattttattggcaaactgaatcaaccattacaatatttaaaagatcatccggagcagtactctcggtgaacatacgaactgagtgaaaacaagaactgcgagccatataataggcagtcttgttagcagaacgtttaacaaaatgaatctgaacagattttaaagaatcaag

SEQ ID NO: 381240 - DNA, 1992 bp, Cannabis indica
attgatttagcatttcgatgagttttcttaaaagaaacttctcctttcatatgtaaatcttttccaagaaattttaatacaatatcatattcttgaaaaaaaaaatgtttgtgaggaacatttaattattattatttgttgaagaggatttaaaaagtagaacaagagaattgaattactaattaagccaagactataaccacctaaatcatgaagacataattaaattagcccccctttatttcatctttcacttatttatttattcttttcattatatatgaaaaataaataagctctgaatgaaaatgaaaagaaaaaaagtgcataacctttagcatagggacaaaagagagacaaagatgcattgaactaaaccaagcaaaaatgaaagatgcacctttctcatttctcaatcaacaatatattaaagtttacgaccaatcccaatcattttcagccaccaaaccacaaatataaaactcaaagaaaacaaaaatagtcccaataagaaccccattgaaaaatactatgagcctttaactttattatcatcatggtaatccacaccctcaactttggtccttttcctactagcataactcttagcatgaaaattaacaaacagagccaaaagtgaggcgttgaaacccgcattgaagcaccagcccaaaatcccggagcacccggacccgaaaaaatgcaagtacaacatccgacccgaaaccgcaaagctgaaaacaaactgcactatctgacagtccgtcacgacccgtttccatccgggtcggatcccaaccgcgcaaagaaaataatacccgtacatgatcacgtgcactgacgcattagtcacgagcgccactgggaatagagactgagaagtccggagccaaaggtaacacatcaccaccacggtggcgtggtggtacacgtggaggaacgagagccgtcggattgagccaccgaggatgatgagaagagtgtctccgaactcgagaagctttgagaggtagaagacttgggcccagaagaagagcggcccattgggcttggtctctttagggaagcagattgcggaggcccaatcggatgagtagaggattgagagagagcatccgacggccatgatgagggagaggacgaggaggatgaggctgtggacggctgtaattggtttgaggagtttgggtgttaagggtgggaattgggatcgggagaggaggagggtgagagtgagataggttaggactgttgttgcgaggaaggttggggtggagcctagtgtttgaggttggatccattgaaagtggaggatcgttgggtggtcaaccagccagtatttgagagtggagacgagagagttcattgtgtcgtgtttgtacgcgccgccgtgggtggtggtttagaaggaggaggaggaaggcctctactgaaatgggattgaattcaaggccaagatgagttcctcattctatcgtcaattcaactgtaataatgttatttattttttattattatttaaattgatgtaataatattttaaaaaatgttatttagaattttttatacgaattatgtattattatgtcaaaaattttcaggtcaataaaaatagtggaacacttattcactaaaaatgtagagtttgataacacttttaaggttggtttggtattagaaattattgtattatatagtattatattaaatatggtttggtttggtattatataaaaatatggtatataatttattttaatataatacaatacaatatgacataataggtatacgacgttccaaacgagctcatattttttaagtttaaaaatagaaaaataaaaatagattttttcgtttttaaaattttatttttgaaaaataaaaatgtgttctttaactacttttattttcaaattttaaaaacaaaaaacaaaagtgtgttatgcaatcacttttgttttaaaattttaaaaataaaaaaacaaaaat

SEQ ID NO: 381241 - DNA, 3065 bp, Cannabis indica
gagagattccctcatatatatcagtaatcaaaccaattctcaacttgttatgattaaaatttatcaaaaaaaatctcaacttgttactaaactcgcccttatgaatgtcactatctcatttactgtaggatccaacaccaccaagaaaggtggcgtcgggactttagcactcaatgttgggaggtcagcatctgagcttccaccaccactcttgcattcctcggtgggcttggccaccccgacctttcactctccctctctattgagaaactcgacaccttcgtaatcaactatgacattcccaagaatattgagtttcattatctgaaatttccccttttatttatttttttattttatttaaaattatagaatgaaaagtttgacaatgttgtattgctatttcaattttaatcttaggatgttcggtttcaattcatgaacagagtgaatgtgttgaacaagcagttgaatttaacctacaatcatacgagggctgcgaaccagacagctttggatgcgacccttttgatcgatttgactaacaagctattgggaagttatgggtttggctctggtgattgcaagctcaagtacaactatgtctatggaggattgaggacgttcgagccttgctatgagtttacgaagaacttttgggacaaaaccgtgtctcaaaggattcttgatggagggttgaagttgctatgcaagggctaaacatagatggaagatttaaggtacttaattatgcatagtaggtgtatgagaaattgcaacaagaaaatcacaaaaaagaatcacagtattgttcactgttgtctgttagtgccactatttttatacattgaagttggtctttcctttttagtctatgtatgaaaatttgcaaaattttgaatgatatacattgaagttggttttgaatctctatgataacttatctaaaatttaaatgtatagtatccagtgacaaagttattatatttcttttttctacagaagacagggtccatgaacttgtaggagtgttcataaaatagttgatccaatctaatccataaagtgtgaatattcgcacttgtgcggatttgattggaaaattcaaaattcgcatttgtgcggattggatgttgattgacatgtaaaagtaaccgatcaaatccgatccacacatttataaaaatattaaaagaaattatatatacaaataatattttaatgtaaagaaaatagtaatttaaaaatctaatgtatctaatataattatatttcaaaacttaatagattaaatatatattctattttatatataattttttttacataaaatttaaaacaaaaataaacatttctttatacataaaatttttttcttttgatttttcatttgttattttatttattttaatttgttgatgaagacataaaacaataatttattttaatttgttgctagttatgtgaaaaaaaaaatcataaatattaaataacttaatattaaaaagtaagcaatccaaaataacttattcaattcgcactttcacggattggattaaatttgaactattgtgcagattaaatcggatacactatgagcaaaataatgcgaattgaattaaatgaacacccctatgaacttggcagagggtttgaaggtgctgaaactacgtggaagtatgaactttgatttccctttgttaaattaggagtaggagttgcagtagattagttttacatacacaccacaccaccattagtggcctgaaattcaactattttccttcctccgctggtgtgttaaaagaggaatggagcttaatattcttttactgatattttcccttgtccatttacaagaaacaaacaaatagcattaatacaatctggttttagttaaaacttgacaaaaatctttgaccgtgatccaattgattccccagtgatactgattactgaattatagaattacaggacttgggatttcaattcgtcatagattacttgaacaaaaagaggccaacattgtgtctgagcaaacaatacaagcttttatagcaacccacctctaagtaagaaagggaaacaaaacaaaacacgcctttgtgttgatctcaagacatgaaagaatcattagaatcataatctgcaacctactcttctttacaaaaagaacgaaacagaaagaataaaagatctagttgtattgttagtctggcctttccttaggtgataacaagtaaattgttcttataaccattgttatgaacaatggggcgcagaggatcaatcatccactcaccatcaacaatgaatttgatctgcaacatttgtaagaaataaaacttctcagactccttaatattaaagtggtgaactggtgtgaaatgatgataatgaatatcatagttgacccacctcatatttgcctggatataattgaagccacagggagaagattcctgtacttgacttggtcatctttctctgagacaaagaattgtaatttacgaatttcacttaacatgagaatcctatatatcatgaactctactaattctggtatcccagattccactaatatatactgaaatgtataatatcagagctattaaaaatattttatatacataggttaataaggtcatgtcattatatattttatattatcacagccattgatagattatacacaataaaggttacaagtgggtgtcgtttacggaattcactgggattggaatcaggccgatcgaagacaacattttgaggactcctttaaacataaacatagaaacgtaaaaattagccaactgactacgcaacagtctactccaacaaggtgtagctttcttctctcttttttgccccccaaactataactaatggtgctcctgaatttcttaacctgttaaagtagctcctgaactattcaggatgctataaagtagtccttctgtcaagttttatcaccggtgacaaacaaaataatgacatacatatttatattattgacacatcaatgacacctatgtaattaaaaatgaaaaaaaataaataaaaat

SEQ ID NO: 381242 - DNA, 3893 bp, Cannabis indica
cgatgctagtggtatcaaatactatcttaagatagactgcttgcaacttgcaaataattagcaattttcaataataattattaaattaataatgagctacaacatatgtgttagagcaagtgcaatgagttgacaaaacagaataagtactgtaattaatgttctaaggtgacagtaaatgatgcatcagttcttttttatagtgcacggcagatataccgtgtacgtgtattgtagtcacaatattttttttatatatattttagaccccagaaaacaaatacggatatccattttactacatttattacatttaggaagataatcattacagcattatattaaaaatattgccatctttggattgtgctgagatcaggacatgggtattgaagatcctgagattgtcgagttggtcaaacaaattgaggagcttgaaaaaaagctatattcacacccgcttcataaggttggttatttaaaaatgcctttgaagaaaatactcttgaggtgtttttctcactgttattctttgctgatgcagtctcaagatgtagatcaaattaaatcatttcagaggaaagcagaggtgaatcatgaaattcaacaactgaagacgaaaatgcgtgattctcaggtatgggtttatatggatactgtgtttagctagttatgattggaattgaaattgtatcgagttcaataccctactaggtaggtagtcaaaattgtttcttgaaagtcaacttttttgatgatgttttgtcagatttgactttttgtctaatataattatatgtcagtcttcaataattctattctactaaaaataatggttgtacatttgaacaagatctccttttagactagttttctactgattgtacatcttcgtagtgctattttcatgttcaatgtcaatatttactttttcttactcttgaaagtgtgtaatttcttgggcacaagaaagaaaattattgtttgtctggttttggaagtgcacaatatgattttggtgtgctcatgcgatgcgattatttaagtgtcctatccatcttgggaaacaaagaaagtaaatgctatagtacaaacttgttagtctgactatagtgctgcattaatgctttgtggaaagtgtcgccaagcttttttttttattttttttttcagtttttgtccctttttcctttgggctttggccttttaatttaagtcctcatgtttacagcttcaaaaatttcgagatgagcttaagaaccgatcacgagtcctgaaaaaacttggtcatgttgatgccgatggtattgttcagttaaaggggcgggcagcctgcttgatcgatacaggagatgaactacttgttactgaattgatgttcaacggtaacctgaagtagcttttcttgttttaatttaggcttgcattcatgtaggctgcctgagcatgcttaaataatacacatgggaaattattttttcaatttatcatttttgcatactgccacttgttcaattttgaattatttataaaaaatgcttgttgatcaggtacatttaatgatctcgatcatcaccaaattgctgctcttgcaagttgttttattccaggagataaatcaaatgagcagatacagttgaggacagaacttgcagggccattgcaacaactccaagacagtgcgagaaggatagcagaggtattgaattattttatactctgattttctttttgtttgtgtacgagcagtgtcagttacttccatactgtgcagatacaacatgaatgcaaattagacgtaaacattgaagagtacgtggaatcaactgttaggccatacttgatggatgtaatatattgctggtcaaaggtcagtttcgcacattcatttttgtataatttatatatgaaaatttgaggggtagtgattgttttaaatcattttctgtagggtacttttagtacaggacctcccacaattttttagggaatttcatgtaatttaagaagactaaatcaggatttaaacatctagttgcacatatttgaattccaattttgacattctaaattatctggaatttctttaaaattgtaggttcccctccaacttatccatgtactaaaattagcaaaatagcaaaaatacctatggatggtgattaaaaaatcactgctatagtggcacttttatataagtgtgtctatatatatttatatattcttttttaggagaaataaaaacttttattaatgataaaataaatggaaagaagaggataaggtatacccgaagaaagaaaaacagaaaaaacaaaagagacaagtgttttccattgaaacttgcacatatatatatgttgactatggtgtgttcatactattcctacttgaaaagatttggagtccctcttttcatttgatggttgtttattttaattgactagggtcttgattttggtgttgtaccagtttgtctggcgatggttaattatttatgtcctgtctttggtgttgaattactcattattaggattacgagatgtcatttggttgctttagatggttgaagtgatcactttgattcttttaatatttcttgctgactgaattagtttatctgtttttttcttcttccagggtgcaaatttttcagatgtcatacagatgactgatatctttgagggcagtatcattcgaagtgccagaaggcttgatgagtttttgaaccaggtaagatattctttacagtagaaatcctcacgtacttctttctaatgattactcctatatctacattgttcaagaactatacttgaggctgaatcggaataaatagaaagaataattaacacctttattagtttatggtagaggaactccttaaggagtctcggccagctagccaactaaatgattacataataacagctcaataaattgcattctagtcatctgttggcccagcgcatggctccctgaccaatgaccagggtctttattcttaaggatcatattagaaattactgttagactttgaagtaacttagctctgagtgtgataacataatgtatgtgccaaacacctgcaatggagtgtgtggtgccacatgctgaactttatctttttgagtaaaatacggagtgatggatgtgcaccatctatgaaaaatgtctacgctagggttagtttttctgtatatacaatattaaaattatttcgccctgttttttctatttcaagttacggggggcagctcaagctgtgggagaagttaatttagagaacaaattcggtgcagctagtgagagccttcgccggggtataatgtttgcaaattccctctatctttaaaatctcttcctggagggcggcagaataaaatcctagtgatcttggtttttaatgacatctacagtagcgaatgctcattctgctgtgtgaagtgttgttgtagttaggttggtccttattctttctttttgcatccaagttttgttttgttcattttatgacactgataatgcttctattgctctctgttcaattgttagtttacactgtatacatcctagattggatcacaaggattccattcgatatatagttgtagaatagtttgattatttttgctggaaatgtttgaagtaattttgtgataaacgcataaaagataggaggattctaccattctcgtgttctaggcctttgaattctaatattatggttgtctgaaatgtcaatgcatagtgctagtgatataatatgagcaaaatgtgatgtctaatatatgaatgaaaagcaaaccatttaaaaaaaactttgcaagactgcaaagctcaaatcgggggaaatttagggaaagtagggggggggggggggggggggtttg

SEQ ID NO: 381243 - DNA, 3054 bp, Cannabis indica
aaaaaaaaaaaaaaagacttcattgtaccctttatcaattcccattacttctctctttattttctctgtaacaatattcatagtcatttcctttcaatggagcacctaatgggacttctcagagttcacgtcaacagaggggttgacctggccataagagatgtcagaagtagtgacccttatgttgtgatcagaatgggcaagcaggtaacctcttagacatttgttttcgtttttgattcatttttgtttatgggttttatttgtttgttgtttttagatttgcttttccagaatttcgtgtcattgacttcttggtcaagccctcttttcttagtcattggtgtcgttagtgcagggaatttggttctttccaattttaccttgaaaattttctcaactgatagagacaatctatagatttatgtaaaaacaaacgttatattttgctcttatttgtatttgtgattaatgtttccttcgaacttttttttttagtttattcttttattaatcatatatctagctttttgtacttcttgttttttttttttttttaaagagctatttgtaccctgattatgttggtttttctcccgtttccaaatccagtcaatttgtatttactctgattatttgggtaggctagccattttggtcaagttttgatactaatatttactttgtttatgtaaatatctatgtttttttttgttttattccagaagttgaagactcgtgtggtgaagaattgtgtgaaccccgaatggaatgaaaatttaactctctcaattgcagatccaactcttccagtcaagcttgtaaacactcttattcattttatctctcaaatttagacctttttgcctttttgattttaaattaatgttgccgacatttataaaatgaaatgaaatgcaactattgttacgaaagtttttggtattaaatttgttgtactcacttgtctatcgctatgaatggttttggtctgcagttcgtgtatgacaaggacacattttctatggatgacaaaatgggagacgccgagtttgacattgggccatttgttgaggctctaaggatgcgtttggcaggcctaccaagtggaaccatcatcactaaagtccaaccaagtagacaaaactgcctatctgaagaaagctccataatttggagtgacggcaaactcattcagaacctttgtctccgacttaaaaatgtcgagagtggggaggtggaactccagcttgagtgggttaatattcctggttcgaggggtatctgaaaatttgtcttctctttacttactcaaagcttcattgaggatagtgtatagtacttgaaatatatttcaaagaagaaaaaacggatagttttgttgcccaataaagtggcaactgcttaatttacctgcaagaaactaagtgaagctatttcctttaaatgatgttagccataaaataatagtttgaggtttttaattattttcagtagtgtgtgctttctttttccgaggaaaaagtattcaattcaagtggggaattgcggaatgtgctaatcttcaccaatttcaaacagctcattaattcctattgacaatttgaatattagaagtgatgatggagatgcttatttaatttggtttgaagagaaaaaaataacaactttgctgtggtgccacactagagttcacaataggataagtcattaataatgacatttagtgctgcaatcccatcaatctagttgcctgccgtatagaatgagtaaaactaaatcacaatacgttattattgttggattaaaattctatttgggcttgcggaatatgtataatatacgtgctattataaagtgtgatataaaattaagtgatcaagttatagatattaaaagggcattaaattattgtggaaataatgtgtaggtaccaacaagctaatttataatttgttgagagtaccaacaagctaatttataatttgttgagaggtcaaatactcaaaattcattatataataagcctataaataggtagtggtccccaagaaacactaaggtgtctgtattctctcattccccatcagagaaaatacttaaaaaaatagttattcttggaagatcaaactttctttgcaatctccaataataacttcaagttagtgcttccgctcatcttttatcatcatctccttctttaatttagcaaaggttctatagatttttgatttaggattttctatattaaaacacttttaggaatatgtttagatctgtgatatatatatttctaaagtgttttatgaattctaacaagtggtatcagagccaccttttattaaattaattaaagatctgatgattttattcataaaatttgggaattttgataattagagttttgttttttgtttgactaatttagccactgcaactttttttggggcttgaatatcaatggcatatttttcttatatgatatgtacacaatttattttagtgttatgtgtattgatatatatctttagaattgaatggtgttatgtatgattgaatatggtttttgtcgctcttaataatagtttaaggacatatattctatcttgcatctctgaatcgactacatggagatgttatctaatatcttaatatattatatcatatttgtatattatgtttctccccctcactttagattttctaaagcgacaataatattttactatataatatgtcatctatggcatataatgtatttatttatttaatttaaattatctttcagtttcatatttgataaactgattgtctcgtatatctatatatttatataagttctaatgtatttgtttttggaataaatacagattttggttttagaattttatttagtttcaaataattaaatttaaattttagtgttagtttatgtctaatattttgtgtaaattaattgaaataatatgtcgcaaaagtgacctcttttgtgtagattaatgttgtacccaaaagtgagtgttttaatatatatactcgcaagtgcacgaatcg

SEQ ID NO: 381244 - DNA, 3703 bp, Cannabis indica
tctggattattctccatatactgccctgaaaaatatggatgagaaggatgttggtactgtctaggaaagggacgtgaacctccagtaaccatttgagatccaaaaggatctccatatccaggaacatgattttgataatgtattggaggataaagactttgagcaggcatttcatagccattgttataaggaaatggttcagcatagtgactgtaatacggagatccagacacatgtttatcaggtctaacatactgcacaaaacccctattagatcctgatgaaccatctggcagccaagcatcagagccaccataagcatctggtggagggaccataactccctcaagaggaatcttctctttaggcttgtcagctacatcacaagaccggctaagttgatccctcaactcatccagcttcttcaaaagctcagctcggtcttgatcaacatatggaactctaggcccatctgggacactatgtttcttcaatgattcaccaagaccatgagaaccactcatctggtaatttgatgggccctcctcaggataatttgaagtcgaaaacctcaccccttcaacctcagctcttggattccttcccaagtcttctctttgacctctatccccaaatttccaatctgtcatccttcctgatcttcggaatgcgcttgttggaccaagttctggattttgatccccaacttctcgtccaggggcattgcccacttcacctctatttttgttcatatcaacaccattctcttcgacccattcatcagctgtaaccttagattgattcctataaagctcagcaggtttgacatcagctgcagccttttcagacttgcagtgactttggttacgcctcaaagaaccagaatttaacttaacttctgaactagaagcatcacacaaatcaacttctctattctccaagcaactatccaattttgcagaaactccaccaaccctgtcctcgtctgacttctctgacaaattatccccatcttgacgtttgatttttgctgtaatcaaggttaaaaaagcattccatcctcagaaatataagccaagaacaataccaaactctcataaataaaatagaaaaaaaccaagcttttccatcaaacagataattaaaacaataacacaagaaaaatcaaaaccattgcaacaaattttgagctgaattgcaatactcccagttcattaagcaaatagaactttccggccatgaaaagaacgtggtaagagatgaaaaataaaaaagctttctttttctcttggtgccaaattttctcgactatacaatgtaaaaacggtataaaggaaaatggagcaaaaagattacctcgaagaacagttccacaaccaccacactgatagacagagtaatcagctagctccggaagaagattctcgcactttgggcaccgaaccaatcgtaccttagttgggtccgccattgttgaaaaatcaaacctccaccacgactcctaaaccataaaaaaatgcttcgagaaagaaagagaaaaaataacaatgtaaaaccaaaagaaatattctgcggtcaaagttcggttgccgtgccgataatggagagagaaaaacaaaagaaaagaaaacccaggtgacgtatcgaactaaaataagtggttttcaaggttgggtttccactaaagagccaagtaacggaagatgggaatagaaagacaaggaaatatcatggtttctgctgagtttttcccaggaaacaaacaactctactctacaagtgtagtgaaacggtaaagtttttattacattacataatacttttatatttggtagtgataattttctcggaaaactacggggagaaatgagaagatagagaatttgtggggttggtctgaaaattctttggagtaagtaagtatggtttttgtgttcagagaaaatctgagcttatgcacttctttcttagtgtctttattaaataaaaaaaatataatgattttgtctatttaattttatttattagaaagagacactccgtggatcgttttccaatgttatagggaaaaataactccaaggacaacaggcctgaaacgacgtcgtttggaaagtaagaatcaggaaaaacatcgtcgttctcttttaacttggcctgaagaaaagtgaaacggtgaaaatgacttgaaatagtactcagtaattagtttctactaattccacaccaccaatttattactttactctatagtctatatagtctctacacaagagtggaactagcaaaaagcacattgtcattagcaaattaacatgtttattttttcttttttaactttattccttcaactttattttcctcccctttatatataatatggttttgtggtgttttttttggtttccttgttggtgacgggtgagaaaaaagtacggatttggccaatttgaaaagaagtgcaaaaaaataaagtgtgcgaggaaaagagagagaggaaggccgttttaggcctatttggctttttccttctttctgaccagtcttctataaacgattctctgtctcaccacccacccaactctttggtggtccctacttctatttactcacttttatatatttatttatttaacatacagtttcatgtcttatcaccaccattaattttattttattttttcttaactcaggtcactttcacactcactcccccttgtttttgacttttgaagtacttaatgacaattgctcacacagtaaattggtaattttcttccatctttattgattgaagggggttgggttggttcgacttggttgttaacaaaatttctatgtttgtaatgagacaataatgttgaaataaaggtatcattaaatgaacaaactgattccactcacttgttctataaaattattgtgttatgtaacaagttatgagagaaggggggttaattaattgttacatacacatataaagagtagaataaagttgggaagtgtttgatttgatctgacacattgaaaagagttaaatgggtgttatttgtttcaaaagtagtgcaactacccccacaccaccattctatgaaaaaaaaaaaaggaagaaaagaagagttttacttcattctcagaaaactagtctttctctttttcttttcttcttttggatttatggattttggaatttttctctttagtaaattcgatttatcacttcaaaaaatacatattcatggctatatctatttgcttttgtgtgttaattgcactaacaaacaacaagtgcatttgctataaagtaggttggattgggaagtagtttgaacagaatactttacaataatcttgctttaaattaaaatctcgtgatttattttgtaatttatgtttgaaccaacatgggaagaaatatactgtacttcggtcacaagatatgattaataattatacttatttatggttaaattatttgttagatatatatatatatttttataacttgctataacaattaagttacttataattaactatattttgaaattaataaattgatattttgtttcataaatataattaatttatgtattaatattcttaaatatgtattaaaatttttaaattgattctttaaattatttattagtgtgattttaatttgttaagcttttttgaagactaatcatgcatttggagtc

SEQ ID NO: 381245 - DNA, 2395 bp, Cannabis indica
cacattttctgttaaataaaaaattaaatattcctctcaataaatttttttaaaggaaataattcatctcaataattaagtaaaaagaaatttggtctactatagacaagagttaacgtgtgtacttttgtttcattattttagtaatgatacctaatatttttatttatttgggtcaaacaaatcatagggggaccaattaaaaaaaaaaggctattaatgcattcttaaaattcatgcttattataaattacggcacaaatgtcttaccataggtacaaagtcatatgaattaagtaaaaaaaaattgccccccaccaactttaggtggataggataggcacaactaatttaataattttctcactaaaactagctagctctttgtgcttttcaacaaaaatatattggccattatgctttcggctcacaacaattttaaaacatttttcttttgggagcgtccaaaaggacaagccaactagaccataatgatgtgttaataataactttttggttgtgaaatttgatgaaacagctatcgaaacaacattgtggtcaattgaatggggtattgcggagcttgtgaaccacccagagatccagaacaagctaaggacagagctagacactgttctaggaccaggtgtacaggtgaccgagccagacatgcacaagctaccataccttaacgccgtgatcaaggagacacttcggctacgtatggcaatcccactccttgtgccccacatgaacctcaaccaggccaagctcgcgggctacgacatcccagccgagagcaagatcctggtgaatgcatggtggttagccaatgaccccgcccactggaagaagccagaagagttcaggcctgagaggtttttcgaggaagagtctaaggtcgaggccaatggcaatgacttaggtccttccttcggggttggaagaagggcatgccctggtatcattcttgctttgccaattcttgccatcactattgggcgtttggtgcagaactttgagctgttgccaccaccaggacagtccaagctcgatacagcagagaaaggtggacagtttagcttgcacatattgaagcattccaccattgttttgaagccaagatcagtttaattagatggattttatttattcaccttcacttactctgtccctttcctactctcttacttcacttctccttttatttttcttgtgtgttaaaagtgaaaacattttatcaaattcaacagtaagttttctaagctgaaagttggttaaataattaatatgatgatgatgatatgtgacatatttgggctgtaacattgtaaattttgttgaaactactcaaacaatagtttcttttaataagtacgtggtcaatcattatttttcgtggttaattcttcatatttggggaaatacttatttgtgcattgtatgttattatttctctaaatacaaaatttttactttatatgtaatatttcaataataattatttggtgaaatcttaaatactttcataccctctcgagttacaatttagtccataaattttatcatcaatatagtttaattatctttggttatgtaattgaatttgaatttcaaattcatataaccaaggaaaatttgttcacattgatttaggatatttgtggaaaaaatgtctaaattattattagcttcttcggcaacccttttgttttcatttttataacttagcttaacaaaaatttgtaatttgtgcttagtatttgattaattaactagaaaactgatttttttaattgttagtgaacatacctattgttaaattaaagtctatcataagttgtgcagtactttataacacttggtccgtggaccttactacagcagatcaatgttataacaaaagccatacaacttaaaagtgtttcagttataacagattcaagctgagctggaataactactaactaccagcttaaaagaattagaacaatatatataagtaccgcacttgccattccttgctcaaagaactctaagttagagagagaagctctcgtcacaagattagtgagagagaaagagagagaaggaagattagtgtgagttagagagaaatacagagaagaaagaaactagcaagaaagagctagctagaagggattaccagtcaaagcatgtgagttggaatcgccattgcatactgttagaatttgagaataagatgaatgaggttctatctcaaaatcatttggcaatgggaggagtagctcattcctcttatatattctattatctttccacacattagcaatgtgagactctctaacacgcactttgtttttttttttttttttttttttgaaagaacctcagttcgggatagattaactcc

SEQ ID NO: 381246 - DNA, 2445 bp, Cannabis indica
gtttctggttacagcgatggtctcacaagactcacccccacatccacatccacatccagacacaaataatatcgtacaccaatttctcatatctgatcccataattaccactcaaacccaattccagaaccaacattttaatgcttatggttccaactatagaggtcacagcataacatacccacctcctcatcttggaattataccaggtatacaatcacttggggttggggaaagaatgtctagatcaatggacctcgtccaagctccacccacgacagatgattctcagctcagtcacaccaggcgtttaatggatcttcttggtgcatcaaacgacaacaactaccatgcccagagccataacagccagagccagagccagagccagaggctttctctatctctcggttctcacatggttgttccttctgtggaatacaggcagaggtcgtttaactcagatctcttaaccccagcttatatggtttctggagaagaacaagttcgagaagcgtgtaatcctccaggcttggaacatgtaaacgacaactaccctttttcaggaagctcaatagcttcctcttcggcatcgttgaatcgatcttattcgacgttgtatggggctgatactttatccactgttatttcccactctagatatttaaaacctacacagtcccttttggatgagattgtcaatgttggtgggaaagcagtcgaaatgagcaatgaaaaatatgttgacaagttacttcgtgggaatcgaagagggggagggagaggtttaagcctttcttctgaactaagagctgagttctgcaatagtggagttgtatcccccgagaaacaagaatcccaactcaaaatgacaaagctcatctcattgttggaagatgttagttatcttcaacttgttttgttgttcttaattaaaacatacgtagcttattttttgttattatcattttcaggtggagggaagatatgagaaatactaccatcaaatggaggaaatcatgggtgcgtttgagatgattgcaggttcagaagcagccaagtcttatacagctttagcacttcaagccatgtctaggcatttttgtagcttaagggacgccgttgtttcgcgcattaatgttgagaaacgaaaattatcacacgacttgcctaaaatcagtacaggcctatctcagctcagcctgttcgatagagagacgagaaataatcgaatccctcttcaacatcttggaatgattcaaaaccaacgccaagcttggagacccatcagaggtctaccagagacctctgtggcaatccttagagcttggctattcgaacactttcttcacccgtaaggagcttcaaagttagaaactttagtttaatggccaaaacccatatcgtttatttattttagtgatatataactttttttttctttctctggtttgatatcaagttttttatttttatttttttctcactctgtggtggttggttgtgacagttatccaaatgattctgaaaaactaatgttggcatcacaaacaggcctctccaaaaaccaagtaatgaatgaaagccctctaaaatataaaaataagtttttgttttgttatattactgtcaattgtcaaatgtctaatcaagtgtccttttctaataaaaggtttcaaattggttcataaacgctcgagtgaggctttggaagccaatgatagaagaaatgtacaaagaagagtttggagattcttcagaagattcaaatccatttgctgggggatccatggcaggggaaggtgtcacagaccatgaagaggactgaaggctagctctaaagaaatgatatgataggaccatgccaatgacaatggcaagggtagaataggaagaaacaagtgctcaaattcatcatgaattatgtggggctcagttagtgttgcaacttgaagttatcgtgtcaatcaatgaatcccaaaaaaagaatgggaaagttttttttacttaactaatagaaatttctgggcaatccatgaaagcattattggagtttagccattttctcagcaattattcatataaattaatatatatataaatatatatatttatatattcctttagagctgtatgccaaccaatgcctatcattttcaccaagaattaagttggatagtttagaattgcttacattttggacctatatttttaaatgctacatttaagtctttgaatacgtttttgtctaaacaatttcttgattcaatttttttttttatttgaacttgttgtctttctttacgggaaaatgtattaatattaaatttttatttttgcttataagtaaaaatatcgataagattcatacaaataatatatatgggtctagttttggtggctattattttaaaaaattacataaattgttatttttggtaaaaa

SEQ ID NO: 381247 - DNA, 1871 bp, Cannabis indica
gtagtgatggtagacactagtggggatttttagtatttctcttattgattggctaacaatcaattcaaatgtgtcaaatcacatcgagccaccaattcgaaattgccacctcagcttttgataaaaaaaataattggactatttagcatttttgtttacactgtccaaagaaagaaatttttgaaaaataaataaataaataaaatatgatattactaacttaattttacaaaccaaactttttgaaaagaattttacaaaccaaactttagattaataatgtaagggaaatttagtatgtgtaaaataaattatatttcttttgaatcttgaaaggtctaaataatctactgatcaatcaaagagctgtgacaaacaacagtgcttggatgcttttaaaggcctagccaaatgaagacattcaaacaatcttggccaaattatctctaatctatttaaatacttaatttgacataaaaccaaacacttttttcttaatgtctattaaatttagctatagtttatttatgtcccatgtcataaatatatgatgatcatcatccatcaatgtgttacatctttcctcaaatacaaaaacataccatgaaatctttcttagcatcacaccaaaaataataatattaataagcaaggtttaatttaaacagtactactacactccaaagctataaaaagaccttacagactctcaatgtccaaacaaagtaataacaagtctccatcaacctcatatgactccaaaatccacaaaagaaagagtttacaggctaggctacactgaaatatcaaaggagtaaaccaaatatgattgttgtggctaatcaaattgtggggaccaactagaaacagaccattgctttcaagtctcatcaaagttagcttattagctcttggccaactcaaaaataaaataaaataaataaagattggttgtggtgacataggttttgtttgggcataacaatgaagaatatgatatatgatgaaaattgaaactatataagaatgaaataggaccactagttgttctactctctttcaaatttacccaaaaataaattttttttttttttgcttctttttctttcccatggataatgagatttctatgttccatgttcttggaagtatacagtggttttagtcatgtgacattgaatctcccactactgataaatacatattgtaccttatcaaactccactacaaaacaatcaatgcaagcaaccttccactaaagaaaatatccatcttattattatataatatatcttcttataaaagtaacaagcatttcagtaatataatgatcatttatatgaatcaatacagggactaataaagcttttattataatgaaagagggaggagaaaaagtagtatttaaagcattgatagtgttggtgaaatttgtttttatgtttcttccctggatggcaaaataaaccacattactacaaatttgttaaggctttagaaaattaataagagaattatagcaggaaatcatgcaatagagtggccaagtaaacaacttttttaagaatttagtaaagcactacaactaaagtttcttttgtttttcttttttccttttttaaaaaactttatttgattgaatttgatagctgattggataatgatgagcaaatccatggcaaacaaggggaaaacccccagatagaagaacactctgtcaatactctatttaatattcaattccaaaggttcctttacaaagtaagaggggcatttataaataacatcataaagtaaataataaaataacatcattacataacataaaaatagataaatagtggcataagtacccaaagttttgagtttgt

SEQ ID NO: 381248 - DNA, 3078 bp, Cannabis indica
aaattttattacttaaaaaaaaaaaaaaatccttcctatatgtatggcttcacctttgatattataaagcatgaaaaaatgggcatgtgggaaagagttgtgcttgtaataagttataacaacatattaatccaaaaaattcgccttgataaagcttaattttaccacaacaaaaataacagaaaacaaaaacacatccaatactatcacacaaattaagatagctaattcatgacataataatcaagcaaaaggtaattaataatttaatgcttcaattattatgatatatatgcatatgactacatgatagaacaaccatgagggttttcatcactaaaagccgcaccagtttggtggccaaagatagcagtagtggaggcagatccgcgggcaggattatagtagtgagtgcggtcatgatgattatcgtagccatgtttgtagtagttgtaagaagaaggctgcggtgcgtagtgtgggactgggccagtgatttggtgttggttgataatactgtaatcatcagggtggtacggcagctgccacagctcggctcgctttcccgtcttcctcaccgcctttagaatcttcttctgatcggcgtaaccagtcaccgtcaccttctgcaagttcatgtctatatccacctcatccacgcctttcactttttcaagtgtgcttttcactttgctttcgcatccggcacaatctatgtgaactctcatctctatgatctgatcatcatcaaatcacgacatcataatcaatctgtgtaaataactataaataataaatcaaactcgttgaaaatatgtaagatcaacatatgtgcttaccgtcatattgctgaaatttacaagttcggaaagtatttgctgttactatatataagaatatgtgtatatatgaatattgtggatgatagatatatttagataaagtctttgttactttcagtatatatagacattttttttctctttcagttatatccatttaatatttcttggtctttacataatttatgaattttatgcaccgacttttgcttctaattacatactgccttgcaggtgacacaaatggatccatgaagcaaacccatcgtattttattttattatatatgtactgaatattatggtgggagtaattgtagaatatgggtatatatgatgtttttaattaattattttttaatgagaaacgctaatgagcactagtagtttgtaaaatttaataattattaattatataataccatgataactaaagctgttacattgtaacaatgttagacaccattactatctaatgtatagcaatactaactacttggatagaaattagaaacctccacacgcgataataaaagaaaaaaattactcgttgatgttcccttcatgggcagccataccggcctagcttactaaggcttttaatacagttcatcattgactttttaattttcttttatatgcagaaacaaattatatataaaattgacacatatttatatgtgatgtcatagttttaagaaattatttggctattggtatagttaatattggatattacatattttgttttaatacataatataaaaaactattaactacttagaatgcatcacatccatgtagtgttgatataatttatgtgtacacctatcattaatattcatattaattcattgaaatggagatgtgtactgtattgttgtatatgtacgggtataatgtaattaagaatggtatatgattgacatatggatgagagtttagggttgagttgaccgttgggatataacttaagaaacgtagtaatgcacatgaaagcgaccttaacggatcatgtttaatgctttcggtgcttgtttagtctatccaactactcattactcaatggaattagcctcattaagtgggaagaaaaccaactattgtacgtagtgcacatgttcatagattaatttactaataattaagagttatataattaggaaatagcagtactacgtaccacaaactgtatagttcttctttctgtctttctttttaagaggaattttcattcaaagttcaatcgacaaagttcaaaggttattagttgcacaaatctaacaaagaagatgacaaacatacggtaaatcaatccaattgcaaatatagaacaatatttgtggaaagagtataaccccctctaagaatagactcagcaacaaaaaccccaaaaataggagagcaagaataatcacccaatagatttatagattacaaaatttatcactcaaaacttgagcaaaaatagataccaatcaaccatttaatctttaagtcactacaaaaatcttaattttagtcataataaaacttgtgacttaaagaaaaaaaatataactaattataaattattattcctatattgtgattaaaatgtgtgacttaataatttgtatctaaatacaatgttttagtggcaaataactttttatcataactaaaaatcacatttaattacaaaaaatacgattattttgtgactaaaaaatgtaacattgaatagtcacccatatatataatattaacttacttcacaattgataatagtaaatcaaaatctatctatattctatatctatatataaatgagaaatataagccggtaacatgacgctctaaaatagttttattttactctattttttttttctttttttcttttaaattaaatattaaataatctaaatataaaaataaaatttattaatattaaattttaaaaagaaaatatctaattattatttttttttttgacaaaatctaattattattattcttcttgtttttcacatgaaaaattcctaaatttaaataaataataaacttaagacttcattatatataaatcatgttcttaatttttatttttaaataaacgtgatagtattgaaatcatataaagttttattaacatatttataattttttgtttgttttaaatttgggattattttacgaaaacataaaaacaacaacaaaaaaattacaaaaatacagtttcacggaattttaaa

SEQ ID NO: 381249 - DNA, 3454 bp, Cannabis indica
cgacttggccataatttacaccgatgaatgactgtgattctacatcataacggttttaatcagttttcaatttaaagaagaaatccatatgttttagtttccttcctccttcgttttcttttttttttcttggctaccaaacaaacagaaacccaatccaaaaagaaaaacaccatagcataaaataattaagcattaaaactaaagctccactgattcttgaaacaagagaacagaggaacccaatttcagaaagaatcaactgaattgaaaacttacttgcaagattaaaggtgagcaagagggtagcgaataacaaagctgtagtagtagcataagggagtgtgatcgccatagtcgttgaatcaaagaagactcttgtgttattctgtttctgaccaagaatgtgagaattcctggttgagagcgcaagataaaatataagacaaggaaaaggaagaggctaagtcttgggggcagaaccgtaaagttactttaggaaaagcttattatgtaggtaaatatttttgtttctttttgtgtaattacacgatataagatgtgtgtgtttgaatatgatacagtaaatgtaattacacatgaaatgaaataattacatagtacactctaattacatggtagttggtgacttgagagaatagttatggtttatgctgtttgacacattttgagtacattttcttttgaaatggcagaagttttaactttaaaaaatgacgacattcaatctcgtgtattgggatttcagaatgtgattttgaagtttaatagaaatgttttttgggtttagtcttagcagattttagatgtagtttttctaattttcactatgatagtatctctttctgttctagatctattaatgttattgctcatttcttggctattatatctcgtcgaaagttactaacaagatttagtggcctaattatcttattgcatccacgatctcattatatatgagatgaattaatttaatcaatttcttctccactttctttttaacttaggacccggacccagaccgtaccccccaggatccaaacacggacccagactcgaacccgagacctaggtcttgaacttaggcccggatccaagacctggatcttgagtcgaacccaggaccggacccggacttggacccaaattcggacactcacctggacttggaacccagttcgaggccctgaccaaggacctaaacccggaccttgattctgggacccacacttgaacccgagactaaacccgcactcgagatcagacccagacctagacccatactcgggacctggacccaaacccggaccttgattctgggatccacacttgaactcgagactgaacccgcactcgagatcagacccagacccagacccatactcgggacctggacccaaacctggactcgagacttggacccaaacccgaactcggacccggaactcgggatccagacccggactcagactcagacccatacctggaatcggacccagacacaggacacgggactaggacccggacctagacatgagacccgaactcgggcccgggacctagacccgagacctgaacttgagaccgggctcggacccagacctaggacccaaacccaaacccagaaccgggacctaggacccggacccggacttgggaccaagacctggacccaaacccggaattgggacctagaccaggacccggacccgaacctgggacttgagacccgaacatgagactttagacctggacctggatctaggacccagacaccagactggaacttgggcccgagactcgagacccgagcctcagactggactcgggacccagatctggatccagaccggacctgggactccaactgaaaccctgacctaggacccggagcccagaactcgaactgggacttggacccaactagtagttggtgttagagtcgagtttattgaaaatatattataactttacacaatctattaatacaagtcaataccaaacataatattgtattaaataatactgatgcaaaattaaaatagatataaaattaaaattcttgaaaaaaaaaatcgggtcaaatcagatccaactcaaataagttagagacagatccttacacgatccaatataaatatctaatttagtggacagaaacaaattcttacatgatttagatcagatcggatcagacccgatccatttgcactagtattactaactgtaaatttaattctacggtgactttgcaaacgcaccttttattttattacatgaaaagttgaattgaattccaccgctttatgaaattaaaactggaagctgtaagtaaatgttggcgtggatgcgacgcgttttgtttatttaatttacagttttatttttcaacgcaaaaagaaaaaaaaaaatgaaaaagaaaccaaatgaaattttggttccttataagtaaacgacagaaactttaaagtagtgtgtgacgtgagttgtgattattatgaacttggaattggaaagtttactttattaagtcgtctaatgataatatacttgtccaaaattgacgtaaatgacctttaattataaccgttacgagccgttgtggggtttgcatgaacacgaattgatgggttcaattgtccgttttgaggctttaggcatgtgagtgagtcggatcttgtgaagtggtctataccgggatccgatgtgtgtcctcttatcaaacttaaattatttaatcattttcatccacacatttatttctgaaaagtcaatatttttagtggatttttattattttattttttattgagaaaggcatatatggtttcgtatctagttcatcgtgatgattgaataataaaagtagatctctagagcattttcaataaatcaaaccacaaagactttagtttacttaccagctaagaaacagcatatcacttctcattgaagaacaacatgaaaacacatttcgagaatataagcaaagcatttgaacattaataatagctgttaaatttaaataactattaatataaaaaaaaaagcttctcaaataattgtagaatgctggctactttattaaaacaatggcataaagttggacaaactttataaggacatgggtataattgattaactggtgtgcaagcaatctttagaataacagtacaaaaagaaaaatttcacttattccaactcagagtttttaccttttagctttttcaccaacttattccaccactaatcaaagaatagtgtacttgttttagctaatattagtctaacatttaaatatttttgtagaaagctaatgctttagggccagtttggcacagctgtgctgtggaaaaaagcagctgtagttgtgctgtgagaaaaagcagctgtagctgtgctgtgaaaaaaaactgctaagtgtttggta

SEQ ID NO: 381250 - DNA, 2205 bp, Cannabis indica
gtaagattttttgtagtgttttattgtgactaaaagtaagattttttgtagtgagtccattatatgcacatattactcatcgagcagaatcaacaataatagactagccaagtcgtttgcaataaaaaaaacacctaataaaaattggataaacaccctaattattcaaaatagaataaaggagcataataaaaaccaaccaatagtcatatatatatatttatatgactatataacaagataggtttcattaatatgatccttgtgtttacttattgtatgtagatgatattttaatagttggtaagaacacgattaacaattcttaactaaaacagaaactgaacaaggaattcgatatatgaaaaatcttggtgaggctaaaagaatacttggaatagacaatatctaaagttatgatggtgtcatcaccaaactgtctcaagcaggctacttgaagaaggttttagaaaattcaacatgtttaatttcaagattgtatcaacacctctagatcctcattttaaattgtctcaaaatcaatgtcccaagactcaagtagaaaagaaactcatggaaattgtagcatacaccaatattgtgggaagcttgatatatgccgaggtgtgtacccgtcctgacttagctcatgcactaagtgttgttagcaagtacatggctaaccttggtgatgcttgctcgacaacagtaaaatggatactttggtacataaagggaactctcaacctaggattgatttccaatagaactttaggctctaaaagagagttgtagcctctactaacacaatcaaagtgaatgtcgatgctgctatgtttgagcaagatggtaagttcaggttgaggcttgtttctaggagccacactgggaccttaattgaggcaaaagcttatgttttattggtatcccttctgtggaggaggcagaggctatgggagtgaaagaagctcttagttaggtgaagtgtaatcaatgggcaatctcagttatcgaaataaacagcttggttactgttcaagctattcgtagtcatcttccattattttctattatcggtttgatcattcatgactagcaagaattatttttttttttaaaattaaagttagtctattttttattaaacgatcttgaaatcgagtagctcattgtttggctagaagctcttgattctcttctgattgttgtattttttagtataatgcttcggatgaactaaaaattttattgtactctgaatactgattaatgaattttgattatttaaaaaaaaaagaggttgtagagtgtgtgaatggtgaatatgcaactagtttggataccaagtcgatgtttgttgtcctagttgaagttgttaggtcaaacctacaaaaggtagtggcactctcaaccactgaagcagaatatggctgccatagattcctttaaggaagtcatagggtttgacaagtgaacttggtctgaactcagaggatatttatgtaaactgtgataatcaaatttctctgcacttgattaagaactcaatgttgtataatagatcaaagaacaaagacataaagtttcattttaccatggaaattgtatctaaaggagaagtatgaagccaagaagattgaaatcgaagaaaatccagcaaatatgtttacctagtcttcaaaagcttaggcattgtctaagcttactcatcattaacagatggttgatgagctaattcactgactcttagagaataggttcatttacttttttttagctttagtaactgatcttatgtggaattgttgtgattatgtcagtcactcaagcaattagtatttttgaggtagacttaagctttataaaattttcttagttagttttatcaaaaatttgtcaaactctataaaagaaaaggcctaagtcattaatgtttggttgggaggaattaagtagtaatgagaataaaaatgagaataagaataatggaatagaattaaatttaaaatgcataaaaataattgatgaaaaaattattaaaatttttgtcatcttgcgttagaatgagtacttcttctatttcaaaatagaatagtcattccactaaaatggtagaaaagttattttacttaaatgatatttcaatacttcaaaatgcaactaaataaatgaatagcataaaaattattttctttctatttcatt

SEQ ID NO: 381251 - DNA, 1696 bp, Cannabis indica
tctctaactgttttaactaaagccacattagctgaaccaactaacataacagcttaaactgtcgtgccaatactcgaaacctatatataggccatagctgagaggtttttaatgaaaaatagagaggactttaactctgatgattgagtgtttacgagagttgtaaaagagtagtctcatggtgaggatttttctgtaatagagcaagtctccctagacgaatcgatatcagtctaagaacagtcaagtgtacaacaaaccatatgtgattgtgttcttgttgctgcttgaagctttcagacattaacaagaataatatacattgtggtaaggttgttgtaatggacaattatgctagtggttgatatgtaaactaagttgaattattgttataattaagtttacatacataattggacaattattgttctctcaaactcatagatttaactgtaagttagccgaggtatagacaggctaggcctatggttagagcgcatttccgaagttccaaaatgaaaagtaaaaggtctcattaaactttttttaaggaaaaatggtatggttaatgaaaataaccatgtcatgtataagcatgtaaattgtaattgcttggaactatttttgactgagtcaaattgtaattttagaatagaagagactactgagtcagttatggcagcttaatgaataatagtcaaactgataaaacaaatatgcagcaaagttcaagacaagccaccaacaaaaagtgtcttttacataaagtcatgattttcttcttagcattttaattgaaaatatcaacttattttgtaagttagctttatatagaattataattaagtgaaaataattaattttaagaaaaaaaaaattaagaaaaaaagaatacatatgtatatattggaagtgggatctgaatcacaaaaaacacaaacttgaagggacatctaactaataagtcaaaaggtatataaagttttagaaaagtgttattgtagtactctttataagtgtcattatttgtacttaattatatactacttaatttgataagaccagccaggagctctgtccttcgaaaaccctcaaaaaggttgataatcatggctgctgaaatggttggaggagcacttctctctgcttttcttgatcccttggtgaaaaagttagcttctgatgtcaaacacttcttcaaacgaaaagagaccattctcaagctgctcaaggagttggaaactttgctgtcctctgctgatatgctgctcattgatgctgaggaaaagctcatcaaagacccaagagtaaggaagtggcttgatgatctcaaggacaccatttatgatgcagacgatttggtttacaagattgacactgaagcattgcgaaaagaaatggaaggtcatcatgaatctcatgacagtggttgtagtaaggtactcatgaaactcatctcatcatcaaatcctttaacttcttttgataaagacataaaatttgacatagaagagacacttgggaaattgaagcttcttctagacaataaagatcttggtttgggacttgtgagaaatcataagaagccagagagggtatgtgctccatcgttagaagagtctgaaatttatggaagggattgtgagaaagaagagattattaagttgcttttgttggatgaaacaaccggtggtga

SEQ ID NO: 381252 - DNA, 780 bp, Cannabis indica
tttaaaaaataaaaaataaaaagcttcccttttttctgtgaactgtttatgtaaacatcatgtagaaaaaaaatcacatacaaggagcatctgggcaatcaagacagctacaaatttacgataaaataatgcgcactatttctatgaactctcaagtctcaactaaagaaaaaacgcattatcctgaacagagtgaagaaagaaatgaatctcaaaaggcacaatctgaaacaaacagtacagaggaatttcgacatattttcaaccgagattccaaaagttgaatatgccaaaatgggggacacttatgacttaccatgttatgggatgagtggagatctggaccgggggtgcgctggcggtagcgtagacctatgggtattcgttgtagctcagagctggcagtggcgaccaggggacgctggcggaggctgctcccgtccggcagcaatgtcaaatttgacagaagcaaagagtgattattctctgtcaagttatttctagggttttctctttaccttcttcattacacttttgtatatacaaattaaattatgcacccaaaaaaattacacgtgtatgtaattttatatgcaccaaaacaaaattgttagtataattaaatagcgagttctacatagttctagagaatatctttaagagaaatgctaaagggtactggtgcttagcaccttcctatgtgtcaatatcataattattctaattaagtatcgggtcccatataatttaatataatagcttttaaagagtatcgctaac

SEQ ID NO: 381253 - DNA, 2697 bp, Cannabis indica
cccaagccaaaaacgaaaaaaacataagacccaaatatctaacaaccacagagtgaagaggatagataagagacttctcactactcaccaaaaaatccgcaaatttatgtgaatttaactgaacctaaatacttctttcccactttctaattggttaagaaaaggagtgatgctacaagggaacaagaaatgtagctaatagttaccctttcttattatatgctcacttgaactaataaatggtcaaactatataaggtatacttagtcaactaaagcacatacaccaaacaaggaatgcataataagtcaactaaagcttagccaacattttacttaaaacacaaacattatgtatcatactatccatcaccattactaatgccttcaaacaaatttgattacaacattctttcaacactgcagaggaaaatttgacaaaaggatcatagttgcactgacgcaaatacagctggaagcaagaagagtgtatcttctgacactagaataattgcaaacacttatccagggagaagtttaaagattagagataatgagcactacagtacacaagttaagttaagccaataaagcatacagtgtgtataaataatgaaaattcacctgcaaggcccttccatacatctgtaacttccgaagactgagcatggttaatgagatttcaccacggtctatctgatttccttcttcaacccacttatcaagagcagcagtaacagagagaccaggagcagctacaattgctttaaacaatgctgaagtaaccctcttcctaagaggagctttcggaaataagggctcagcatgatcctcattatcagagagatctggttcggaaataagctcatcttcaccattgtccccacaactgccttagctccatctgttgtttcaagttcagaaaatccatcctccaagtcatcttcctctccactgctttttgtaccagcttgtgaagaaagactccgtctaacaacatatagtttcgcagaatcaaatttttcgtggtaacatctcttgaaagaacgacatttaccacatgtcacttcaggagaatctgagactccagcattgtgttgtagcttcaaatcagaaagagtagcactggaagctctaataccaaatactcgattcctgaatacaaaaacccaaatcgataaaaggtcaagtaatcagtcacaaaatatagcctaacactatcacattcagacttttatcaacaaaaatttgtctccatttgaaaataataaaaaacaaagctttcccttaacatctacctattatcacctaaatctcccagctttcccttttaaagtttcaagtaataatttctatgaccataaggaatcaaacccaagctcaaaccactggcttgatcgttatgcatttcaattagaagaggattgtccaaaagaaaagaaaaacgaaagaagcttatggtcaagctaaacgaatgaaaagtcaatcacagaacccaaagaaacgtaagaaagttcaagtggaaaagatcaagaaaacctaataacatccaaaaatatataattcatttcaccatattattcgatttccacgaaaattactactcaattttcgctcattttacagcaaaataggaaagggcgaaagatacctgagaggaagagaagcacgacgaagagcccacatggtgatgatgcccaaatgcagagatgagtattgaggtttcagaaatgaaccaaccttccctttcttaaaccctaaacccagtcaaaaattactttatattttgaccccaattcttatatcatatcacatgtacaccccctattaatttttcttttcaaggaatacacccctaatttttttcgtttctttttttttattgataaagtgattgaaaatgaataagggcgcatttgaaaagtcacaatgtaattaaatttgtgtataattagagataattacacgatttgacatgtttgtctaactatgtaattacactataattatgtattggagataattgaggggtattggagataattgaggggtttcaattacgcttttcaattctcatggccttataaattttctattttaaatatcaactactaaaaaaatattttttcctgtgtaattactatttgttttgtcaaacaagatattaaaaatttatatgtaactacctccttcttgttttttaaattatagtgtaattatcactcaagtaattatactatctagtaattacattgttacttccaaacacattctaaagaattaacgatgttgacctccccaggataatttattgtatacccaaaggacatattcagccaaaaatcaaagaccaaaataaataaaaatgttgcgaaccatcatttgacaaaataatttgtgataaatttaaacattacagtatttttttttttttttgaaaataaacttcattcagcaacccaaattacaaagaggtgagtcatgcggtaaagcaagcctcgcacaagagagagaaacccctatccacataactctaactttgtttaacaaagcatgattggctaatgcgtgggccacctcattggcttcacgatatacaaaagaaatcccaacaacattgtgattagataataagtccccaatatgacccacaactccatctatgtctctacacccatcctccttactatggattaat

SEQ ID NO: 381254 - DNA, 2123 bp, Cannabis indica
aatgggtacagatgctttctgtttgaaatgcatgtcttttctttggtagagtcatcaggaccctaggcaatgtatttgagtttacattgccaattctctgtgttcccaactggttatatggagatgcagcttccgtgaggaccaggctgtgcctttgggcaaccaagtctggtggggacctctccaagcaattcataggagaggccttcccaataccaatgttattaattttgagtctagggtattaactacttggacttcacctttctttcatctgcaaacatgttaggcagtgactttgacctgaggccatagatcttattgaaggagaagctgagggtggactgtaggaaatagtttcaagagaagaaactgaagctttggaagcttctcttgaagaagaggtggaatctctggaggctcctccggggagagagtcaacaactctgagagttccctaaaggaggaaaaacaagaagaaaatggcttctgtggtttacaatttgtctatttgggaaatggaccaaatcaagaacaagtttcaaaacttaaagatgctccaaaattatgacaagttctagggtgtaacaaacgtcccaaggctatgttggaacaggctttccctggtgggtgagtctgcaaccaagttgtggatggcttcagagtgtggagctgggtgcatattatttgcaaagcccacctacccatgcgaagttactttgccaatttttacgcacatatagggatcgcgcctttccgactcatccctcaatcatacaaacgtttgaccgaatggtacatcctgtgcaagttccggaagctggatactcaaaggcgagaagaaattctttatttctacgcagtcagatcgcaacacatgaggaagaacaaaaccaaaattgggttttacaaattggaaaaatgtttttcccagtcatcatgttcaactagtttcaccatgtatgtccctgacttatgagactactagttttttacctctggattcccgctgaagagggttccaacgttgtctctaaacttctccacttctggtaagatttccaaactttgtctttttcattcaatttctcctttgtcgactctgtttttctaacgaagatgaccttggttttgcagtcaacatcgaacaaaaattatccccagtcttcgcattaaaggaaatgctatataggaagatccctaaagacgcctgaaaggtggaaaatttggttacgacggagaaccttcgtaatgtcaggctcattgctaggagccaaagtattgaaacttacaataatcgagacgatgatcatgaccctctagtcatctgcaaggaaatttttgctttggttgcctcagtgatgaaggaggcagtcaaactagacaagaccttgatgtcaggttgggaacaatcccatccagaaacacttagcgaagaggctaaaatcatggagttgttcacggttgtggccaagaacaagggcagtcagggtgtcagcacgtctaaagatgtaaaaaccctcccatctcttttatgctccatggctcacctcgaacaaggaggcttcgacaaatacttcttaagattatacctgcataggtatccagtgtacgagtacctagatagggtagatgagattatgaggagtctagaacattttgttcaatacagtagatccttttcttcttatgtacagtccaagtttcgaggaacaaggtagttttctagacaaagaggacataacattatctgcacaggaaaactcaaaatataacaaagtcaagagttgcctctagacttgagtttttcttttagctttgcatattttaaaattatctttattcaattactggtacatgcttctaaccctttgttgatgtgctttttgttttgcaggaaattcacaaacacctccatcttgtatgaccaagatggacatgaagaaagcttatgatactttggagtgagatttttgaaagaaatgatgagtgctttgaacttcttagaggctttttaagttggtgatgacttgtattttactccaaaattctctataatgttcaatagttcactatatggtttttctcatctaagcgagcgttaaggcaaagtgatccaattc

SEQ ID NO: 381255 - DNA, 1988 bp, Cannabis indica
ttctcaaaagaaaagaaaaaatgctctcttgaatacagataagaaatatattaaaataaatcttttagtaattagagcttgtttagtacataattgtattgtaatagtattatttaatataatactatgtatggtattaacttgtattaataagttatgtaaaattataatatctttacaataaactcgactctaaccttgaccctaatctagacttgaaccccgacttagatctgatcccagacctataccgagatctagatcaggattcgagagttggactcaaaaccgggtcctgaacccttgacccggaccttggacccagacccaggactaagatcgagactcaggtgtggcgggcccgaggttcaaagttcgagattggagtccagatcctgatctagggttctagtctaaggtttgaggtcaggattaaccacagactctttgtaaatattataatacaagctaatacaggtcatttattatgtattaaataatacgattcatgttgtattaaaatataaggtggtaataattaatacaatataatattttatttaaatatagtattgtttattatttaatataatacaatctttatccgacataccttcagatatattagaatatactacataaataattaaattcaatttttttcaagctaaagaaaatagtgagaccttttcactttaataatttagagtgaaatgtgtataaaaacttgtatattattgacaatgcaagggacttttcgccatccaagtcataagtggaaaacattaaagcctttttgaaaaaaataacatctattttcttttttgttcatttttttccatcaaaaaagtaatttttcttacttttctataatttctaattaataattttattccagctatatacatagattctactttgatttttaaaaaagtataaagactgtagtctttgaaaatggataataataatatactttaatataagaatgtaatgattataaagcataattttacattatatatggttgtgattgacactcatatattatatcataacttataggcatataaatcatatctatgagtaaatattatatggtttgtactatgatatatataaaattaattaagagtaagaaaatattaattatttttaagaaatattaaaggtttgcttggtacctcatattgtattatattgtgttggattgtattgtattaatattaattaatacaatactatatttagtattaacttttattaataggttgtgtaaagataatatattttcaataaactcgaccccagcattgactatgggctgagtttggggtttagtctgggtttcaggtctaggtccgagtctcgagtatctagtctgcgtccgtgtctgtggtctacattcgggtcctaagtctcgggtctcgggttcgggtcgtgtctcaagtccgggtccaggtccgtgttctaggtccagattcgggtccggggtctgagtctgggtttgggatccaggccggggttcgggtttcaagtccgagctgcgggctctagtgctagtcctggtttgggtacagtctgagtctcgggtctaggttgggtcccgagtccaggtttggatcttgtgtccgggtccaagtttgggtccctcgatctgggtcggagatcaggactgtaacgtccccgcttcaagcctccattgggctcttacacccacgaaataatgactcttatacacgagtacgccattctggctgcttcatggactgatgcctgaccctacaaactaacacgagtatttccagcatgctttgtcctcactcgcacgcttcctgggaaaacttctcaggaggtcacccatcctaaaattgccccaagccaagcacgcttaaccgtggagttctttcgtgatgggctaccaaaaaacaagatgcaccttgttgatataggtagtaccaatcaatccatttaagccctcttcaact

SEQ ID NO: 381256 - DNA, 779 bp, Cannabis indica
ttaactaaactttacttaaaactaaaaaaaaaaaaaaaaaaaaaacctttttcaatcgcaggaacggcaaagggcagcctcgtcagcagcgcaaaacacgattgcggcggcgctttcacaggcgtcacaaagtgttcgcataattaatattaccaccttctaataatctcatctctctaactcataaccccataaaaacacctccataataatccaatccaagggatactaaaaataaagagctttaaagccacaacatcaaaacgacaaattgaagaaaacccaggtcaccaaaactctgaattggtgatgatgataaataaaaatcaaatctttatataattttttgagtgtttgaggccctttttctttttccctttagtactactagtagttgtagtagtagtagtagtagtagtagtagtagtaggagattcgagaaggagatttttgagtgtgtgtgtgtgtaaaaatgtcatatgtgtgtggattttggatgcaaaagacataataaatgagatgggttttgtcaacttcggttagctgaaatgaaactcacaatcaatttatggccacaaacttgaaaaagcaatgtggggttattgtttattgatttacacttgacaatgccacacaacacattctcaaccattacctacatatctgacttgggtcccatttccattcccatcccacttcatttttttttggctttttctttgattttaacccaaaaactctccttacttttctttcttttactctctatgtttgtatac

SEQ ID NO: 381257 - DNA, 2787 bp, Cannabis indica
cacttacagcctcatctgcctgaccatcaaatacaatcttctggccatgttgcatccctttttccacatgaacctctagtacctttttttcctgagtaatcttttttcctttgcattgtgtgcatttatctctgtcgctaatgaattcacctgcaacaacattacacaataaaaaactgagaaacaacaaaatgcaggtgaatttagttaaataccagagccttggcaatctggacagacatgttgcattcgttgaatcatgcccagaccaatctgtcgcattgaaactttcattccactgccctgacatccataacattttccagctatcccacttttacatcctttcctgaaaattataggaagcagattacattcgacctattcaataacattcacaaacaattcacttctacaacatttattatggattaaacatttcaatagaaaatgaccttgctttagaattaggggcgactatttttgatattggaggcaataaggaagtaaatttcagctattgacactcatgtgcttaattactagcttgtttagatattgttgaagaaaatcaagaatatactgtaggtatgaccaaatcatttgaattttatataaatccaataatacttgagctacacaaggaacacaaaatatcctcctttgaattgccatgaataagaaaaattggcaacagtcataccctttacatttttggcacaaagcgttccttgaaagagaaagcttctttgatgcaccattatacaagtcctccaaagaaaccttcaatgtatgaaccacatcttcaccttgcttctgtcttcttcctcgtgagctagaaccacctacaaaatcacactcttcgttaaaaaaaaactagtaatcatggatatccagttgaaaatattagaagaataaatgagtgtaagaagttagaaataaaaatcaaataagaatccaatgaaaactactcttaccaccaaaggctcctcctccaaaaaacgattcaaagatgtcaaacggattgtgtgagggaccgccaccactcattccttctttaagggcatcttcaccatattgatcataaatttcccgtttctctggatcattgagaacttcataagcttgagctagctccttgaactgacacaatatacaaaaggtatattattagagcattaagagatagataaatgtattactatctctctctcaattgaagttcaaaagtttgaatcttcatggcagagaatttaaagaaaaatcatgggatggcaatgctataacaatatcaagattcatgaaccaaccttctcagggtcacctcctttgtcgggatgattcttgatggccgctttcctataagctttcttgagctcttcaggagtggcatttttcgaaacaccaagaacctcataatatttggtgctatcactctttcttggagcacgcccaaacatgatcttgggtctttaatacaactgctacgacaaaagaaataaaaaagcccaaaacttgaactcaactcaaaatattataaaccaataatacataccttatgtcaattgaattgaagggcaatacacaaaaacaacagaataaaataaacaaataagcacacgaagatgaaaaagagcagttcctcagaaagcagaataaaataatatatatatatattttttttgtaataattaaaagaaaaacgagatagagagtaaatatatcttaaaaacaatcaatctcccatcccagcccatcccgaatggtcaatcagagaaagagaaattaaagaatgtttgtaaactacataactaacctaactcttgtgggaattttcgcagagcacaataatgaaagaaaaaagaaaaagaaaaaattgaagtaactacggaaaacctaaaaccctatgaatccgtatgtccatcaaagaatcagaatctaatacatcaactgatctatggaataaaactaactatagagagaaatagataccttatgagattcgcagagagaaaaaggaaaacttaacgaagagggttttagagagagaaagagagatgggttaaccaggtctctcctctcagtgcgccgaatttaccctatagtgggtgatttatagagcgagattggggtggtaatttcagtatgccgccacagagaccttcttggcgtgctctttgtatctaaaaacagagagtagggtctactctcattaaagtgtttatgtaggtcataaagattgggcttcgtccatacttcattgtcatttttatgaaaagtggagtcgacgacgatttgattgcagttacacgtctacacgaaaaattataagtttaaaaaaaatatttaccacataaatacaatatgaatatctcttataaaattatcttaataaaaacttgatcaaaagaaaaagagtactgtataaattaactcccttcatttaggccttcgtgaagatcttctaaatgacgaatttcgatcttgtcttccattttctcaaatgttgatgttggtaataactttatgaataagtttgtaagattgacacttattgaatttgttgaacaccaatatacattttcataaaatgtaaaaagaagaatttggtgaaatgtgttctaattctatcttcttcaatgtaccctcattttagttgagcgatgcaagcagtattatcttcatggagaactgcttgtgttggtacttctttatagagtgtcatatgtttcccgaatatgctatgtcaatgatctcactcccacacattctctacttgcttcataa

SEQ ID NO: 381258 - DNA, 3556 bp, Cannabis indica
aaaaaaattaataaataaaagtttcgaccctacatatatagctatatagttgatcttctttattcttattatacataaaaaaaaaatcaatttttttcatcaaatgagtttaatcatcaccattgcccctaaattgaaatcaaatgtattgaagtaactagtctagtctagggagggagggaaatttaggttctcttagtgatcataaacatgttattttttctttcattactgtataatttgtatttggtatatatattgagataatgtcgtcaatttttttttggcaaacaccactaccgccagctctaagtttgggtaacgttgcttatactccttcaattgacgagaggcataagcaatgaccctgacaatgtgcattagaacgcaccccagaccatgtctgaaggcatcacaataaaccacaaatttctcttgatctgacatcaaagccaacactaaagctgtaatcaattgttgcttaactcttgaaaactaattttacacttttctatcccataagaatcgttgattcttttttgtaaattttgtcaaaggcatagagatatcttagaaaatactttcacaaaatgacaatagtaccaactaattatctcaggaaacttttgacttcagagactatcttcggtctcagcaaatttttaattgacttaactttccttagatcgactgagattatgtctttcccgacaatatgacccaagaaagacacttgcaataaccaaaatttgtatttcttgaatttagcatatagcttgtgatctctaagtcattgtaataccattcgaaagtatagctcatgtttcacttctgacagagagtatacaagaatatcatcgataaacactatgacgcagttatcgaaaaaatctttgaacaccctattcataaagtccataaaggctcttagagtatttgtcaatctgaatgacatcgctaagaattcatagtgaccatatctagtctaaaatgcagtctttgagatatcttcctctcagatttttaactgatgataatctgaacgaaggtcaattttggagaaaattattttcccctgaagttgcttcaaacaagtcatcaattctaagcaatagatacttgttcttaatcgtcaatttgttcaattcacggtagtcaacacattcaaaaggatccatccttcttctttacaaataaaattgaagctccccagggtgatacactgggttgggtaaactctagatcaagcatctactgaagttgtaatttcaattctttaaattctgtcggagccatttgataaggtgccttagaaaccaaatccactccaagtgccaaattaataacaaagtcaatttctcgttgatagcaactcctcgggaaacacatccaggaattcctttactactctgacatcctcaggcccaagtgtttcgagtctgctggagttaatcacaacatttaaaaatcctacacatccatcttgtagtaaatctctagtttttaataccgagatagctggaattcaagaaccctgaatcgatcctacaaaaaaaatggctcctcgccctcacgctgaaaagtcactatttcctcttacaatcaatactagtcgcatacttacataggaaattcatccctagaataatgtcaaattttcctagttctagctctacgagatcagcactcaactccttatcatctactctaaccagcatagacctaatctgtcttttggagatgggaactcctctctaggaaatagggttccaaaccctagttcaaaattatcgcaaggcttatccagtttatcaactactctaaccgccacaaatgaatgtgtagctttagagttaaacaatacaaaataaaaggagctattgatgagaagttgaactgtcaccaccgacagactagttatagtgttggcctgagtaacaggaaacactcaggctagaatagctatttcctctttcctaggttctactttcttcaactgatggtagtctttcttgaatatcacattagaacacattggaaacatgtttttctgatacactctcctgggtgatgtttcttgcagcgaggacattctggataagtataacaacctccagagcagcctcgttatccacctctaccttggttccctcagtatctcttgtttgaacttgaaccaattagagttgttgaagccttcctcttttgatcaaatgtcatatcactaccacccctaccaaagttagtagtaagaggggcagttaccccacttccaccctgagtccctcggggctccttaataaattcaacgacactcttaacacgaagtgctttttctaccatcttagtataggtagttgttgttggttttacagtactaaataagatacgcaacaaaagagttttgtattgctgattatcattataccatagcccaaaggatctccaaatgtgtgtacattaaatcaaaacataaaatacaagttaagaacatatacctcttgataactattagggtatcctctaatgtaaagaccgcatatgattaatgctttgaattactaaataattaggatttataaatgagattaaattaatagttatgaaatgcatattttggaaatatatttaatatatcatatatgttattatgttattttatgtaaattactcaatttttgtgattgtgttcggaagctgtggaaagcgacgttgggcctttagagagtcgcgtttttatgttttcgaatattattagtggggtattattttatttagttattggaggtgttgaaatttttggggtttggaaaatgaccaattttacccttgagagtgtgtagcaacctatgttagctagaagggcaaatgagtcttttggcaaggattttatttgtcttatcctagttgtgttatgtgctgaatataacattaattataaaaaaagaaagaaagacaaaacttggtttatcttaggttagaaggaattaaaagaaacctagaaaagttatctctctctcccttttcctctcgatttggcaagaaccagcatcaagctggaattttttctcagttctaccagcgggttttagcaagatttagtgtgtgatttaaggtatggaaccctagtctttctctttcgcttattctttagtaaagaggggttttgatatatgattttggaatttctgatgttgtgctattagttcatgtttatttaggctctggaacttgtttatgtttgtttaggattgatttaggttatctttgtggattgtttcaaggttttggcaaggattgagtttgaaaactcaaacctagctctctaatggtggattgagattttatgtgatttaatgagttttgttgcttgggattggtttaatatagtgtatgcaggtgttttagaaagttgtggaaagtttgggattgaattgaggagtggggatcagttttgaggttcccagctatgaaccggtcgaccggttctgggaagcctatagtaaccggtcgaccggttggtacccaggaaatggggttccggttgggaaccggt

SEQ ID NO: 381259 - DNA, 3678 bp, Cannabis indica
gaaaaatcttgggcattgggtgattataaactcctttgtctgtctcagtgttaagctgactattaaggctttggccacacagcttgacaaattgacaatccaatatataatggctttgtagagatataaagcctgatatgttggtgaaccttttgcaggagggttatgctgttagtaggtcacacattatctcaaacgcaataaagaccaattgtcccatggcagaatgcataagaattgccaaggaattacagccacgtgcctatgctgaagttttgtaacacgttagacaatgctgccggtgaatgttgttgccctatttttttttttttctttttggaaagaaactcgttcagaatgttgttgtccaattggttgacattcacgttaaattggaattggaattggaattggaattggaattggaattggaattggaattggaattggaattggaatcggaatcagaataatatggaagaaataaatctaggggtgttcataaaatatacaatccaatcctatttgcacgatccaatccaattcaattgcaaaatacggatatctgtacttgtgcggattggatcggaatgaaaatttaaaattcgtatttgtgggaattgaatgttgatttatatataaaagtaatctatttaattcaattcacatctatttatatatatttcaaatgttataaatgtattttttttatttatggaaaaaatagtaatttaaaagaataagatatatatagtacatatatagtatatatacgtttcaaaatttaacatataaaatatgtatatgaaaaatataattcaaaataaataaaaaaaaaaaaaattaacatacaaggttttgcctttgtcgttttttttttcttatctccataatcgaggggaagtcatgaatgaaaaagcatttgtctaccaagtgacttggtttcccacaattggaacatgatggtcttggtttcttggttcttggagggttggttgatgaagaagggcgaaccgaggaagcaagggatgtgatattcgagtttccaagggttctttgacgctcttcttgaacaatcatagagaagactctagacaggtttgaataggctcattaagaagtatttgagcacgaaccgaagcataagattcgttcaaaccagtcaagaactgcaagacttgactctgattgtaatggtcaagaaatgttttcattgcaccacaagtacatggtgtgtttggttgaaagtcttttagctcatcacatagggatttgagtttggtgaagtaggaggtgacggattgatcaccttgatgcaaacgagtgagctgtgtttgcaattgaaagatctgaggaccatttgcctcattgaatctttcagcaagatcttgccacatttcagcagcaatatcaaagtacattatactttgtgcaatatcaggggaaacagaatttacaagccaagacgttaccatattgttgcaatggagccaagaattgaggagattatcagcaatcggacaagggagaaccgtctatgaaggatgtcttgttcttggcagcaagagccatggtgataccacgtttccatgactggtagttagcccctgtaagaacagaggacaccaatacgagtcctggatgatcgcctgagctgaggaagaaggggctggaagcagcttcaatcgatccacaatcttgagagggacgagagttgttagtcggagatgaatctggtccaatctgaggtcgagttcttgaagatcgacgaggagcagcaacaagaggaggttgattgggagcggaggcgatgtcaggaatggtgtcttgttggggctgaactggattagagttggatgggagaatcccatcctaagatctggtcgaagatctggccatggtggatatgtgggaattctcttctgataccatgagagaaatagagacggaaagcaaagctttattgtattccactgaattgaattaatgagtacaatggcataagttggtttatataggctgagcaagagaccgagttagttggaacaaccaacttgtcagctcagtcttaaccaactaaaataacagaattaacaaacatagaggcagggaaataattgatacaactaatgctaactctaatttctaatattaaaatttataattggagacatagaaccataataacatgttttattttattatgggttatgtgaaaataatttatgtcttaataaatattaaataattaaatattaaaaagtaactaattcaaaataactgattcaatctgcattattgtggatcggattggatttgagctcttgtgcgaattcgattaaatctataatataaaattttcacttagtgcaaatcgaatgcactatgagcaaaataatgtggattggattggatgaatacccctaaatgaattagtttaaaatataaaataatcaaaaaataatattttattatgttatttactaaactgtctgaaaaaaaaaatatcattttactttgtttacataatcagaatgtttgaatttaactaaattatcatttttagaacatgtaattattttttatttatagatttttaaagaatatatttgtcttttttatttttaataaaaataaagtaagttaggaaagtattgcctacaaaaattggggagaacttttcttttaattttctacttaagtttagtgggccccactaatttttcattttttaaaatttagtaaacaagtgtgtttgagaatcaataccatacaatttaaatattgataattatatttttttttaaccgaagaaaaagtttattaaaaggtaaaaagctaaaaaccaaaagacaatacacaatagtcaaggattagaggcaaggcggtaaaccagaccaccaaacccgagaagagttaagggataaagtcaagcgtacaagagaaagagtcgtagctttttgagcacctttacaatgagtaagagaaagaagaccaaatatgtaaaatatcatgaacaactcagtctgatatttatccttgttattaatagcttgttattaagtgtaatataaacacccttttttaaaaaattaatcacactaaatataatatttgtctaattaacaaaattttattatagaattaaaatttaatagttactaagtgtaatataaatactacaaattacttttacataagcaggagactaattatttagtaaaaattgaaaatagactattaagcaagaagtctctttaatctttgtcaaattaaagagaagagagtaattaagtgttagctgaatactttcttttaaatgtattacttggataataaaaaacaaatatacattatagttagaataaaaaattatttttgaactcatttatgtatgttataggtatagattatgttcactttgaaattcgttaagtattaattttgggttctctagattaagccaaaaagaatctttaaaaaaatgctttaaaactgtgtaaataaatcaaatatgagtttaccttgcatgagaacgcccccgcacaaaggaagcccctgccacaaggagcaacaaatcgcggccaagccccccttgcagagctccctatgcaggcacaccaccgcgtgtggcgtgctgccccatggcacacccacaatagggccattttgtaacat

SEQ ID NO: 381260 - DNA, 1510 bp, Cannabis indica
ttttttttttgtcatatgatatgtgattgtcctttattggtaaataaaccatagtcaataggttcaataaaaattagatatttcaattctatattaatatatatgtatgtctggttcaaaaatgtagtaatatatataatatcttaaaagtagcaagtaccaagaccatcctatattcatcctggaaacattatgttcggtagtatttcctattaattcacactcaaaatctaacattgttaaatatgagctagaaaaagacaacatttcataaagacaaaacaaaatgttggcaaataaacaaacaagaatcagcgaaaagggggaaaactaaaataaataaatgaataccttgaacggtagagccagttttgcagttagaaaagccaaggaacgtcaaggctgcccaaactacgaagaacattatccagaagccagagatcttcatattgcaaagtgtgagttaaggaaaagagaatgtaaataatattaataaaaaagcaaatatccttctcttagacaaaattaacccaattggaaggcggtgtttttgagtgttattagagagaagaagaagtaggaggaggaggagagagcttcaaagtagaaaagacaaatcgatgaagaagagagtcattagagttgttgtgttttgaatgtggaacaataatgcttaattgcggcagattgaaattaatatatggaaggcatgtggacttgcttatcagcctactcattattattatctctctcacacagagcaattattgttcttttctaattcagtagtgtgttttctgcgaaacactggggaatcaacagcatttaatgcttactgcaatggaatgtgagcttttgaattaagtttacaaaatatattttaaatttaagttatgcctttgacgacgctaaatttggggtctagctcatatggtaagcgttcgctttgcatgcaagaggcacggggttcgattcgccgcacctccacccagattctttgtcttttcgatttattttatttttaaaaatatatcttctcaataattatagaatgcttttaccgatatatttttatttctttcggtattcattaaaaaaaatttagtctattttttttttttcaatttagaatacttaataatgtaaaaaacaacaaaattttgggtgtattaatttttttaaaaaaataataatgagtcacgcatacaataaatagtttgaaccatattttgggtgtattaatctttttaaaattttacaggatattttaaataattataatgtacataactataaaaaaaaattagactaaaaaaatagataaatatgcattaatacacggagactgtatcgtagaattttccatattaacctattgacctggcaaaagactttgacgaaattacactctataccctttttatattgttctcttttatttttaccttcttttttaaagtctatcatttttacctctttttttaagcattgtactaattttgcccctatc

SEQ ID NO: 381261 - DNA, 1235 bp, Cannabis indica
tataaatatatagaatttttagttggcccttctactacaatgaaaaacaaataatatatattattatatatttaataataatacgaaatagaaaaataacaaattaacaaatatagtatacataaatataatattattaataataacaacaacaacaacaataatggtatctatttctatttattctcttatagcattgagttacttctattataattaattttttaacggttggttctttatattttttttcgtaaaacaatttttttttctaaaaatgaaaagtcactaaatttctttaattaaataatactaaaaatttctttgaattttatgaatgatataaacttatatatatcatctattataatgaacaatttttttagatataactaattaatgatttttttagacgtgatgcaatttgtaaatttactcaaaatcaaaatcatgtgtgtattagtatatgtatagatcacataatattaataatcgcttttaatgtgtacaaaaataaataaataaatacacttaaataaaaagaaaaccaatagtcatataatagatccttaacaaaggaaagtgagatgtcacatcatcaagcttaacaacataattataaaattatttattaattataaaattttgaatcatttagtatatatataataactaattatttataataatggataatatattaatactattatttatataaatttagtttaagatataactaattagaaattaaataaaagtggaataaatatataaaaattattatctaaaatcgaaacaaaatttacctacactatataaatatatggatagatatgtatatataagcgaataatattaatatatttactatttaaatttttgacacataaaaatatcacttttaataaacgtatttatatataaaataaaaaaaataatatatttttaacacccaaatccatatatgaaaaaaaaaatactaaaatagtactttcacatcaaataaaaaatccaccaattcaaaattccttacatatttttttttacatatatgatagtaccttagaaaagtaaatagatggagttttcttctaattcatctatttaatattactcaaaattattgttccttatccattatctgtagccaaataattcacacatataggacatttgaattaaactaagaatattatataatttggtcgatctttaaaataaaatattttaaa

SEQ ID NO: 381262 - DNA, 1848 bp, Cannabis indica
tataaaaatatataatataatataacattatataataatataccatgtatgacttaccaaacaagctccaaattaattagtcatataataacactttgtgatgtgtctggcacccttaatctttttacatttttcttatatactaggtaatagcatatagaatgcatatttgcttagttttattatttaaaaactttattattttatttttattaaaaagattaatttattagaaaatttataaaaaaccataatattaaatcgcatatcatttagatcaataagacatacttgatccttcaatagtgtaattagatagaattacttaagaactgtatttagttatttagatagttttgtctaactttttccagttgtatttaactgattttgctcttggttcacatgagtgtatctagggttgttcatcgaaattgaaaaattgcggtttaaattcggatcgcgacaatctaaaccactgtagaccataattggagaaactgtttttggtcgtttggttaatccaaaccgtttaccgcataatagttcggttgcggttcgtaataaatagttaacggttaaaccggaccggaccgtttataataaataattgatttatatgtattttttatgtatgactatatgtataattttgaacttttttatgtgtcatattttttattgcatgaattttaaatttttatgttatgtttgactttagagaatatttttatattgttatttatatattatagatctattacttatcatgcatgtcaaatatatattttaaaaaataaaattaaaaatttagcaaaaatagtaaaattccttaaaaattatgaataattataaagtccacttaacctgtggtttcgaaccaaaccaaaccgttcttaatggtttggtttggtttggtttgagaaatttattggtccggtttagtttctaatattaaaaaaaaacgttataatgctttggctcaaaaaatatgaaagtccggaccaaaccaatccgtgaacacccctaagtgtaccaatatatataatctcaagtctgttccattaatcatcaagaatcttcttcttcatctctcgtgaagattgatgtacttcgaccctaaatccagcttatgcagaatgggaggttcaagaccaactcttagtctcatggttttttttccccatgagtgcttactaacatggttgtgagaattcgagggagattttgagtacactaaataagcacttcacccttcaagtccatggcaagattttagaatttcatacaaaattgaagaacctctagataggtcatatgttactcaatgagtacctcttcaaagtcaagcaacatgtttattttcttacattcgtgggagaagttctcaacacacatgatcatgtgattacgatctttaaaggtctacttagtgagtatgataagtttcttattttctctaatactcaaattgaagcctattttgtagctgagattgaagctttgcttcttgcttctgaaagtcagattgagaaaactgacagagggatagatataagggctcatgttaccacaactgaggcaaaatattccaaattcggtagggatttcgtaccatcatattgttgggttttatgccctaaataaactttatttcaattgaatctttatcttttaaatatcaataaagaaacagaagtattttcatcacttattatgtgtcatttggttcatgctatcatttatatgtttatttgatttataaatttatccaaatccatatcacatttatattcttgtttattgtgtcatcagcacagtggaaagtaatcaagattatgtgattaa

SEQ ID NO: 381263 - DNA, 5540 bp, Cannabis indica
aaaaaaaaaaaaaaaatacaacatatcaactctctgtcccagcagagaccatctttggttccctcactccctctcctgtgttttgtcatctttttcacctgtcattaaaaaataaaatgattccactttcaacacacacaattttgtagcatcaaactagtaatttaatttaaataaatgctaatatagtctacctttggtgttagcagttgaatcttgagaagccggagactgaccatctccactcaatccaaaccaagaagcaactgtacccctagtcttaatggcatagttggattcattttcctcatccgcagtacccaatgtttttgccacatgatccgacactgtcactttccccactggaactgactccggttcctcctttcgcttgttaaatgtatcagttatcacctcagaaagagctctatcttcatctcctggcactaacttctcggccaagtagcccttaatcgagactcctttgtcttgctctttagtctcagaactactcttctccaattcccttgccgagttctctggaccatgcattttcgacatggcttcgctcccttctccggtttccttctcgtacaagggagaatgttggtctgtctcagtggaagccatcttcttcctgtgttcagtctcagtttctgaagctggttcattacttgtagtgtcgtaatctcctgtcgtttcgtggagtccagtgttgcttttctcgccgtagccgaatgtggatgctacggcattctttgctgatactgctgtaccatatattgcagaggtagcataagaaaatttctgagcgtaactggttggtgatgctggttttggagaggtaatatgttctgggttgctttcgggtttctgagtacccaagctttcttccactgttttggggtgttgtggtgtgtaatttcctgtagtttcatgggtttccgtgtcgtttttctcgccgtggccgactttggaagcaactacttcctttgctgatactgcactgtcagctagagcagatgcgacagctgggattttctcagagattggtgctgatgatttctgagaggtttcaaggtgttgggttgtgctaattggatctagtgatgaatgttctgaagaaaattggtcatggcttccggttggtaaatgttgctttggtttcgattctgattcatcatgtatattcatcttatcgaaggaactgagtattggagtgccttctatttccttagcccctgcaaacaaacatgtaaaaatataaataagaaaatataatacccaaagatcagtcttgaccttagtcagcagctggttagttacctttgccagttggatcagtgaccttagtctgataattggaaggggtgtgcttatgggagaggtcctcaggggcttgaggatccctctccaattccttggttctttccaaattgactttggactctgactcagactcaggaacaatggttttggttggattagattccttgacatcatcagaaagcccaggatacaaagaagacaagagagcattcccaactggtttttccaaattgattttggactctgtcccaggaacaatggttctggtggcatcagaatcagattccttgatatcagaaagtccaggagacgaagaagagaaatgatcactcgctactggtttttccaaattgaccctggactgatctgtctcaggatcataggaagatttgtgtatatgttcgtgagagaaagaagaaagaggtgtatctacatctggaccctccaaatggacactactggcttctgttctaggaacaaaagctttactgtgatcaatctcattggtgttagaagtaccatgatgatgatcatcagagaaagaagtcagtggtgtttcgaaatggaccttagtggactctgttccaggaacagaggttttactatgaccagttccatggtcatgagataaagaagagctcttaccatgaccagtagtctcactgagcctagaaggcccatggtcaagagatgaagcaaagagaggtgtgttaacttctgttccaggaacagaggttttaccatcaccagtctcaatggtcctagaagcaacatgatgatcagataaagaagtcataggtgaattcactggagtagcagtactactcttaagtgggactgattcgtgtactgtaaagttattcgaaacaacactaaatcagtaagtaaaccaacattgtcacaaacatgaaccatattataaattatatgtagtaaactaatactgtaatgtaatacatacttggtgcaccgtgggtttcttggtcttcctccacttcctcatcatattcctcatcgtcgtcatcatcatcatcatcatcatgaggaacatcacgagcttgatcaccatcatgggcttggtcatggtcatcgtggacatgtttcctgatcgaactccttatcctccttgcccttgccttgaccctttgcattactgttttcttctcatgggggtgctcatcttcaccttcccctactacagatcagatcaaaacacttcatattagaaaaagaactgaggaaataaatgaagatttcattaaaacaacagtcacctaaatggggttcgccggtcttgtgagcatgtatatcttgagattgatgatccattaagacttcaaattaaatgataaatttctataagcagcagaataagagagttatagacaaatgttggatggttagtggactcagaggacaaaatgtgagaggcttataagagagaagcgttttgccatatttgcatgttgggggacgcgtggcgcattgtgaacgttacacgtggtgggaagatcagatattgtgagagagtgagttaccgacatgggtgacagctacagtataatttgtaaaacgcgtggctttaatggtgtgaggattaagataagtttattgtaatggaaagagagaataggataaatttccaaaaaaagaaagtggaaggaaaaggatataattgctgatctctgcctcttttaaaggctcaccaaccaataatgaccaatgggaactctctagtcggccaggtagagaggtgaccatacaaccataagcattgctattaatatatagagaaatgctagagagcacgagtgggtgcttagtacctttttatgtgtcaatattactattggttaaactaagtatcgggtctcatataatttaatataataacttttaaggagtatcactagctaatcgcaacgcgatatgtcgcaaaggtgctaaacatcactagtgcgtaataacaatgctctaatatataatattatattgatgtgaggggttttataatgatcggttagtggtaatttttaaaaactattttttaaaaaaaaatgttaaaaagtgttagtactgattactatttttttatgtgttaatattaatatttgtgtaattaaatattagtttaatataaataaattttaaaaactatagctaactaatcgtaaagtagacacgtctagaatttgctaagtactattattagtgcttaatagtaatgctcatttttttatgttatataaaacttaataattaattacactaatactaatagtgtcttttgataattttttatatgtaattaataatttttataatatttattaaattaaattatataagatcaatattattttatactaataatatttaataatatttttgattaatatttttctctcttgagaattatggggttccatgtctatgaacaaagagatagggctatgatagcatgttaaaaattatggggttcatctcaaaactaattgacaatgagtgaagtttcttatatataccttcattttctacaatttattctatgtgggaccaaaacactctcatacatgtcatgaccatatgagaagaatgcatccgatccttctattggtttgtcttcttctgcatattattattcgtatttattattctttattgcagttacctctctcttctctcataatcttattcatttaagtagacttcttttttttcttctttagctttttgacccattaccttgcattattgattagtaactgtttgaatgagtggtgttggaatgatatcgtagcttacaagagtattggttagatgtgtttagatatttatagttattgagtctgatatttatattgagagtaaaaaaatctttgtactctttcgatctttaatgcatacattttattttatattacattttatttatttttgaaatcgcaatacgttttatttgagtgtattgtttgtgcaccttaaaatgtaattacactagttgttttaaaaaaatgtaactacactagttttaggtatgtgacacattacccgttcattttaaatatatatttaaaaactcttttttttttttgaaatcgctttaaaaattatttgttttttttttttaaatcagtttaaaaaaataattttatctttactgtgttgtaacttttattaaaaattttgtttttttttttcaattatgtagagtgatatatgcatgttacggtatattgtaaacaataatttttttatcatttgcttctccaagcagcatgaggcggagttaactgtgaagaatgccccttgcagggggtctgatgggttcatgatcgtcaaaccaatgcatgaggacggtcagtcgagtagcgtggattttagcgtatcccagcttggattcaggtttatgagctaccccctcgtttttggacgatgaaaaacacggttgcgatcactgaacggattagctcggaggcttgcatagatcagattgtgaagaatggcttccccacccaagaatacattcgtttcagggtgaatctccagctgcgcaaaccacttctggtggatttgttcctccccatgccggagggagtaaacctttggtgttatttcaaatatgaaaatgtcccctaagtgtgctataaatgtggggtcatcttccatgaggaggtcctatgtcacagggaacataagatgattactggtgattttgaaagggatgtgccaatgtatagaccctggatccaactggggtctagaattaaagactgcttttcggaatatgccccttatgagagagacatgctagaacaggaagtggcggaggttcaaggttgggaagagttgcgtcgacatgttttacaaaaaggtgtaggatttgaaccttttctcttggggacagaaattcatagggaagcgattaccgaggtggcaaataacgatatggtctcaggcgatgggccatcggcggagttgcctggggtgacggcaggggcagtttcgtcctcttaggagcgggatgggtgcaaggacaatagtacgcttgtaccgtctgtgcagagtagtggcaatggcacaatgcatgggaatggttgaaataaagtggcaaaattgtaactagaaagtggtcccattattgtgtacggcacttaagtttattttgcccaatattttattcttttttaacccatataattcagccctaa

SEQ ID NO: 381264 - DNA, 952 bp, Cannabis indica
tcttaccccataagaagtcacgataacttttgtctatggaagcagttatttttttagggattaagaagatactcatctagtaatttctaataccaagcaataccgagtgagtggatcaattgagctcttccagcaaaagatagatttctactagcccagcaattgagattcttatttattttatcaaggatcacaccacaatccaaagccttccattttgttggacgaagattcacccctaggtactttagaggaaaggaaccctcctccatttgaatcaagtcaagaatctatcttttcacaacatatttgactccgccaaagaagatctgagactcagctttatttgcagataatctggttgtattacaaaatttagagaaggcttcctgaattattctcaccgaattcaagttgcctttgctaaataatatgagatcatctgcaaaacaaagattagtcaaacgtaggtttttgcataaaggatgaaatccaaagttccccgagcttgagtgaaggctgagaagcctggaaaggtactccattatcaaaacaaagagaagaggagacatgggatctccttgacggagacctttttcccccttgaaattgccttgaatcataccattcatcagaatatggtaatgagttccccttaggcatgtcataatccagttgatgaacctagcatgaaaacaaagctgtctcaacagatcgtcaacaaatttctagtcaacagtatcatatgctttgctcaagtctatcttcatgatgcatctcgttgatatgttctttcttgtataccccttcaggtgatcctgaaagatcatgatgttacgacctagaagtctattcttgacgaaaacaccttggttaccttgcacaataataggaaggacttcttgttggttttatgccctaaataaaactctttacaatctgattagttatc
